United States Patent Application Publication US 2002/0061569 A1 - sequence listing, part 3

SEQ ID NO: 7498 - DNA, 648 bp, Helicobacter pylori
  CDS (1)...(648)
atgagtaaggccatcgttttagacagccatttgaaagaaaagggtagcgtggagttacctaaaagatatgagggtattaacagccataatctctatctttacgtgaaacattatttatcttctgcacgcgctaataccgctaaaagtaaaaaccgcgctgaagtgagtgggggcggtaggaagccttgggcgcaaaaagggggcgggagagccagagcagggagcatcacttcgcctgtgtttgtgggtggaggtgtctctcatggggctacgaataagcgcaattacaaccttaaaatcaataaaaaacaaaaacgcttggctttagaatacgctttagaagaaaaagcgcaagcgaataagctgtttgtggtggaaaaaatcgctataaaaggcgtggttgaagacaataaaaggaagcatttgactaaagaagccaaccaaatgttccaggctttagagcaacgagacactttgtttgtgtgcttaaacatggacgaatacaccgagttagcctttagtaaccttaaaaaatgccttgttattgatgtgagcgagttaaacgcttatcttttggcggcgtttagttctgtagtgatggaagaagcagcgtttcagcatgtggtgcaagataagacagaggagtaa

SEQ ID NO: 7499 - DNA, 576 bp, Helicobacter pylori
  CDS (1)...(576)
atggaatttttagttcaaaagataggcatgagccgcaccattgacgctaacagcacgcctgtaaccttgcttaaagtcttgcaagcgaaagtgtgccagctagaaaacgggaaagctttagtggcctatgcgatgcataaaaaatacaataaggcgattgaaggccagcaaaagaaataccagctcagcaaagagtttaaccatttcgctaccttaaaagcttcccaacaaaaagagttgggcgatttggatttgagcgctttagaaacgcttaaaagggttaaagcgagctttaaaactaagggaagaggctttgcgggggtgatgaagcgttggaatttccaaggcgggcctgcagcgcatgggagtcgtttccatcgccgccctggctctattggtaacagagaatggccaggaagagtgcaaaagggtaggaaaatggcagggcattatggcaatgagctagttacttgccaaaacgaggtgctctcttttgataaagaaagtatggtgttagtgctaaagggttcagtggccggcttttctggggcttatggacgcattagagcggtataa

SEQ ID NO: 7500 - DNA, 315 bp, Helicobacter pylori
  CDS (1)...(315)
atggaaaaaatcaggttgaagctcaaagcttatgaccatagagtgttggatcgctctgttgtggctatcgtggaagccgtaaagcgctcaggttctgaaattagagggcctattcctttaccgactaagaataagcgttacaccgttttgcgctccccacatgtcaataaggattcaagagagcagtttgagattagggtttatagccgattgattgatattatctcggccaccccagaaaccgtggatagcttgatgaagttggacttagctcctgaagtggatgtagaagtaacctctatggaaacgaagtag

SEQ ID NO: 7501 - DNA, 1083 bp, Helicobacter pylori
  CDS (1)...(1083)
atgaatggtttttgcgctagactacgagccataacatttaatgaaagactaaaaatgaaaatagcggtattactcagtgggggggtggatagctcttatagcgcttatagcttaaaagagcaagggcatgaattagtggggatttatttaaaactccatgcgagtgaaaaaaagcatgatttatacattaaaaacgctcaaaaagcgtgcgagtttttaggcattcctttagaggtgttggattttcaaaaggattttaaaagcgcggtttatgatgaatttatcaacgcctatgaagaagggcaaacccctaacccatgcgcgttgtgcaaccctttaatgaagtttgggctagctttagatcacgctttaaaattagggtgtgaaaagatcgctaccgggcattatgcgagggtcaaagaaattgacaaggtaagttatattcaagaggctttggataaaactaaagatcagagctattttttatacgctttagagcatgaagttatcgctaaattggtgttccctttaggggatttgctaaaaaaggatattaagcctttagccttgaatgcgatgccctttttaggcactttagaaacttataaggaatctcaagaaatctgctttgtggaaaaaagctacattgacactttaaaaaagcatgttgaagtggaaaaagagggcgtggtgaaaaacctacaaggcgaagtcattggcacgcataaaggctatatgcaatacacgattggcaaacgcaaaggctttagtgttaaaggcgcgttagagccgcattttgtggtggggattgacgctaaaaagaacgagttgattgtgggcaaaaaagaagatctcgccacgcattcgcttaaggctaaaaacaaatctttaacgaaagattttaaagatggcgaatacttcatcaaggcccgttacaggagcgtgcctactaaagcgtttgtgagcttaaaagatggaatgattgaagtggaatttaaagagcctttttacggcgtggctaaagggcaagccttggtcgtttataaagatgatattttgcttggcgggggcgtgattgtttaa

SEQ ID NO: 7502 - DNA, 1209 bp, Helicobacter pylori
  CDS (1)...(1209)
atgttagctaaaatgtcgtttatgcaaaacgttaaaaacattcaagaggtggatgtcaatcataaaagggtgcttattagagtggattttaacgtgcctttagatgaaaatttgaatatcactgatgacacacgcattagagagagcttgcccaccatccaattttgtattgacaataaggctaaagatattattttagtgagccatttgggccgccctaaaggggttgaagaaaaattgagcttgaagccctttttaaaacgccttgaaagactcttaaatcatgaagtggttttttctcaaaatatcgcgcaactcaagcaagccttaaacgaaaacgcgcccacaaggatttttcttttagaaaacatccgctttttaaaaggcgaagaagaaaatgatgaaaatctggctaaagatttagcgagcttgtgcgatgtgtttgtgaatgacgcttttggcacgagccacagaaaacatgccagcacttatggcaccgccaaattcgctcccataaaagtgagcgggtttttgcttaaaaaagaaattgattcgttttatcaagcgtttaaccaccctttacgccctttattgttgattgtggggggggctaaggtcagctccaaactcactttattaaaaaacattttagatctcattgacaagctcatcattgccggggcgatgagcaacaccttcttaaaagccttaggctatgatgtgcaggattcttctgtggaagacgccctaatcaatgacgccctagaattattgcaaagcgcgaaagaaaaaaaagtcaaagtctatttgcctatagacgccgtaaccactgatgacattcttaaccccaaacacatcaaaatttcacccgtccaagacattgagcctaaacacaaaatcgctgatatagggcctgcgagcctgaaattattttctgaggtcatagagagcgcgcccaccattttatggaatggccccttaggcgtgcatgaaaagcaagaattcgctagaggcacaacctttttagcccacaagatcgctaacacttacgctttctcgctcattggggggggcgacaccattgatgcgatcaatcgcgcgggcgaaaaggataacatgagctttatctctaccggtgggggggcgagcttggaactattagagggcaaaattttaccttgttttgaggttttggacaaacgccattaa

SEQ ID NO: 7503 - DNA, 993 bp, Helicobacter pylori
  CDS (1)...(993)
atgccaatcaaaatcgctatcaatgggactgggcgcatcggtttgtgcgctataagagtcgccagtcaaagaaaagacgtggaaatcgtagccatcaattctaccgctgaattagaaactcttttgcatttgatacgccatgatagcgtgcatgggcattttgaagccaaattaaacgccaatagaaccctaaatatcgggcatagtaaaaatattttagtgttgagcgagcgagacattaacaagcttgatttttctgtcgctaacgcagaaatcatcatagaatgcaccgggaaattcaattccctagaagcttcaagcgctcatcttaaaaacagcgtgaaaaaagtcatcatctccgcccccgcgcaaaacgcccccacctttgtctatggggtgaatcacactaattaccataacgaaagcgtgatttctaacgcctcttgcacgactaacgctaccgctcccttactcaaaatcttagatgaagcctttaaagtagaaaacgcgcttttaaccaccatccacagctacactaacgatcaaaaccttttagacaccaagcacaaggatatccgccgcgctagagcggccagccttaacctcatccccacaagcaccggcgtgagcaaagccatttcgctagtcttaccgcatttaggccctaagattacaggccttgcgattagagtgcctacccctaatgtgagcttggtggatttgtctttaaattttaaaaaagttgtgagtaaagcaagcgttcagcatgcgcttaaagacgccagtaagcatgcctttaaagggattgtaagcgttgatgaagaaaggctcgtttcaagcgattttatttcttcgccttttagcgcgatcgtgattgatgatcaaatcatgacaataggcgaaaaaaatgctaaagtattggcatggtatgataatgaaatgggttatagcgagcgcttgatagacatggcgcaatatatagcgcaaaattaa

SEQ ID NO: 7504 - DNA, 480 bp, Helicobacter pylori
  CDS (1)...(480)
atggaacaaagccatcaaaacttacaatctcaattttttatagagcatatcttacagattttacctcaccgctaccccatgctcttagtggataggattatagagttacaagccaatcaaaaaattgtcgcttataagaatatcacttttaatgaagatgtgtttaacgggcatttccctaataagcccattttcccgggcgttttgatcgtagagggcatggcgcaaacgggagggtttttagctttcactagcttgtgggggtttgaccctgaaatagccaaaacaaaaatcgtgtatttcatgacgattgacaaggttaaattccgcattcctgtaaccccaggcgacagattagaataccatttagaagtcttaaagcataagggcatgatctggcaagtgggcggcacggctcaagtggatggcaaagtggtcgctgaagccgaattaaaagccatgatcgcagagagagaataa

SEQ ID NO: 7505 - DNA, 849 bp, Helicobacter pylori
  CDS (1)...(849)
atgcaagagatttttttatgttctatttccaatgtgcgcagtggggattgcaaggaagattgcgcttattgcacgcaaagctcgcaccaccaaggagcgatcaagcgctataaatttaaagatgaaaaagtggttttacaagaggctagggctttaagggagttaggggctttagggttttgtctggttacttcagggcgcgaattagacgatgaaaaatgcgaatacatcgctaaattagcaaaagccatcaacaaagaagaattaggcttgcatctgatcgcatgttgcgggcgcgcggatttggagcaattagagtttttaagagatgcgggcatccatagctataaccacaatttagagacttcgcaaaattttttccctaaaatttgcaccacacacacatgggaagaaaggtttatcacatgcgaaaacgctttaagggcggggttaggcttgtgcagtggggggatttttgggcttaatgagagctgggaagatcggattgaaatgcttagggcgttagcttcactttccccacacaccacgccgattaattttttcattaaaaacccggtattacccattgatgcagagactttaagcgcggatgaagccctagaatgcgtgcttttagctaaagagtttttgcctaacgctaggcttatggtggctggggggcgtgaagtggtgtttaaggataacgataaacaggaagccaagctttttgaatacggcatcaatgcggtggtgttaggggactatttgaccaccaaaggcaaagcccctaaaaaagatatagaaaaactgctctcttacggcttgacaatggcgacaagctgtcattaa

SEQ ID NO: 7506 - DNA, 780 bp, Helicobacter pylori
  CDS (1)...(780)
atgctagaaaccactattgatttttctcgttacagcagcgtgaaaatcggtgcgcctttaaaagtgagcgttttagaaaacgataatgaaatctctcaagaacaccagatcataggattagcgaacaaccttttaatcgctcctgacgtgaaaaatctcgctttattaggaaaaaactacgattatatttgcgataagggtgagtgggtggaggtagggggagcggccaatgcgtctaaaatttttaattattttagggcgaatgatttagagggtttagagtttttagggcaattgcctggcactttaggggcgttagttaaaatgaatgctggcatgaaagaatttgaaataaaaaatgttttagaaagcgcttgcgttaatggcgaatggctagaaaaagaagctttggggctagattatcgcagcagcgggtttaatggcgttgttttgagggctaggtttaaaaagacgcatggttttagagaaggggttttaaaagcgtgtaaaagcatgcgcaaaagccaccccaaattgcctaattttgggagctgtttcaaaaacccgcctaacgattatgcgggcaggcttttagagggcgtgggcttaaggggttattgtctaaaaagagtgggctttgccaaagaacatgcgaattttttggtgaatttggggggcgcagaatttgaagaagccctagatctgatagaactcgccaaaaccagagtgctacaagaatatggcattcatttagaagaagaagtgaaaattttaaggtag

SEQ ID NO: 7507 - DNA, 2763 bp, Helicobacter pylori
  CDS (1)...(2763)
atgaaagaatacaaagacaccttaaacttaaacgaaaccaccttttctatgaaagggaatttgagcgttaatgagcctaaaacttacgccaaatggcaagaacaacaagcgttcaaacgcatgcaaaataggaaagataaccatggggatttcactttgcatgatgggccgccttatgcgaacgggcatttgcatttagggcatgccttaaataagattttaaaagacattgttattaaaagggaatattttaaggggaagaaaatctattacacgcccggttgggattgccatggcttacccattgagcaacaaattttagaacaattggaaaaagaaaaaacgagcctagaaaaccccacgctgtttagagaaaagtgccgagatcatgcgaagaagtttttagaaatccaaaagaacgagtttttgcaattaggcgttttgggagattttgaagatccttataaaaccatggattttaaatttgaagcgagcatttatagggctttagtgggagtggctaaaaaagggcttttgaaagaacgccacaagcctatttattggagttatgcatgcgagagtgctttagcggaagctgaagtggaatacaagatgaaaaaatcgccctccattttcgtggcgtttgatttgaaaaaggagggtttagaaaaattaaaagtcaaaaaagcgagcttggtgatttggacgaccacgccttggactttgtatgcgaatgtggcgatcgctttgaaaaaagacgctgtttatgcgctcacccaaaaaggctatttagtcgctaaagccttgcatgaaaaattagccgctttaggggtggtggataatgcgatcacgcatgaatttaattccaatgatttagaatatttagtggctacaaacccgctcaatcaaagggattcgctggtggttttaggggatcatgtgagtttagaagacggcacaggagccgtgcataccgcgcccgggcatggtgaagaggactactatctgggcttaaaataccatttagaagtgttgatgtctgtagatgaaaagggttgctatgatgagggcattatccataaccaattattggataaaagctatctgggcgaacacatttttaaggctcaaaaacgcattatagagcaattgggcgattctttattgttggagcgagagattgagcattcctacccgcattgctggaggacgcacaagcctgtgatttatagagcgaccacgcaatggtttattttaatggatgagccttttatccaaaatgatggctctcaaaaaaccttaagagaagtggctttagatgcgattgaaaaggtggaatttgtgccaagcagcgggaaaaaccgcctaaaaaccatgatagaaaaccgccctgattggtgcttgagccgtcaaagaaaatggggcgtgccactggcctttttcatagacaaacgcaccaataagccatgttttgagagcgaagttttagaacatgtggccaatctttttgaagagaaaggttgcgatgtgtggtgggaatataacataaaagatttattaccccctagctatcaagataacgccaagcattacgaaaaagtcatgcacattttagacgtgtggtttgatagcggtagcacctttaaggcggttttagaagactatcatggggaaaaagggcaaagccctagcgatgtggttttagaagggagcgatcagcatagggggtggtttcaaagctcgcttttaatcggttgtgttttaaataatcaagccccttttaaaaaggtcattacgcatggatttatcgtcgatgaaaagggcgaaaaaatgagcaaatctaagggcaatgtggtgtctttggacaacttactcaaaaagcatgggagcgatgtggtgcgtttgtgggtagcgtttaatgactatcaaaacgatctaagggtctctcaaacctttttcattcaaacagaacagcattataaaaaattccgcaacacccttaaattcttactcgccaattttagcgatatggatctcaagaatttagaacgcccccatgactttagccctttagatcattttatattagaggctttagaaacgataagcgctggagtcaatagcgcgtttgaagagcatgatttggtgaagggcttgaatattttaatggcgtttgttaccaacgaattgagcgggatttatttagacgcttgtaaggatagcttgtattgcgatagcaaaaataatgaaaaacgccaagccattcaaatggtcttactcgctgtggctagtcaattgtgctactttttagccccgattttaacgcacacgattgaagaagttttagagcatagccaagtgttgcgcgcgtttttacaagccaaagatgtgtttgatttaaaaggcattagcgttttagaaaaactccaccttaaagagtttaaaaagccagaaaattttgaagccgttttggccttgcgctctgcctttaatgaagagttagaccgattgaaaaaagaaggcgtggttaaaaattcgttggaatgcgctattgaagtgaaagaaaaagcgttgtgtgaaaatttagtagaagaattgctgatggtgagctttgtgggggttgcaaaagaaaaattgagcgaaacgccagcattcacgctctttaaggcccccttttataaatgccccaggtgttggcgttttaaaagcgagttagaaaacaccccttgcaagcgctgcgaagaggttttaaaagagcgatga

SEQ ID NO: 7508 - DNA, 135 bp, Helicobacter pylori
  CDS (1)...(135)
atgaaacgcacttaccaaccacataacacaccaagaaagcgaacccatggctttcttgtgagaatgaaaaccaaaaacgggcgcaaggtgattaatgccagacgagctaagggcagaaaaaagctttccgtctaa

SEQ ID NO: 7509 - DNA, 1386 bp, Helicobacter pylori
  CDS (1)...(1386)
atgaaaaatacatcgtcatcaacgactttaacaatgaatgacaccattgccgctatcgctacccctttaggcaagggagcgattagcatcattaaaatcagcggccataacgccctaaacatcctcaaacaactcacccaaaaacaagacttcacccccagatacgcttacgtgtgcgacattttttctgatggcgttttattggacaaagcgttagtgatttatttcaaagccccctatagtttcaccggtgaagatgtgtgcgaaatccaatgccatggaagcccccttttagcgcaaaatatccttcaagcttgcttgaatttaggggctaggctcgctaaagcgggggaatttagcaaaaaagcctttttaaaccataaaatggatttgagcgagattgaagcgagcgttcagctcatcctttgtgaagatgaaagcgttttaaacgctctagccaggcagctcaagggcgagttaaaaatttttattgaagaggccaggaataatcttttaaagcttttggcgagctcagaagttttgattgattatagcgaagaagacatccctagcgattttttaaaggaagtgtcttttaatttagaaaaacaaatcgcctcttttaaagatttattggatttttctaacgcgcaaaaacaaaggaataaggggcatgccttaagcattgttggcaaacccaatgccggcaaaagctccctattaaacgccatgcttttagaagaaagggctttagtgagcgatattaaaggcacgacaagagacaccatagaagaagtcattgaactaaaagggcataaggtgcgcttgattgatacggctggcattagagagagcgcggatgaaatagagcgtttagggattgaaaaaagccttaaaagtttagaaaattgcgacatcattttaggcgtgtttgatctttctaaacccctagaaaaagaagattttaaccttatggacacccttaatcgcactaaaaagccttgtattgtcgttttgaataaaaacgatttagcccccaaactagagcttgaaattttaaaatcttatcttaaaatcccttattctatcctagaaactaacaccttaaattccaaggcttgcttgaaagatttgagccaaaaaatcagtgaatttttccccaaactagacactcaaaacaagctcttgctcacttccctagcccaaacaaccgccctagaaaacgccattactgaattgcaaaacgctaaaagccatttagacactttagagcttttttcttatcatattttaagtgcgatagaaaacttgaacttgctcacccgcccttatgaaaccagccagatgcttgatagcatgttcagcgaattttgcttaggcaaatga

SEQ ID NO: 7510 - DNA, 789 bp, Helicobacter pylori
  CDS (1)...(789)
gtggagggatttagcttgaggatcaaccaatttttagcccattacaccaagcactcgcgcagagaagccgaaaaattggttttagaagggcgggtgaaaatcaatcatgagcatgccaaactcgctagcgtggttaaagaaaacgacaaggtgtttttagacaaacgactcatcaagcccttaaaaaacaaaaaattcagcgtgttagtctatcacaagccaaagggcgaactagtgagtaaggccgatcccttaaaacggcacgtgatttatgaaagcttggagaaaaaatacgcccattttgcgccggtggggcgtttggattttgcgagcgagggggtgctactcttaagcgatagtaaggcggtggtgagcgctttaatgcatgcgaatttagaaaaagagtatcttgttaagattcaaggctttgttacaagagagatggaaaacgccatgcaagagggcttgaaattagaaaacgccactaaaggagcgcaccaaaaaacccccattaaaagcatggaatttgccccttttattggttatgaaatcatcaaaaaccatgccaaatattctaagcttagagtcattattaatgaggggaaaaacagagaattaaggcgtttttttgcgttttttaacgctggagtgttggatttaaggcgcgttcgttatggttttgtgaatttgaatgccttgccggtagggaaagcgcgttttctaaaccgccaagaatacaacgagttgcatgcgtttatggctaatagggctaatgttaaaggggattag

SEQ ID NO: 7511 - DNA, 3636 bp, Helicobacter pylori
  CDS (1)...(3636)
atgaaagagaataaagccttcacgcatttgcacttacacacagaatattcgcttttagacggggcgaataagattaaaatcttagccaaacgcattaaagaattgggcatgaaaagcgtgagcgtaaccgaccatgggaacatgtttggagcgattgatttttacacgagcatgaaaaaagaaggcattaagcctatcatcggcatggaagcgtatatccataacgatgacaacctctctagcaaagaaaccaagcaacgcttccatttgtgcttgttcgctaaaaaccaagagggctatgaaaatttgatgtttttaagctctatggcgtatttagaagggttttattatttcccgcgcatcaataaaaagcttctaagggagcattctaaaggcattatcgcttctagcgcgtgcttgcaaggggaagtcaattatcatttgaatactaacaatgagagaaaccgcaagtatggggctaaaggctatgatgaagctaaaagaatcgcttgcgaataccaagagatttttgaagacgatttttatttagaaatcatgcgtcatggcattttagatcagcgattcattgatgaacaagtcattaaaatgtctttagaaacagggttaaaaatcattgccaccaacgacacccactacaccatgcctaatgacgctaaggctcaagaagtagcgatgtgcgtagcgatgggtaaaaccctaaacgataaggggcgcttgaaacactccgtgcatgagttttacattaaatcccctgaagaaatggcgaagctgtttgcagatattccagaagctttagaaaacacccaagaaatcgctgataaatgcgttttagagattgatttaaaagacgataaaaagaatcccccaacccccccaagtttcaaattcactaaagcttacgctcaaaatgaggggctgagttttgaagatgacgcttcttatttcgcccataaggctagagagggcttgagagaacgcttaatcttagtgccagaagaaaagcatgaacaatacaaagagcggctagaaaaagaaattgaagtcattacgaacatgaaattcccagggtatatgctgatcgtgtgggattttatccgttacgctaaagaaatgggcattcctgtagggcctggtagggggagtgcggccgggagtttggtggcttttgccttaaaaatcaccgatattgaccctttgaaatacgatttgctctttgaaaggtttttaaaccctgaacgagtcagcatgcctgatattgatacggatttttgccagcgccggcgtaaagaaatcatagaatacatgattgaaaaatacggcaaatacaatgtggcacaagtcatcacctttaataagatgttggctaagggcgtgatcagagatgtcgcaagggttttggacatgccttataaggaggctgatgattttgccaaactcatacctaatcgcttaggcatcacgcttaagggctatgaaaaaaatggcgagttcatagagggggcgtgggaattagagcctaaaatcaaggaattggtggagagcaatgaagtagccaaacaagtgtgggaatattcgctcaatttagagaatttgaatcgcaacgcaggcgtgcatgccgcagccttagtggtggatagccaaaaagaattgtggcacaaaacccctttatttgcctctgaaaaaaccggcggtatcgttacgcaatattccatgaagtatttagagccggtggatttgatcaagtttgacttcttggggcttaaaaccttgaccgtgattgatgatgcgcttaaaatcattaaaacgcaacataacattgatgtggattttttatcgttggatatggacgatccgaaagtgtataaaacgatccaaagtggggatacggtggggatattccagattgaatccgggatgtttcaagggcttaacaagcgcttaaggccttcaagctttgaagacattatcgccattatcgcgctaggcagaccaggacccatggaatcaggcatggtagatgattttgtgaacagaaagcatggcgttgagcctatcgcttatgcgtttaaagaattagagccgattttaaagcccacctacggcacgatcgtctatcaagagcaggtgatgcaaatcgtgcaaactatcggcggttttagtttgggtgaagcggatctcatccgccgcgctatggggaaaaaagacgctcaaatcatggcggacaataaggccaagtttgtagaaggcgctaaaaatttagggcatgatggccaaaaggcggctaatttgtgggatctgatcgttaaatttgccggctatggtttcaacaaatcgcattcagccgcttatgcgatgatcactttccaaacggcgtatttaaagacttattacaagcatgagttcatggcagcgatgctcactagcgaatccaataagatcgaatccgtggcgcgctatattgatgaggttagggctttagaaattgaagtgatgcctccgcacatcaattcttctatgcaagatttcagcgtggcggagtttaaaaatcaaaagggcgaattagaaaagaaaatcgtgttcggtttgggagcggttaagggggttgggggtgagccgattaaaaacatcattgaagaaagggctaaaggggattataagagtttggaagatttcatttcacgggtggatttttctaaactcactaaaaaatctttagagccattggtgaaatcagggagcttggacaatttgggctacactagaaaaaccatgctcgctaacttggatttgatctgtgatgctgggcgcgctaaagacaaggctaatgaaatgatgcaagggggtaattctctttttggagccatggaaggcggaattaaagagcaggttgttttggacatggttgatttgggcgaacatgacgctaaaacgcttttagaatgcgaatacgagactttaggaatccatgtttcaggcaaccctttagacgagtttaaagaagaaattaagggctttaaaaatttagtcaaaagcattgatattgaagagctagagattggctcgcaggcttatttgctcggtaaaatcatggaagttaaaaagaaaattggcaaacgaagcggtaagccttatggcacagcggacattttggatcgatacggcaagtttgaactcatgctttttgaaaagcaattaaacgctttagaagagttggatattaataagcccttagtgtttaaatgcaagattgaagagcaagaagaagtggcgcgattaaggctttttgaaatcttggatttagagagtgctagggaggttaaaatccctaaagcccgctataaagaccctgaaaagcaaaaagaagacgtgcgcgaaatcccccccatggaaatgctcgcttctagctcttgctctttggcgatcgtgttagaaaacgatgtgaaaaaagagtttttaagacaaatcaaagagagcgctctaaaacaccagggtaaacgccccttgtatttgatcatcaaagataaggataagcaattcaaaatccaaagcgatttaatggtaaatgaaaagattaaggacgattttaaagggttagagtggagggatttagcttga

SEQ ID NO: 7512 - DNA, 2694 bp, Helicobacter pylori
  CDS (1)...(2694)
atggagcagccagtcattaaagaagggactttagctttaattgatacctttgcgtatttgtttagaagctattacatgagcgctaaaaataagcctttaaccaacgataagggctttcctacagggcttttaacggggcttgtgggcatggttaaaaaattttataaagacagaaaaaacatgccttttatcgtgttcgccctagaaagccagactaaaactaaaagagctgaaaaactgggcgaatacaaacaaaatcgtaaagacgcccctaaagagatgcttttacaaatccctatcgccttagaatggttgcaaaaaatgggttttacttgcgtggaggtgggagggtttgaagccgatgatgtgatcgcaagtttagccacgctaagcccttataaaacccgcatttattctaaagataaggattttaaccagcttttgagcgataaaatcgcgctttttgatggcaaaacggagtttttggcgaaagattgcgtggaaaaatacgggattttgccgagtcaattcacggattatcagggcattgtgggggatagcagcgataattacaagggggttaaaggcattgggagcaagaacgctaaggaattgttgcagcgattagggagcttggaaaaaatctatgaaaatttagacttggcgaaaaatttactcagccctaaaatgtatcaagccttgatacaagacaaaggaagcgcctttttaagcaaagaattagccactttagaaagaggatgcattaaagaatttgattttttaagttgcgcttttccgagcgaaaaccccttgttgaaaatcaaagatgaattgaaagaatatggtttcatttctaccttaagggatttagaaaattcccctttcattgtagaaaacgtgcccatattaaacagcacgcctatattagacaatacccccgccttagacaacgcccctaaaaaatcgcgcatgattgttttagaaagcgctgagcctttgagcatgtttttagaaaaattagaaaaccctaacgctagggtttttatgcgtttggttttggataaagacaaaaaaattctagccctagcgtttttattacaagatcaaggctattttttacctttagaagaggcgttgttttcgcccttttctttggaatttttacaaaacgctttttctcaaatgttacagcatgcgtgtatcattgggcatgatttaaagcctttattaagctttttaaaagccaaatatcaggtgcctttggaaaatatccgcatccaagacactcagattttagcgtttttaaagaatccggaaaaagtggggtttgatgaggttttaaaggaatatttaaaagaagatttaatcccgcatgaaaagatcaaagattttaagacaaaaagtaaggcggaaaaatcagaacttttaagcatggaattaaacgccttaaagcgtttgtgcgaatactttgaaaaaggggggctagaagaggatttgctcactttagctagagacattgaaacgccgtttgtgaaagttttaatgggcatggaatttcaaggctttaagattgatgcgccttatttcaagcgcttagagcaggagtttaagaatgaattaaacgttttagagcgccaaattttggatctaatcggcgtggatttcaacctcaattcgcccaagcaacttggcgaagtcttgtatgataaattagggcttcctaaaaataaaagccactctaccgatgaaaaaaacttgttaaaaatcctagacaagcacccaagcatccctttgattttagaatacagggaattgaataagctttttaacacttacacgacccccttattgcgcttaaaagacaaagacgataaaatccataccactttcatccaaaccggcacagctaccgggcgtttaagctcgcattcgcctaatttgcaaaatatcccggtgcgatcgcctaaaggcttactcattcgtaagggttttatcgctagctctaaagaatattgtttattaggggtggattattcgcagattgaattacgcttgttggcccatttcagccaggataaggatttaatggaagcgtttttaaaggggcgagacatccatttagaaacttctaaggcgttgtttggagaagatttagccaaagaaaaacgatccatcgctaaaagcattaattttgggctggtgtatggcatggggagtaagaaattgagcgaaactttaagcatccctttaagtgaggctaaaagttacatagaagcgtatttcaagcgattccctagcattaaagattatttgaatggcatgcgagaagagattttaaaaacttctaaagcttttactttgctggggcgttaccgggtgtttgattttaccggcgtgaatgattatgtcaagggcaattatttgcgagagggcgtgaatgcgatttttcaagggagtgccagcgatttattgaaattaggcatgcttaaagtgagcgagcgtttcaaaaacaacccttcggtgaggctgcttttgcaagtgcatgacgaattgatttttgaaattgaagaaaaaaacgccccagagttgcagcaagaaatccaacgcattcttaatgatgaagtctatcctttgagggtgccgttagaaacaagcgcgtttatcgctaagcgttggaatgaattaaaaggttag

SEQ ID NO: 7513 - DNA, 576 bp, Helicobacter pylori
  CDS (1)...(576)
atgtatgtggtgttagaaggcgttgatggcgcgggcaaaagcactcaagtaggattgttaaaagaccggtttaaaaacgccctttttaccaaagagccaggggggacgagaatgggcgagagtttaaggcgtatcgctttaaatgaaaacatcagcgaattggctagagcgtttttattcttaagcgatagggctgagcatatagaaagcgtgataaaaccggcattgaaagaaaaaaagctcatcattagcgacaggagtttgatttctggcatggcttatagccaattttcaagcttagaattaaacctgctcgccactcaaagcgtcttacctgaaaaaatcattctgttactcataaataaagagaacttaaaacagcgcttaagccttaaaagtttagacaaaatagaaaaccaaggcatagaaaaattgctcaccatccagcaaaagctcaaaacccacgcttatgcgttacaagaaaaattcgggtgcgaagttttggaattagacgctcaaaaaagcgctaaaaacttgcacgaaaaaatcgccacctttattgaatgcgttgtttaa

SEQ ID NO: 7514 - DNA, 741 bp, Helicobacter pylori
  CDS (1)...(741)
atgaaaaaagaaaatcgcctcaagcaagaaaaaatcatcaacatgtttgatgatatagccagctcttacgatcaagccaaccgcttgatgagttttggcttagacgttaaatggcgccaaagggcttgcgagcatgcgtttttgtttttggaaaacaagaaagcgttaaggcttgtggatgtggcatgcggaacaggggatatgcttgtggcttggcaaaaaagcgctctcaattgcggtatagagtttaaggagtgtttggggattgacccctctaataacatgcttgaattagccattaaaaaatgtgaagagcttgaaaacaaagcttctttcatccaagctcaagccaaagatttaaaaggcgttgaaaataacagcgtggatattctctccattgcgtatggcttgcgtaatatcgtggaaagacaagaagctttaaaggagttttttagggtgttaaaaaccaggggcgttttagtgattttagaatttttaaaaaaagacaaccccacatggctggataaaatctcagggttttacacgaataaggttttgcctttggtgggaggggctatcagtaagaattatggtgcttattcttatttaccgcagtccattgaggggtttttgagtttggagggtttgaagaatgaattaaaaaacgcagggtttgagattttaaggactgaagattctatcgctcaaatttcaacgaccatgcttgttaaaaaaagctaa

SEQ ID NO: 7515 - DNA, 1602 bp, Helicobacter pylori
  CDS (1)...(1602)
atggaaattagaaacatcaaagagtttgaaaaagcttccaaaaaactccaaaaagacactttaaagatcgctctcgctcttttgttcctcattggcgccgctttgctcgctctcatttttgggcaggctaattctaagggattgttgctcatctttgcggccgtgattggggggtatatggcgatgaatattggcgcgaacgatgtgtctaataatgtcggccctgccgtaggctctaaagccattagcatgggtggggcgattttgatcgctgcggtttgtgaaatgctaggagcgatcattgctgggggggaagtggtttctacgattaagggccgtatcgtttcgcctgaatttattaacgatgcgcatgttttcattaatgtcatgttggctagccttttgagtggggcgttatggttgcatgtagccactttaataggcgctcccgtttccacttcgcactccgtagtgggagggattatgggggctggaatggcagcagctggaatgtctgctatcaattggcattttttatccggcattgtggctagttgggtaatctcgcctttaatgggggctttgatagccatgttttttttaatgctcattaaaaagactatcgcttataaagaagataaaaagagcgcggctttaaaggtcgtgccttatttggtggcgttgatgagcttagcctttagctggtatttgatcgtgaaggttttaaaacgcctctatgcggtgggttttgaaatccagctcgcttgcggttgtgtccttgcgcttttgatttttatcctttttaaaagatttgtgttaaaaaaagccccgcaattagaaaatagccacgaaagcgtcaatgagctttttaatgtccctttgatttttgccgccgcgcttttaagctttgcgcatggggctaatgatgtagctaacgctatcggtcctttagccgcaatcagtcaaactttagaagatgcgagcagccctatggggagtactttaaactctgtgccgttgtggattatggtagtaggggcagctgggatcgctttaggcttgagcttgtatgggccaaagctcattaaaacggtggggtctgaaatcacagaattagacaaaatgcaagctttttgcatcgcgctttcagcggtcatcaccgtgcttttagcctctcaattaggcttaccggtaagctctacgcatattgtggtgggcgcggtgtttggggtgggctttttaagggagcgtttgagggagcaatccagaaggcgttttgctagaatcagagacaacattgtagcggcgcactttggggaagatttagaagaaattgaaggctttttagagcgctttgataaagccaatttgaaagaaaaatcgctcatgctagagagcttgaaaaaaagcaagaacaccgctatcgctttggaattgaaaaagaaagaaaaaaagtcgcttaaaaaagtgtataaagaagaagtgatcaaacgctccattttgaaaaagattgttaccgcttggttggtaaccgtgccggtttctgcgcttttaggggcgcttctttttgtagctcttggttttatagaaaagtatttctag

SEQ ID NO: 7516 - DNA, 1344 bp, Helicobacter pylori
  CDS (1)...(1344)
atgaagcttaaaaaaaccctgacttatcaacaccacgcctattcttttttaagcgataacacgaatgaagttttagaaaaccctaaagaaatcctttttgtcaaaacgcctttaaacgaaaaatacgcccctttaatcgcagaaaaaaacctggctattttggattttaacgagcttaaaaactactttgattttaagattaagattgtagggattacaggcactaatggtaaaacgaccacagcgagcttgatgtattccttgctcttagatttgaataaaaagaccgctcttttaggcacaagagggttttttatcgacgacaaacacatcaaagaaaagggcttgaccacgcccactcttttagagctttatagcgatttggaagaagcgattcgtttaaaatgcgaatacttcattatggaggtgagctcccatgcgattgtccaaaaacgcatcgctgggcttgatttcgctcttaaaattctcaccaatatcacaagcgatcatttagatttccatcaaaatatagaaaattacagggacgctaaaaacagcttttttaaagatgagggcttaaaagtcatcaacagagatgaaacaaacgccctttttaaccccattaacgcgcgcacttacgcactggataaaaaagcgcatttgaatgttcaagccttttcgctcaacccttccattagcgcgtctttatgctaccaacacgatttaagagatcccaatcttaaagaaaccgccctgatccattccccccttttagggcgttacaacctttataatattttagcgggcgttttaggggttaaattgctcactcaattgcctttagaaacgatcgcaccgttattggaaaacttttatggggttaaggggcgtttggaaattgtacattctaaacctttagtggtcgtggattttgcccacacaacagacggcatgcaacaagtttttgaaagctttaaaaatcaaaagatcaccgctctttttggggcagggggcgatagggataaaaccaagcgccctaaaatgggagcgatagcgagttgttacgcgcatcaaatcatcttaacttcagacaatcctagaagcgaaaacgaagaagacatcattaaggatattttaaaaggcatcaataattcttctaaagtcattgtagaaaaagaccgaaaaaaggccattttaaacgctttagaaaatttaaaagacgatgaggtgttgttgattttaggcaagggcgatgaaaacattcaaatctttaaagacaaaacgattttttttagcgaccaggaagtcgttaaagattattatctcaatttaaaacaaggataa

SEQ ID NO: 7517 - DNA, 663 bp, Helicobacter pylori
  CDS (1)...(663)
atggaaggcgttttaaatttcctaaccaatatcaatgtgattttcacccttttgggctatttgattggggggattccttttggctatgcgttaatgaaaatcttttatggcatggatattactaaaatcggatcggggggtattggcgcgacgaatgtcttacgcgctttacaaagtaagggcgtgagtaacgccaagcaaatggccttattagtcttaatcttggatctattcaaaggcatgtttgcggtgtttttaagcaaattgtttgggttagattatagtttgcaatggatggtcgctatcgctagtattttagggcattgctattcgccttttttgaatttcaatggaggcaagggcgtttctacgatcatgggctctgtggtgttgctcatccctattgaaagcctgatcggcttgacggtgtggttttttgtgggtaaggtgcttaaaatctcttcactcgctagcattctaggggtaggcacagcgactgttcttatcttttttgtgccttatatgcatatcccagatagcgtcaatatccttaaagaagtcggcacgcaaacgccgatggtgcttatttttattttcacccttatcaagcatgcaggcaatattttcaatttattgaccggcaaagaaaagaaagtcttatga

SEQ ID NO: 7518 - DNA, 1188 bp, Helicobacter pylori
  CDS (1)...(1188)
atggaaaaaatcagcgaccttatagaatgcattgcgtatgaaaaaaatttgcctaaagagatgatttcaaaagtgattcaaggctgtttgttaaaaatggcgcaaaatgaattggaccccctagcgcgctacttggtggttgaagaaaacaagcagctccagcttatccagttggtggaagttttagaagacgatgatgaaaggttggttaacgatccttctaaatacatcagtctgtctaaagccaaagaaatggatccaagcgttaagattaaagacgaattgtcctatagtttgagtttggagagcatgaagcaaggagcgatcaaccgcctttttaaagatttgcaataccagctagaaaaggcgttagaagacagccactttgaagcgttccaaaagcgccttaacagcgttttaatggggcaagtgattttagtggatcacaatcaaaacacttttattgaaatcgagcagcaattccaaggcgttctttccatgcgccatcgcatcaagggcgaaagttttaaaataggcgatagcatcaaggcggttttaacgcaagtcaaacgcacgaaaaagggcttactattagagctgagtcgcaccacccctaaaatgcttgaagccttgttggaattagaagtccctgaaattaaagataaagagattgaaatcatccattgcgcgcgaatcccaggcaacagggcgaaagtgagctttttttcccataactctaggattgatcccataggcgcagccgtgggggttaagggcgtgcgcatcaatgcgataagtaacgaattgaataaagaaaacattgattgcatagagtattctaatgtgcctgaaatttatatcactctcgcactcgctccagccaaaattttaagcgttgaaattaaaaaaatccccatagaagaattgagtgctgaagaaaaagaatccattcaagagcgtttcattgtcaataaccatttgcaaaaggctaaagtacgtttattagacattgaaaaatctaaggctatcggtaaaggcggggtgaatgtgtgcttagcgtccatgcttacaggctatcacatagagtttgaaaccattcctagcgtcaaggaaaacgcagaaaatgaaaacgaaaaagaaacgccaaaagtaggggtagaagctttagagtctttgtttaagaattga

SEQ ID NO: 7519 - DNA, 1374 bp, Helicobacter pylori
  CDS (1)...(1374)
atggataccaacaataatattgaaaaagaaatcttggcgctagtcaaacaaaatcctaaagttagcctcatagagtatgaaaattacttgagccaactcaaatacaaccctaacgcaagcaagagcgatattgcctttttttatgcccccaacaaattcttatgcaccacgattacggctaaatacggtgcgttgctcaaagaaattttaagccagaataaagtcggcatgcatttagcccacagcgtggatgtgcgtattgaagtagcacctaaaatccaggttaatgcccaatctaatatcaattacaaagccacaaaaacgagcgtcaaagactcttacacttttgaaaattttgtcgtaggctcatgcaacaacaccgtttatgaaatcgctaaaaaagtcgcccaaagcgatacccccccttataacccggtgcttttttatggcggcacagggttaggcaaaacgcacattttaaacgctatcggtaaccatgccctagaaaagcataaaaaagtcgtgttagtcacttcagaagattttttgacagactttctaaagcatttagacaacaaaaacatggattcttttaaaaaaaaataccgccattgcgactttttcttgttagatgacgcccaatttttgcaaggaaaacccaagctagaagaagaatttttccacacctttaacgaattgcacgccaacagcaaacagatcgtattgatttcagaccgatcgcctaaaaacatcgccggcttagaagatcgcttaaaatcgcgctttgaatgggggataaccgctaaagtcatgccccctgatttagaaaccaaactttccattgtcaaacaaaaatgccagctcaataaaatcactttgcctgaagaggtgatggaatacatcgcccaacacatcagcgacaatatccgccaaatggaaggcgcgatcattaaaatcagcgtgaacgcgaacttaatgaacgccaccattgatttgaacctcgctaaaaccgtcttagaagatttgcaaaaagatcatgctgaaggctcaagcctagaaaatatcttgctcgctgtcgcacaaagcttgaatctcaaatctagcgaaatcaaagtctcttcgcgccaaaaaaacgtcgctttagcgagaaaattagtcgtgtatttcgccaggctctacacccctaaccccacgctctcgctcgcccaatttttggatttaaaggatcattcaagcatttctaaaatgtattctagcgttaaaaaaatgcttgaagaagaaaaaagcccttttattttaagccttagagaagaaatcaaaaaccgcttgaacgaattgaacgacaaaaaaaccgctttcaattcaagtgaatga

SEQ ID NO: 7520 - DNA, 1794 bp, Helicobacter pylori
  CDS (1)...(1794)
atgtgcgggattgtaggttatataggggatagcgagaaaaaatccattcttttagagggattaaaagaattggaatacagaggttatgacagtgcgggtttagccgtattgagtgctaatcgtttggaagtgtttaaaactcaagggaaattagaaaaccttagaacagagcttaaaaataaagagtttttaaattttggcgtgagtatcgctcatacgagatgggcgacgcatgggaagccaagcagtgcgaatgcccacccgcattttacagaaaatttagccttagtgcataacggcatcattgaaaattacgcgagtttgaaaaaagaattagaaaataaagggcatgcgtttttaagccaaacggacacggaagtgattgcgcatttattagaagaaacgcttaaaagcgagggcgatttattgaaagcttttgaaaaaagcatcagccttttgaaagggagctatgcgattttgatgctccataaaagggctaaagaaagcttgttttacgctaaatcttcttcgcctttgatcgtgggcaagggcaaagagggggtgttttttgcgtccagtttgagcgtgttagcccctaaagtggatcaatttgtcattttagaagaaaacagcgtggggcagatttctttagaaaattttaaagatttaaacaatattgaaaacatgaaagattacgcttttgaaaacaaggattattctaaaggcaatttcaggaattatttagaaaaagagatttatgagcagcacagcagtttgttagagtgcttagaggggcgcttggaagccttgagtgtgtattgcgagatcgatcctgaatttttagaaaacgtgagcgaaatcacgctgtgttcttgcgggagcagttaccatgcgagtttggcgagcgtgtatttgtttgaaagattggccaaaataagagcgagggccattttagcgagcgagtaccgctacgcccattttaaaagcaaccctaacgagctttttatagcgatttctcaaagcggggaaaccgctgacactttggaggctttaaaattagccaaagcccaagggcttaaaaccattagtttgtgtaacgccccttttagcatgatgagccgcattagtgatcacacgcttttgattagagcgggggtagaaaggagcgtggcatccactaaggcgttttcttcgcaagtgatgcttttatggcttttgagcgtgtatctaggcaaacagctagggaccatctctaaagaagaagaaagaatccaagccaaaaacatgctcaatagcgtgaaggcaatgaaagtagagcctaaattgcatgaaaaaatcaagcgcttatccaaacgctacttgcatgggcatggctttttttatatcgggcgcgatgtgttttacccgctcgctttagaaggggcgttgaaacttaaagaaatcagctacttgcacgctgaggggtatgcgagcgcggaaatgaagcatgggcctattgcgttggtggattctaacctttttaccattgctttattgtctaagcatctgttatttgataaaaccaaaagcaatattgaagaattgagcgctagggattctacgatttgcgtgttaagttctgaaattttagagatcgctgatgattttatccaactagaagagagcgaaagttatatggaagaatttttccgcatgaatttagcgatgcagcttttagccttagaaatcgctatgcgtttgaaccacgatgtggatcacccaagaaacttggctaaaagcgttaccgtggaataa

SEQ ID NO: 7521 - DNA, 1143 bp, Helicobacter pylori
  CDS (1)...(1143)
atgactattgggctagttaaagaaagcatggatttagaatctcgagtggctttagtgcctgatgatgtggcgctaatcgctcaaaagggcgtggaggttttagttcaaaatagcgcgggcgcgaatagcggttatagtaacgaagcgtatgaaagcgtgggggctaaaatcgtggattctaaaacggcgtgggggcaggatttggtggtcaaatgcaaagagcctttagagcatgaataccctttgctcaaagaaaaagcgactctgtttagttatttggatttagcgtatcaaaaaagcttgtgtgaaatgtttattaataaaaaaatcacttctatttgcactgaaaccattgccgggcctaaaaacgactaccctattttagcgcctatgagcgtggtggctgggaggttggctgcgcatttagtccagcattatttactggctttagagcatgttaaagggtttatgggtaagggggtcatgctagggggtttgtcgggtgcgcaaagggctaaaatcgtcgtaattggaggcggtgtggttggcatggagagcgcgaaagtcttaagccaaatgggggctaaagtaacgattttagaattagactacgctaaattacaaaaccacccttattatcatttgtatgatttagaagtcttaagcgtgaatgaagccaatatcattcaagccttaaacggggcggtggggctagtgggagcggtgctggttacagcgagccaaacccctaaagtgatcttaagaaggcatttaaaatacatgcaaaaacaaggggtagtcattgatgtggcttgcgatttaggggggtgcatagagaccatacgccagacaagccattctaacccggtgtatgtggaagaagatttgttgcattatggcgtgccgaacatgccagggattgtcgctaaaacgagctctacggcttatagccatgcgagtgtgccgtatttgttgtattatttagagcatggcttgaagggttttttaacagccaacactaaaatcgtggcgaacacgcttggaggcttgagcgcttataacggctatatcacccaagaaggcatcgctaaagcgttcaatctggcgttcaaatcgcctttagaaattttaaaggagctttag

SEQ ID NO: 7522 - DNA, 1098 bp, Helicobacter pylori
  CDS (1)...(1098)
atgcataacgcttgcaattgtaacagccaacgagtgccttttaaaggttttgcgatagacggcaaagacgggaaattccacgaatgggagcatagccgccatgccatgggcgaatacgatgttgtcattgacacccatttttcaggaatttgtcatacggatattcacttcgctcacagcgattggttgcctggaatttatcctatggtacctgggcatgagattgctggggtagtgagcgcggttggctctaaagtaacgaagtttaaagtaggcgatcacgctggagtgggttgcatggtaaattcttgcggtgagtgtcatacctgtaagcatgaacaccaagaacaatggtgcgaaaacaacaaaaccatttacacttacagctgggaagattctttccacaataatgagcctacttatggcgggtattctaacaatatcgtggtgagcgaaaactttgtgatttctatccctaaagaagccccattagacaaagcggcccccttgctttgcgcgggcatcaccgtgtattcgcctttaaaattttctaaagttactaaaggctctaaagtgggtatcgctggctttggcgggttggggcatatggctttaaaatacgccgtggctatgggagcgcaagtgagcgtgttcgcaaggaacgacaagaaaaagcaaatggctcaaaaactaggcgcgactaacttttatacaagcgtgggagaatgcaaagaaaaatttgatttaatcgtttctagcattcccacgcaatatgacttgctcgcttacacgaaattattaaaatatggcggtgaagtggcgatcgtgggtatccccccaaaagatccgcaaaggaatttggattttggcgatttggtgctgttttcaggcaatcataaggtttatggctcttggattgggggcgtgaaagaaacccaagaaatgatggatttttccgtcaaacatggcatttaccctgagattgagctagttaccggtcaagaaattgatgcgacttgggacaaactcttaaacgggcaagggaatttccgctatgtgattgacatgaaaaaatccatggaaaattttaagaaataa

SEQ ID NO: 7523 - DNA, 1068 bp, Helicobacter pylori
  CDS (1)...(1068)
atgtcaggaattagcgctcaattagtcaaaaaattaagggacttaaccgatgcgggcatgatggattgcaaaaaagcccttgtggaagtggctggggatttgcaaaaggccattgatttcttgcgcgaaaaaggcttgagcaaagccgccaaaaaagccgataggatcgctgctgaaggcgtggtcgctttagaagtagcacctgattttaaaagcgcaatgatggtagaaatcaatagcgaaacggattttgtggctaaaaatgagggctttaaggaattggttaaaaaaactttagaaacgatcaaaacccataacattcataccacagaagaattgcttaaaagcccgttagacaacaagccttttgaagagtatttgcactctcaaatcgctgtgatcggtgaaaacattttagtgaggaaaatcgctcatttaaaagcccctagctctcatattatcaatggttatgcacattctaacgccagagtgggcgtgttaatcgccatagaatacaataatgagaaaaacgctccaaaagtggttgaactggcccgaaatatcgctatgcatgccgcagcgatgaaacctcaagtgctagattgcaaagactttagccttgattttgtcaaaaaagaaaccttagccttgatcgctgaaattgaaaaagacaacgaagaagccaaacgcttgggcaaacctttgaaaaacatccccacttttgggagtcgcattgaattgagcgatgaagttttagcccatcaaaaaaaggcttttgaagacgaactaaaagagcagggcaagcctgaaaaaatctgggataaaatcgttcctggaaaaatggaaaggtttatcgctgataacacccttattgatcaacgcctaacccttttagggcaattctatgtcatggacgataaaaaaactatcgctcaagtcatcgctgattgttccaaagaatgggatgataatttaaaaatcactgagtatgtgcgttttgaattgggcgaaggcattgagaaaaaaacagagaatttcgctgaagaagtggctttgcaaatgaagtga

SEQ ID NO: 7524 - DNA, 795 bp, Helicobacter pylori
  CDS (1)...(795)
atggtaaccatgaaagatttattagaatgcggtgtgcattttggacaccaaacaaggcgttggaaccctaaaaccaaaaaattcatttttggcgttaggaaaaatatccatattattgatttgcaaaaaaccttgcgctactttagatacacttataacatcgtgcgcgatgcgagcgctcaaggcaagagcatcatgtttgtaggcactaaaaaacaagccaatgagactttgaaagaatttgctgaaagcattcaagtcccttacgtcaattaccgctggcttggtggcatgctgactaattttagcaccattagaaaatcggttaggaaattagaaatcattgaagaaatggaaaatagcggtcaaattgatctattgactaaaaaagaaaaactcatgattttaaggaaaaaagaaaagctagacaagtatcttggcggggtgcgccacatgaaaaaaatccctgatatgatttttgtgattgatgtggctaaagaaaaaatcgctgtcgctgaagcgaggaaactccatatccctatcgtggcccccttagacactaactgcgaccctgatttagtggattaccccattcctggaaatgacgatgcgatccgctctatcaggctattttgtaaagaaatgagcgaggcgattttagaggggcgagaactcatgcaagaagaaatcgtccatgcggatgaaaatagcgaagaaatagagttcgtgagcaatgaagaaaaagaagaaatgctcgctgaaattcaaaaagaaatcactcaaggagccgaataa

SEQ ID NO: 7525 - DNA, 2421 bp, Helicobacter pylori
  CDS (1)...(2421)
atggattttatcaatatagaaaaaaaatggcaagaattttggtggaaaaataagagttttgagcctaaagacgattttaatctccctaaaaaatacattctaagcatgctgccttatcctagtggggaaatccacatggggcatgtgcgtaattacaccattggcgacgcgttggcgcgctattatcgtttgcaccattacaatgtgttacaccctatggggtttgattcttttggaatgcctgcggaaaatgcggccattaagcatggtatccaccctaaaacctggacttatgaaaacattgaagccatgcaaaaagagtttgaagccttagggttttctttttctaaaaatagggaatttgctacttcagatccggattacacgaaatttgaacagcaatttttcattgacttgtgggaaaaagggctgatttatcgcaagaaagccatgctcaattggtgccctaacgacaaaaccgttttagctaatgagcaagtcattgatgggaggtgttggcgttgcgacacagaagtcattcaaaaagaactctatcaatattatttgaagatcacaaactacgctgaagaattgctaaaagacttagaaactttagaaaaccattggccttctcaagtcctaaccatgcaaaaaaattggatagggaaatctagtgggttgcaatttggttttaagatcgctgatgagtgcttgaaggcttgcaataacattcaagaaattgaagtttttaccacaagagcggatactatttatggtgtaacttacatcgccatcgccccagaacaccctttagtagagcatgccatcaagcgagtgagccaagaagattcaaagatgattaaagcgattttaaacacgactcaaagagaaagagccttagagaaaaaaggggcgtttttaggaatttatgctatccaccctttaacgaagcaaaagatccctgtttgggtggctaatttcgccctagctaattatggttctggggcgttaatgggcgtgccagcctgcgatgaaagggattttgaattcgccaatctttatcatattcctattaaagtgatcacgcaaagccctcaaaatttgccccacaccaaagaagagattttaaaaaatagcggggagtggagcgatctttctagctcagtggccagagaaaaaatcatcgcttattttgaaaaagaaaatctcggtaaaagggtcatcaactaccgcttgcaagattggggggtgagccgtcaaaggtattggggagcgcccattcctatgattcattgcaaacattgcggaatcgtgcctgaaacccaactgccggtaactttacctgaagacattgtgattgatggggagggcaatccattagaaaagcatgcgagttggaaattcgctcaatgccccaaatgccataaagacgctttaagagaaacagacaccatggacacttttatccaatccagctggtatttcttgcgttataccacccccaaaaatcagcgtgaaaatcaagcgtttgatcaaaattacttgaagtatttcatgccggtggacacttatattggcggcattgaacatgcgattttgcacttgttatacgcgcgctttttcactaaggctttaagggatttgggctatcttcatttagatgagcctttcaaacagcttatcactcaaggcatggtcttaaaagatggtgctaagatgagcaaatctaaaggcaatgtcgttagccctaaagagatactcaaaaaatacggggctgatgccgtaaggctctttatcctttttgctgccccgccggctaaagaattggaatggaatgacaacgctttagaaggcgcgcaccggtttatcaagcgcttatacgataaagcgaacgccattacccctaccacttctaagcctgaatttaaagaagttggcctgaatgaagcgcaaaaattagcccgcaaaaaagtctatgaggcgttgaaaaaatcgcatgagattttcaataaggctgaaagcgcttacgcgtttaacactttgatcgcaagctgcatggaggctttaaacgctttgaacgcgcaaagtgatgagcaaattttatgcgagggttattttgtgttgttgcaaatcttagagcctatgatcccgcacacggcatgggaattgagcgagaggctttttaaaagagagaatttcaagcctatagaagtagatgaaagcgctttgatagaagactttatgactttagggcttaccattaatggcaaaaggcgcgcggaattgaaagtcaatattaacgctagcaaagaagagattattattttggctaaaaaagaattagagaaatatttagaaaacgcgagcgttaaaaaagaaatttatgtgcctaataaacttgttaattttgttaccgcatga

SEQ ID NO: 7526 - DNA, 1167 bp, Helicobacter pylori
  CDS (1)...(1167)
atgactacagacagaaacctgtttttttgcgcttcgttgttgatttttttaggggtattgatgagctattcgctctcaacttacaccacagtggtgctgtatcattatggggaattccatttttttatacgccagcttgtgagtgcgatcatgggcattattatcatgtgggggttgtctagggttgatcctagaaagtggtttagccgtttggggttttttctcctttttgtcccatcactactcattattggcatgttttttttgccagaaagcctttctagcagcgcagggggggcgaagcgctggatccgtttagggtttttctctctagcgcctttggagtttttaaagattggtttcaccttttttcttgcgtggagtttgtctcgcacctttgtggcaaaagaaaaggctaatgtcaaagaagaactcatcacttttgtgccttattcgtttgtgtttgtggccttagcgattggggtgggggttttgcaaaacgatttggggcagattgttcttttgggggcggttttagcggtgttattggttttttctggggggagcgtgcatttatttggcttgattgtttcaggggcgtttgcgatcagcgttttagcgattgttacaagcgaacataggattttacgcctaaaattatggtggtctaatttacaaaattcgcttttcacgctcttgcctgacaaattagcgaacgctcttagaataagcgacttgcccgaatcctatcaagtctttcatgcaggcaatgccatgcataatggggggttattagggcaagggcttgggctagggcaaatcaagcttgggtttttgagcgaagtgcatacggacatggttttagctgggatcgccgaagaatgggggtttttggggttatgcgtttgttttattttgttttctgtcatgattgttttgatttttaggatcgctaaccgcttgaaagagccaaaatattcgctattctgcgtgggcgtggtgctgctaatagggttttctttggtgatcaacgcctttggggtgggtgggatttttccggttaagggcctagcggtgccgtttttgagctatggagggagttcgcttttagcgaattgcatcgctatagggcttgttctaagcctagcgcgatacacgaaaggctaa

SEQ ID NO: 7527 - DNA, 816 bp, Helicobacter pylori
  CDS (1)...(816)
atgaacatattcaagcgtattatttgcgtaaccgctattgttttaggtttttttaaccttttagacgccaaacaccacaaagaaaaaaaagaagaccacaaaatcactcgtgagcttaaagtgggcgctaaccctgtgccgcatgcgcaaatcttgcaatcagttgtggatgatttgaaagagaaagggatcaaattagtgatcgtgtcttttacggattatgtgttgcctaatttagcgctcaatgacggctctttagacgcgaattacttccagcaccgcccttatttggatcggtttaatttggacagaaaaatgcaccttgttggtttggccaatatccatgtggagcctttaagattttattctcaaaaaatcacagacattaaaaaccttaaaaaaggctcagtgattgctgtgccaaatgatccggccaatcaaggcagggcgttgattttactccataaacaaggccttatcgctctcaaagacccaagcaatctatacgctacggagtttgatattgtcaaaaatccttacaacatcaaaatcaaacccctagaagctgcgttattgcctaaggttttaggggatgtggatggggctatcataacagggaattatgccttgcaagcaaaactcaccggagccttattttcagaagataaggactcgccttatgctaatcttgtagcctctcgtgaggataatgcgcaagatgaagcgataaaagcgttgattgaagccttacagagcgaaaagaccaggaaattcattttggatacctataagggggcgattatcccggctttttaa

SEQ ID NO: 7528 - DNA, 984 bp, Helicobacter pylori
  CDS (1)...(984)
atggtagtagaattaaaaaacattgaaaagatttatgaaaacgggtttcatgctctaaaaggcgtgaatttggaattgaaaaaaggcgatattttgggcgtgataggctattcaggggcggggaaatccacgctcattcgcttgatcaattgtttagagcgccccagttctggcgaagttttagtcaatggggtcaatctgttaaacttaaagcctaaagaattgcaaaaagcgcgccaaaaaataggcatgattttccagcatttcaatttattgagcgctaaaaacgtgtttgaaaacgtcgctttcgctctagaaatcgcccgatgggaaaaaactaagattaaatcaagggtgcatgaattgttggaattagtggggttagaagataaagtgcatttttatcctaaacagctcagcggcgggcaaaaacaacgagtggcgatcgctaggagtttagcgaattgccctaatttgttgctttgcgatgaagccacatccgctttggattctaaaaccacgcattctattttaacgcttctaagcggcattcaaaaaaagtttgatttgagcatcgttttcatcacacaccagattgaagtggttaaagaattgtgcaatcaaatgtgtgtgatcagcagcggcgaaatcgtagaaagaggctcggtggaagaaatttttgctaaccctaaacatgctgttactaaagaattgcttggcatcaaaaacgaacatgcggatcaaaaatcgcaagacatttatcgcatcgtgtttttaggggagcatttagacgagccgatcatttctaatttgatcaggcgttttaaaatagacgtgagcatcatttcaggcaatattgaagagcttacgactaaagatatagggtatttagtggtgcggtttttaggcagtgttgcagagattcagagggctttagagtatttaaacgctttaggcttgcaagtggaaaaattaaaggattaa

SEQ ID NO: 7529 - DNA, 1023 bp, Helicobacter pylori
  CDS (1)...(1023)
atgattttaagcattgaaagttcttgcgatgacagctctttagcccttacaagaatagaggacgccaagctcatcgctcattttaaaatctctcaagaaaagcaccacagctcttatgggggcgttgtgcctgagattgcatcgcgcctgcatgctgagaatttgccgcttttattagaacgcgttaaaataagcttgaataaggatttttccaaaattaaagccatcgctatcactaatcagccaggtttgagcgttactttaatagagggtttgatgatggcaaaagccttgagcttgtctttgaatttacccttgattttggaagatcatttgagagggcatgtgtattcgctctttatcaatgaaaaacaaacccgcatgcctttaagcgtgctgctagtctctggggggcattctttaattttagaggctagagattatgaagacattaaaatcgttgccacgagtttagacgatagctttggggagagttttgataaggtttcaaaaatgcttgatttaggctatccaggaggccccatagtggaaaaattagcccttgattatgcacacccaaacgagcctttaatgttccctatccctttaaaaaacagcccgaatttggcttttagtttttcaggtttaaaaaatgcggtgcgtttggaggttgaaaaaaacgcccataatttgaacgatgaggtaaaacaaaagattggctatcattttcaaagcgcggctatcgagcatttaatccagcagactaaacgctattttaaaatcaaacgccctaaaatttttggcattgtggggggagcgagccaaaatctagccttaagaaaggcgtttgaggatttgtgtgctgagtttgattgcgagcttgttttagcccctttagaattttgcagcgacaatgccgccatgatagggcgatcaagcctagaagcttatcaaaaaaagcgctttatccctttagaaaaagccgatatttcgccaagaacgctgttaaaaaattttgagtga

SEQ ID NO: 7530 - DNA, 303 bp, Klebsiella pneumoniae
  CDS (1)...(303)
gttcgtcatgaaatcatcaagacgaccctgccgaaagcgaaagaactgcgtcgcgtagttgagccgctgattactcttgccaagactgatagcgttgctaatcgtcgtctggcattcgcccgcactcgtgataacgagatcgtggcaaaactgtttaacgagctgggcccgcgtttcgcgagccgcgccggtggttacactcgcattctgaagtgtggcttccgtgcaggcgacaacgcgccgatggcatacatcgagctggttgatcgtgctgagccgaaagcagaagctgctgcagagtaa

SEQ ID NO: 7531 - DNA, 351 bp, Klebsiella pneumoniae
  CDS (1)...(351)
ctgggggtagtcagccagaacttccgtccggagttcatcaaccgtatcgacgaagtggtggtcttccatccgctgggcgagaaacatattgcctctattgcccagatccagctgcagcgtctgtataaacgtctggaagagcgcggatatgaagtgcagatgtccgatgaggcgctgaagctgctgagcgccaacggttacgatccggtatacggcgcgcggccattgaaacgtgctattcagcagcagattgagaacccgttagcccagcagatcctttccggtgagctggttccgggtaaaaccatcgagctggtagtaaaagacgaccgcattgtggcagtgcagtaa

SEQ ID NO: 7532 - DNA, 666 bp, Klebsiella pneumoniae
  CDS (1)...(666)
atgaatacaatcctgttagttgatgatgaccgggagctcacctccctgttaaaagagctgctcgatatagaaggttttaacgtgctggtggcccatgatggggaacaggcgctggcccttctggacgacagcgttgatttattgctgctcgacgtgatgatgccgaagaaaaacggtatcgatacgctgaaagagctgcgtcagacacaccagactccggttatcatgctaacagcgcgcggaagcgagctggatcgcgttctcggcctcgagctgggcgcggatgactatttgcctaagccattcaacgatcgcgagctggtggcccgtatacgcgcgattctgcgccgttcccactggagcgagcagcagcagacgaccgaagccggctcaccaaccctggaagtggatgccttaagcctcaatccgggccgccaggaagccaatttcgatggccagacgctggagctcaccggcaccgagttcaccctgctctatctgttagcgcagcatctcggtcaggtagtctcccgtgagcatttaagccaggaagtgttaggcaagcgcctgacgccgttcgaccgcgccatcgatatgcatatttccaacctgcggcgtaagctgccggagcgcaaagatggccatccgtggtttaaaacgctgcgt

SEQ ID NO: 7533 - DNA, 627 bp, Klebsiella pneumoniae
  CDS (1)...(627)
gtttttcgcccatccgcagcatgcccgcgcgcggcgttttctgcagaaggtgctggatccgctgcaccaggagagcctcgagtgacgccgatgcttgactggcacggcgtcctgagcgggcagccgttgcaatggattatctctggttttctcaccaccgtctgggtcagcgtcgccgggatcctgctcgccaccctgctggcggtcctgctgctggccctgcgcctcggcggcggacgcgcggggcgcggactggtggccgcgtgggtctcgttgtttcgcaacactccgctgctggtccagctgctgttctggtactttgccgcctggaacctgctgccgctggcggtgaaggaggtggtgaacgacgaacacgcctggtccattctgccgggcaacgtctggtggctgacgccggagttcctctgctcaatgtgggggctgggggtctttacctccgcctttctggtggaagagatcgcctccggactgcgcgccgtcagccacgggcagcgggaagccgcgctgtcgcagggctttacgccgtggcaggagctgcgctttatcctcctgccgcagggctggccaacgcctggcagccgattgtcggccagtatcttaacctga

SEQ ID NO: 7534 - DNA, 735 bp, Klebsiella pneumoniae
  CDS (1)...(735)
atcaccaccttcaatgatattgatgccgtcatccatctggcgggtgaccccatcgctgataaacgctggacggccgagcagaaacaacgcttgtgccatagccgctgggatctcacgcagcggctggtgggcctgatccacgccagcgacccccctccctccgtgctgatcagcgggtctgccatcggctactatggcgacctcggcgaggtggtggtgaccgaagaagagccaccgcacaatgagtttacccataagctgtgcgcccgctgggagcaaattgcctgcgaagcgcaaagcgagcgcacccgcgtctgcctgctgcgcaccggcgtggtactggctccgcggggcggtattctcggcaaaatgacacccgcctttaagctcggcctcggcgggcctatcggcaacggcagacagtacctggcctggatccatatcgacgatatggttaacggcattctgtggctgctggataacgatctgcgcggtccgttcaatatggtttctccctacccggtgcataacgagcagttcgcccatgcgctgggtcatgcgctccatcgaccggcgattttccgcgttcccgccgccgctatccgcctgttgatgggggaatccgccgtcctggtgctcggcggccagcgcgcgctgccaaagcgtctggaggccgccggctttgccttccgctggtacgatctggacgaagcgctaaaggatgtgctgagttaa

SEQ ID NO: 7535 - DNA, 396 bp, Klebsiella pneumoniae
  CDS (1)...(396)
atgcgtcattacgaaatcgtttttatggtccatcctgaccagagcgaacaggttccgggcatgatcgaacgttacactggtgcaattactgcagcagcaggtacgatccaccgtctggaagactggggccgccgtcagctggcttatccgatcaacaaactgcacaaagctcactacgttctgatgaacgttgaagcgccgcaggaagcgatcgatgagctggaaactaacttccgcttcaacgacgccgttatccgcagcatggtaatgcgtactaagcacgctgttaccgaagcatctccgatggttaaagcgaaagacgagcgccgtgagcgtcgcgaagatttcgccaacgaaaccgcagatgattctgaagctggggattctgaagagtaa

SEQ ID NO: 7536 - DNA, 645 bp, Klebsiella pneumoniae
  CDS (1)...(645)
atgcgtattattctgcttggcgctccgggcgcgggtaaaggaactcaggctcagttcatcatggagaaatacggtattccgcaaatctccaccggcgatatgctgcgcgcggcggtaaaatccggctctgagctcggtaagcaagcgaaagacattatggacgctggcaagctggtgaccgatgagctggtcatcgcgctggtgaaagagcgtatcgcccaggaagattgccgtaacggcttcctgctggacggcttcccgcggaccattccgcaggctgacgccatgaaagaggcgggcattaccgttgattacgtgctggaattcgatgtgccggacgaactgatcgtcgaccgcatcgttggccgtcgcgtccacgcggcatccggtcgcgtataccacatcaaattcaatccgccgaaggtggaaggcaaagacgacgtgaccggcgaagagctgaccactcgtaaagacgatcaggaagagaccgtgcgtaagcgtctggtagaataccatcagatgacagcgccgctgatcggctactacaccaaagaagcgcaggcgggcaacaccaaatacgccaaagtcgacggcaccaaagcggtagctgacgtgcgcgccgaactggaaaaaatcctcggctga

SEQ ID NO: 7537 - DNA, 969 bp, Klebsiella pneumoniae
  CDS (1)...(969)
tttggccgtatcggtcgcattgttttccgtgctgctcagaaacgttctgacatcgagatcgttgcaatcaacgacctgttagacgcagagtacatggcttacatgctgaagtatgactccactcacggtcgtttcgacggtaccgttgaagtgaaagacggtcatctggtcgttaacggtaaaaaaatccgtgttaccgctgaacgtgacccggctaacctgaagtgggacgaagttggtgttgacgttgttgctgaagcaaccggtatcttcctgaccgacgaaaccgctcgtaaacacatcaccgctggcgcgaaaaaagtcgttctgactggcccgtccaaagacaacactccgatgttcgttcgcggcgctaacttcgacgcttacgcaggccaggacatcgtttccaacgcttcctgcaccaccaactgcctggcgccgctggctaaagttatcaacgacaacttcggtatcgttgaaggcctgatgaccaccgtccacgctaccaccgctactcagaaaaccgttgatggcccgtctcacaaagactggcgcggcggccgcggcgcagctcagaacatcatcccgtcctataccggcgctgctaaagcagtaggtaaagtactgccagaactgaacggcaaactgaccggtatggcgttccgcgttccgactccgaacgtatctgttgttgacctgaccgttcgtctggaaaaagcagcgtcctacgaagaaatcaagaaagccatcaaagccgcttctgaaggcgctatgaaaggcgttctgggttacaccgaagacgacgttgtttctaccgacttcaacggcgaagtttgcacttccgtgttcgatgctaaagcgggtatcgcactgaacgacaacttcgtgaaactggtttcctggtacgacaacgaaaccggctactccaacaaagttctggatctgattgcccacatctccaaataa

SEQ ID NO: 7538 - DNA, 753 bp, Klebsiella pneumoniae
  CDS (1)...(753)
aagcgcggcgaaattcagcccggcgacgtgctgatcgaagcgaccagcggcaacaccggtattgcgctggcgatgatcgccgcgctgaaaggctaccggatgaagctgttgatgcccgacaacatgagccaggagcgtcgggccgcgatgcgcgcttacggcgccgagcttatcctggtcagcaaagagcaggggatggagggggcccgcgacctggctctggagatggcccagcgcggagaaggcaaactgctcgatcagtttaacaacccggataacccctacgcccactacaccaccaccgggccggaaatctggcagcagaccgcggggcgtatcacccactttgtctccagtatggggaccaccggcaccattaccggcgtgtcacgttttctgcgtgaacagagtaaaccggtgaccattgttggcctgcagccggaggaggggagcagtattcccgggatccgccgctggccggcagagtatatgccggggatctttagacgttcgctggtggatacggtgctggatattcatcagcaggatgccgagaataccatgcgtcagctggcggtgcgggaaggcattttctgcggcgtcagttcgggcggcgcggtagcgggcgcgttacgcatagcccgcgaaaatcctggcgcggtggtggtggcgattgtctgcgatcgcggcgatcgttacctttccaccggcgtgttcggcgaagaacactttagccagggggcgggcatttaa

SEQ ID NO: 7539 - DNA, 948 bp, Klebsiella pneumoniae
  CDS (1)...(948)
cttcccgggcgtggcaatctgctggcccaggcggaggcctttcgcggcctgagcgtggaggtcaagcgcgggattaatcctgatttagtcgaacaagctacggctcaggacgagcaatatcgtctcgaagatgaggataacctgccggaaaatgacgcattttcacccgactctgccgagacggtgcgtagccgggaggtgctccgccacgctgaaacgtatgggaaatgcgctgagtctgatacactcagtgaacattttcttgaaaagcaagcaggcatagagatggttgaggattcacaagaaacgacgcattttggctttcagacggtcgctaaagagcagaaagcagatatggtggcgcatgtattccattctgtcgccgcaaaatatgatgtgatgaacgacctgatgtcgtttgggatccatcgtttgtggaagcgtttcaccatcgactgcagcggcgtacgtcgcgggcagaccgtgctggatctggctggtggtaccggtgatttgacggccaagttctcccgcctggtaggggaaaccggccgcgtcatgcttgctgatatcaatgattctatgctcaaaatgggccgcgaaaagctgcgcaatatcggcatcgtaggcaacgttgagtatgttcaggccaacgcggaagccctgccttttgctgataatacctttgactgcatcaccatctctttcggtctgcgtaacgtgaccgacaaagagaaagcgctgcgttcgatgtaccgcgtgctgaagccgggcggacgtctgctggtgctggagttttctaaacccattatcgaaccgctgagcaaagcctacgacgcttactccttccatatcctgccgaaggtgggcgagctggtggcaaaagatggcgacactatcgctacctggcggaatctattcgtatgcatccggaccaggaaaccctga

SEQ ID NO: 7540 - DNA, 525 bp, Klebsiella pneumoniae
  CDS (1)...(525)
atggctgaaattaccgcttccctggtaaaagagctgcgcgaacgtactggcgcaggcatgatggattgcaaaaaagcgctgactgaagcgaatggcgacatcgagctggcaatcgaaaacatgcgtaaatccggcgcgatcaaagcggcgaagaaagcaggcaacgtggctgctgacggcgtgatcaaaaccaaaatcgaaggcaactacggttacattctggaagttaactgccagactgacttcgttgctaaagatggtggtttccaggcatttgccgacaaagtactggacgccgctgttgcaggtaaaatctccgacgttgaagttctgaaagcgcagttcgaagaagaacgtgttgcgctggttgctaaaatcggcgagaacatcaacatccgtcgtatcgctgttctggaaggcgacgttctgggcagctaccagcacggtgcgcgtatcggcgttctggttgccgctaaaggcgctgacgaagagctgggtaagcagctggcaatgcacgttgctgtt

SEQ ID NO: 7541 - DNA, 783 bp, Klebsiella pneumoniae
  CDS (1)...(783)
cgatcgtcaaacctgttgccgctggaagccgatgagcgcatcaccgccatcctgccggtccgcgagtacgaagagggcgtcaacgtctttatggccaccgctagcggtaccgtgaagaaaaccgcgctgaccgagttcagccatccgcgttccgccggtatcatcgcggtcaacgggaacgaaggcgatgagctgatcggcgtcgatttgacctctggtcaggatgaagtgatgctgttctccgcggccggtaagtttgtacgcttcaaagaagacgccgttcgcgccatgggcggtaccgccaccggcgtacgcggtattaagcttgcggaaaacgacagcgtcgtctcgctgattattccacgcggcgaaggcgcgatcctgacggtgacgcaaaacggttacggtaaacgtaccgcggcggcggagtatccgaccaagtcgcgtgccacccagggcgttatttcgatcaaagtcaccgagcgtaacggttccgtggtcggcgccgtgcaggtggatgactgcgatcagatcatgatgatcaccgacgccgggacgctggtgcgtacccgtgtttccgaagtgagcatcgtgggccgtaacacccagggcgtgatcctcatccgcaccgcggaagatgaaaacgtggtgggtctgcagcgcgtggctgagccggtggatgatgaagagctggatgccatcgacggtagcgcggcggaaggcgatgacgatatcgccccggaagcggataccgatgacgacatcgccgaagacgaagaataa

SEQ ID NO: 7542 - DNA, 189 bp, Klebsiella pneumoniae
  CDS (1)...(189)
gagccgttcgacgtagctctgcgtcgcttcaagcgttcctgcgaaaaagcaggtgttctggcggaagttcgtcgtcgtgagttctatgaaaaaccgactaccgaacgtaagcgcgctaaagcttctgcagtgaaacgtcacgcgaagaaactggctcgcgaaaacgcacgccgtactcgtctgtactaa

SEQ ID NO: 7543 - DNA, 798 bp, Klebsiella pneumoniae
  CDS (1)...(798)
atggcttcagaaaatatgacgccgcaggattacataggacaccatctgaacaaccttcagttggacctgcgtacattctcgctggtggatccgcacaaccacacagccaccttctggacgctcaacattgactccatgttcttctcggtggttctcggtctgctgttccttgccatgttccgtagcgttgctaagaaagcgaccagcggcgtaccagggaaattccaaaccttcatcgaaatgatcatcggcttcgtccatggcagcgtcaaagacatgtaccatggcaagagcaaggttatcgcgccgctggcgctgaccgtgttcgtctgggtcttcctgatgaacctgatggacctcttgcctatcgatttcttaccttggatcggtgagcacatactcggcctgcctgcactgcgcgtggttccgtctgccgacgtgaacatcaccctgtcgatggcgcttggcgtgttcatcctgattattttctacagcatcaaaatgaaaggcgttggtgggttcgttaaagaactgaccatgcagccgttcaatcactgggcgttcattcctgtcaacttaatccttgaaggggtaagcctgctgtccaaaccggtctctctcggtctgcgactgttcggcaacatgtatgccggtgagctgattttcattctgattgctggtctgttgccgtggtggtcacagtgggttctgaatgtgccttgggccattttccacatcctgattattacgctgcaagccttcatcttcatggttctgacgattgtctatctgtcgatt

SEQ ID NO: 7544 - DNA, 453 bp, Klebsiella pneumoniae
  CDS (1)...(453)
atgactgacaacaataccgcattaaagaaggctggcctgaaagtcacacttcctcgactaaaaatccttgaagtgctgcaggaaccggataaccatcatgtcagtgcggaagacttatataaacgcctgatcgacatgggcgaagagatcggtctggcgaccgtttaccgcgtcctcaaccagtttgatgacgccggcatcgtgactcgtcataatttcgaaggcggaaaatccgttttcgaactgacccagcagcatcaccacgatcacctgatctgcctcgactgcggcaaagtgatcgaattcagcgacgactcgatcgaattacgccagcgtgaaattgcctcccgccacggcatccgcctgaccaaccacagtttatatctgtacggtcactgtgcggaaggggattgccgcgaggacgaacacgcccacgacgcggtggaaaaataa

SEQ ID NO: 7545 - DNA, 501 bp, Klebsiella pneumoniae
  CDS (1)...(501)
gtgacaatggcgctgtgtgtggaaatgctgatctccggcaagctggcggcggacgatgccgaggcgcgcgcgaactgccaggcggtgctggataacggtaaagcggcggaagtgtttggccgtatggtcgcggcgcagaaagggccgagcgactttatcgagaattatgctaattatctgccgacggcgatgctgagcaaagcagtctatgctgataccgaaggttttatcagcgcgatggatactcgcgcgctgggcatggcagtggtttctatgggcggcggccgccgtcaggcatcggacaccattgactatagcgttggctttaccgagatggcgcgtctgggtgaccgcgtcgacggacagcgtccgctggcggtgatccatgccaaagacgagaacagctggcaggaggccgcgaaagcggtcaaagcggccattaaactggacgataaagccccggaaattacaccgacagtctatcgccgtatcactgaatag

SEQ ID NO: 7546 - DNA, 312 bp, Klebsiella pneumoniae
  CDS (1)...(312)
atgcagaaccaaagaatccgtatccgcctgaaagcgtttgatcatcgtctgatcgatcaatcaaccgcggaaatcgtcgagactgctaagcgcactggtgcgcaagtccgtggtccgatcccgctgccgacccgcaaagagcgctttaccgttctgatctccccgcacgtcaacaaagacgcgcgtgaccagtacgaaattcgcactcacaagcgtctggttgacatcgttgagccaactgaaaaaaccgttgatgctctgatgcgtctggatctggctgccggtgtagacgtgcagatcagcctgggttaa

SEQ ID NO: 7547 - DNA, 657 bp, Klebsiella pneumoniae
  CDS (1)...(657)
ggccagtggtttatctcggccaacgcctttatcttcgccctgctggctgccctgctgctggacggcatcacccgctggacccaggtggccacctccggcgtcattctgttcggcatcgcgctggtctttacctttaacgctctggtctcgatgctgcagttcatcgccaacgaagacacgctgcaggggctggtgttctggaccatgggcagcatcgatcgcgcctcctggagcaaagtcgccatcctgctggtcgccctggcgctggtgatgcccctgtcgctgcgcagcgcgtggaagctgaccgccctgcggttgggcgaggaccgggccatcagctttggcattaacgttcgccgtctgcgcctgaccacgctgctgcggatcagtattctgtcggcgctttcggtggcctttgtcgggccaatcggctttatcggcctggtggcgccgcatattgcgcggatgctcttcggcgaagaccatcgcttttatctgcccgccagcgcgctgatcggcgccctggtgctctccctggcctccatcgcctcgaaaaacctgatccccggggccattattccggtggggatcgtcacttccctggtcggggtcccgttctttttgagcatcattttacgtcatcgggggcaggtatga

SEQ ID NO: 7548 - DNA, 909 bp, Klebsiella pneumoniae
  CDS (1)...(909)
gtgtacgaccttttggagaggaaaatggctcaccaacctcgctggacaatgtcgcaagtaacggaattatttaataaaccgctgatcgatctgctattcgaagcacagcaaatccatcgtcaacactttgatccgcgccaggtgcaggtcagcaccctgctgtcgatcaaaaccggcgcctgcccggaagattgtaaatattgcccgcagagcgcacgctacaaaaccggcctcgaagccgagcgcctgatggaggttgagcaggtgctggaatcagcgcgccaggcgaaaaacgccggctccacccgcttctgcatgggcgcggcgtggaaaaaccccaatgaccgcgatatgccttacctggagcagatggtgaaaggggtgaaggcgctggggctggagtcctgtatgacgctcggcaccctgaccgacagtcaggcgcagcgcctggccgaagcgggcctcgattactacaaccacaaccttgatacctcgccggaattttacggcaacatcatcaccacccgcacctaccaggagcgcctggatacgctggataaagtgcgtgatgctgggatcaaagtctgctccggcggtatcgtcgggctgggagagagcgtaaaagatcgcgccggactgctgctgcaactggctaatctgccgacgccgccggagagcgtaccgatcaacatgttggtgaaggtcaagggcacgccgctggcggataacgacgacgtcgacgctttcgatttcatccgcactatcgccatcgcgcgcatcctgatgcccacctcctacgtgcgtctctccgccggccgcgagcagatgaacgagcagacccaggcgatgtgctttatggccggggcgaactcgattttctacggctgcaagctgctgaccacgccgaac

SEQ ID NO: 7549 - DNA, 822 bp, Klebsiella pneumoniae
  CDS (1)...(822)
atgccgtgtgaagaactggatatcgtctggaataatattaaagccgaagcccgggctttggctgactgtgagccgatgctcgccagtttttaccacgcaacgctactcaagcatgaaaatctcggcagcgcgctgagctatatgctggccaacaagctggcttccccgattatgccggcgatcgccattcgcgaagtggtggaagaggcctacgccgccgatccggaaatgatcgcctccgccgcctgcgatattcaggcggtgcgcacgcgcgacccggcggtggataaatactccacgccgttgctctatctgaagggtttccatgccctgcaggcctatcgtatcggccactggctgtggactcaggggcgacgcgcgctggcgattttcctgcaaaatcaggtctccgtctctttccaggtggatatccacccggcggcgaaaatcggccgcgggatcatgctcgaccatgccaccggcattgtggtcggcgaaacggcggtgattgaagatgacgtctctattctgcagtcggtcaccctcggcgggaccggtaaaaccagcggcgaccgtcatccgaaaattcgcgaaggcgtaatgattggcgccggggcgaagatcctcggcaatattgaagtcgggcgtggcgcgaagattggcgccggttcggtggtattgcagccggttccgccgcacaccaccgcggcgggcgtaccggcgcgtatcgtcggcaagccggagagcgacaagccggcgatggatatggatcagcatttcaacggcatccaccacaccttcgagtacggcgacgggatttga

SEQ ID NO: 7550 - DNA, 171 bp, Klebsiella pneumoniae
  CDS (1)...(171)
atcaataaaaccgaccttgccccctatgttggcgcgtcgctggaggtgatggcgagcgatacccagcgtatgcgcggcgatcgcccatggaccttcaccaatctgaagcagggcgacggcctgagcaccattatcgccttcctcgaagacaaaggcatgcttggcaaatag

SEQ ID NO: 7551 - DNA, 603 bp, Klebsiella pneumoniae
  CDS (1)...(603)
atggcagagaaatttacccaacataccggcctggtggttccgctggatgctgcaaacgtcgataccgacgcgatcatccctaagcaatttttgcagaaggtcacccgcaccggctttggcgcgcacctgtttaacgactggcgctttctcgacgataaaggtcaacagccgaacccggagttcgtgctgaattttcctgagtaccagggggcatcgatactgctggcgcgggaaaacttcggctgcggctcctcggcgagcacgccgtgggcgctgaccgattacggctttaaggtcgttatcgccccgagctttgccgatatcttttacggcaacagcttcaataaccagctgctgccggtgaccctgagcgacgagcaggtcgatgagctgttcaagctggtgcaggccaacccgggcattacgtttgaagtggatctggaagcgcaggtagttaaagccggggataaaacctacagctttaagatcgacgatttccgccgccactgcatgctcaacggcctggatagcatcggcctgacgctgcagcatgaagcggcaatctccgactatgaacgcaagctgccggtgtttatgaattaa

SEQ ID NO: 7552 - DNA, 417 bp, Klebsiella pneumoniae
  CDS (1)...(417)
gcgtcgacagcattgaagagcacaccatgcactccgaatatgccgaagtgccgcagaggtggtcgatgcggtgctggcggcgaaacgcgcggcaaccgcgtgatcgcggtgggcactacctcggtacgttcgctggagagcgcggcgcaggcggcgaaagacgcgctgatcgcgccgttcttcgacgatacgcagattttcatctacccgggttatcagtaccaggtgatcgatgcgctggtgactaacttccatctccctgaatccacactgattatgctggtgtcggcgtttgcgggttatcagcacaccatgaacgcctataaggtggcggttgagcagaaatatcgcttttttagctacggggatgcgatgtttatcacgtacaatccgcaggctatttctgagcgtccctga

SEQ ID NO: 7553 - DNA, 315 bp, Klebsiella pneumoniae
  CDS (1)...(315)
gtggcgagtatgaaaacgtcggactgtttttctgacgcaggagcaagcatgaaatttgaactggataccaccgacggtcgcgcccgccgcggtcgcctggtgtttgagcgcggcgtggtggaaacaccggcctttatgcccgttggcacctacggcaccgtcaaagggatgacgccggaagaggtggaagccaccggcgcgcagattattctcggcaacaccttccacctgtggctgcgcccgggtcaggagatcatgaagctgcacggcgatctgcacggttttatgcagtggaaaggaccgatcctgaccgac

SEQ ID NO: 7554 - DNA, 219 bp, Klebsiella pneumoniae
  CDS (1)...(219)
atggccaaagaagacaatattgaaatgcagggcaccgtacttgaaacgttgcctaacactatgttccgcgtagaactggaaaacggtcacgtggtaaccgcgcatatctccggtaaaatgcgtaaaaactacatccgcattctgacgggcgacaaagtgactgttgagctgaccccgtacgacctgagcaaaggccgcattgtcttccgtagtcgctga

SEQ ID NO: 7555 - DNA, 624 bp, Klebsiella pneumoniae
  CDS (1)...(624)
attccggttgccatccgcaccaccatcgcccggctgattattttctttatcggcaccgtgtttgtgctggcggcgctgatcccgatgcagcaggcgggagtggagaaaagccccttcgtgctggtgtttgagaaggtgggcatcccttatgcggcggacatgttcaacttcgtgatcctgacggcgatcctgtcggcggctaactccggcctgtacgcttcggggcggatgctctggtcgctatcgaacgagaagacgctgccggcctgctttgccaaagtcaataaacggggcgtgccggtgaccgccctgtcggtgagtatgctgggcggcgtgctggcgctgttctccagcgtggtggcgccagatacggtgtttgtcgcgctgtcggcgatctccggttttgcggtggtggcggtgtggttgagcatctgcgcctcgcactttatgttccgccgccgccatctgcagcagggtaaggcgctgagcgatctgcagtatcgcgctccctggtatccggtggtgcccgttctgggctttgtgctgtgcctggtggcctgcgtgggcctcgcttttgacccgagccagagaattgcgctgtggtgcgggatcccctttgtggtg

SEQ ID NO: 7556 - DNA, 723 bp, Klebsiella pneumoniae
  CDS (1)...(723)
atgagtatcgacctgagcaaactgctgaccgagcgacgtaacgccaacagcgccaacattgacaccctctccaccctcgagatgctgacggtgataaaccaggaagaccagcaggtagcccaggcgataacgccctatctgccgcagattgccgaggtggtggataaggtcgcggcggcgctgcaggccggtggccgcttgatttacattggcgcgggtacctcagggcgtctggggatcctcgatgccagtgaatgcccaccgaccttcggcacccgcccggagcaggtggtggggatcatcgccggcggacataaagcgattctcagcgccgtggaaaacgtggaagacaacaaagcgcagggggcgatggatctgcagaacctgaacttcagcaaccgcgatgtgctggtggggctggcggccagcggacgcacgccgtacgtcattggcgccatggaatacgcccatagtcagaatgcctttgtcgccatcgtcagctgtaacccgcatggcgaaatggcccagctggcggacgtggcgatcaccccggtagtcggcccggaagtggtcactggctctacccgcctgaaagccggcaccgcgcagaagctggtgctgaacatgatctccaccggggcgatgatccgcgtcggcaaggtgtacagcaacctgatggtcgacgttgaagcgaccaacgccaagctgattgagcgccaggtt

SEQ ID NO: 7557 - DNA, 540 bp, Klebsiella pneumoniae
  CDS (1)...(540)
atggcgaaactgcatgattactacaaagacgaagtagttaagaaactcatgactgagtttaactacaattctgtcatgcaagtccctcgggtcgagaagatcaccctgaacatgggtgttggtgaagcgatcgctgacaagaaactgctggataacgcagcagctgacctggcagcaatctccggtcaaaaaccgctgatcaccaaagcacgcaaatcagttgcaggcttcaaaatccgtcagggctatccgatcggctgtaaagtaactctgcgtggcgaacgcatgtgggagttctttgagcgcctgatcactattgctgtaccgcgtattcgtgacttccgcggcctgtccgctaagtctttcgacggtcgtggcaactacagcatgggtgtccgtgagcagatcatcttcccagaaatcgactacgataaagtcgaccgcgttcgtggtttggatattaccattaccactactgcgaaatctgacgaagaaggccgtgctctgctggctgcctttgacttcccgttccgcaagtaa

SEQ ID NO: 7558 - DNA, 384 bp, Klebsiella pneumoniae
  CDS (1)...(384)
atgtcgtgtgaacctcaactgactaaacgtttgggtgttcaccaacgtgtaacttattatttgggtaagcttttaatgaaaacttttacagctaaaccagaaaccgtaaaacgcgactggtatgttgttgacgcgaccggtaaaactctgggccgtctggctactgaactggctcgtcgcctgcgcggtaagcacaaagcggaatacactccgcacgttgataccggtgattacatcatcgttctgaacgcagaaaaagttgctgttaccggcaacaagcgcgaagacaaaatgtactaccaccacaccggccacatcggtggtatcaaagaagcgacctttgaagagatgattgcccgccgtcctgagcgtgtgattgaaatc

SEQ ID NO: 7559 - DNA, 723 bp, Klebsiella pneumoniae
  CDS (1)...(723)
catattaaagtcggcgttatcgtcggggcggaacagcaggtcgctgaagttgcacagaaagtagcaaaagagaagtatggccttgacgtagaactggtgaccttcaacgattacgttctgccgaacgaagcgctgagcaaaggcgatatcgacgtgaacgccttccagcataaaccgtatctcgatcagcagattaaagaccgcggctataagctggtggctgtcggtaacaccttcgtctacccgatcgcgggttattcgaagaaaatcaaatcgctggacgaactgcagccgggctcacagatcgccgtccctaacgatccgaccaacctcggtcgttctctgctgctgctgcagcaggtaggtctgattaaactgaaagacggcgtgggcctgctgccgacctcgctggacatcgtcgagaacccgaaaaacctgaagattgttgaactggaggcgccgcagctgccgcgttccctggacgatgcgcagattgcgctggccgttatcaacaccacttacgccagccagattggcctgaccccggcgaaagacggcatctttgttgaaggtaaagagtctccttacgtgaacctgattgtggcgcgtgaagacaataaagatgctgagaatgtgaaaaaattcgttcaggcttaccagagcgatgaagtttacgaagcagcgaacaagatctttaacggcggtgccgtgaaaggctggtaa

SEQ ID NO: 7560 - DNA, 615 bp, Klebsiella pneumoniae
  CDS (1)...(615)
atgtacttttatcaaccttcgcagggccacggcctgccgcatgacccgctgaacgcgataatcgggcctcgcccgataggctggatcgcctcccaggacgccgagggccagcgtaatctggcgccatacagcttttttaactgctttaactatcggccgccaatcattggtttcgccagcagcggctggaaagacagcgtgcgaaatatcgtcgaaacaaaggagttcgtctggaacctggcgacgcgaccgctggccatggcgatgaatgaaacgtcagcctcgattccgcaccatgaggacgaattcgtgcgcgccggcctcaccgccgccgccagccgcctggtcagcgctccccgggtcgcggagagtccggtgaactttgagtgccgtctgtcgcagtgtattcaactcaccaccgccgacggcaaccctgtcgatacgtggctggtgctcggtgaagtggtcgccgtgcatatcgatgaatcactgctggacgtcggtatctatcaaaccgcccgggcccagccgatcctgcgcgccggtggcccgagcgcctattacggtattgatgacagcctgcgttttgacatgatccgccctgacgcccgctaa

SEQ ID NO: 7561 - DNA, 747 bp, Klebsiella pneumoniae
  CDS (1)...(747)
ggtcgttttgtacgccgcaacaacaacacaatctccgtcgccgggcggccaatactgaaactgcgcaacgtctctaaacattcctgtccggtgtcagcgctgacggatatcgaattagaagtccacgccggcgaggtggtcgcgctggtcggcgacaacggcgcgggcaaatccacgctggtgaagatcctcgccggcgtccaccagccgacctccggcaccattgagtttgacggcaaccccgtcaccctcgatagccccggcaaggcgctggaatacggtattgccacggtgtttcaggatctggcgctgtgtgaaaaccttgatgtggtggcaaacctgtttctgggtcatgaaatttcgccgttccagctcgatgaagtggcgatggaagtgaaagcctggacgctgctgcaggagctggcggcacgtattccgtcggtacgcgaaccggtggcatcgctttccggcggccagcggcagaccgtcgccatcgcccgttcgctgctgctgaaccctaaaatcattatgctcgatgaacccaccgcggcgctgggcgtcgcgcagaccgcggaagtgctcaacctgattgagcgcgttcgcgagcgcgggcttggcgtcatcatcatcagtcacaacatggaagacgttcgcgccgtcgccgaccgtatcgtggtgctgcgtctcgggcgcaacaaagggatcttcacgcccgatgcttctaatcaggatctggtcgccgcgatc

SEQ ID NO: 7562 - DNA, 420 bp, Klebsiella pneumoniae
  CDS (1)...(420)
ttcggatcagaactgctggctaaatttgtcaatatcctgatggtagatggtaaaaaatctactgcagaaactatcgtatacagcgcgctggagaccctggctcagcgttctggtaaatctgaactggaagccttcgaagttgcgctcgaaaacgtgcgcccgactgtcgaagttaagtcccgccgcgtaggtggttctacttatcaggttccagttgaagttcgtccggtccgtcgtaatgccctggcaatgcgttggatcgttgaagctgctcgtaaacgcggtgataaatccatggctctgcgcctggcgaacgaactcactgatgctgcagacaacaaaggtactgcagttaagaaacgtgaagacgttcaccgtatggccgaagccaacaaggcgttcgctcactaccgttggtaa

SEQ ID NO: 7563 - DNA, 591 bp, Klebsiella pneumoniae
  CDS (1)...(591)
caggtgtttgacgcggtcatcaccgaggccggtaagaaaaacgttacggttgaggtgctcagtggcgaacccgacgatcgggaatcgccgctgcatatccatttaggccaggtgatgtcccgcggcgaaaaaatggaattcaccatccagaaatcgatcgaactcggggtaagcctcataacgccactgttttccgagcgctgcggcgttaaactggatgccgaacgtttgcagaaaaagatccagcagtggcagaaaatcgctattgccgcctgcgaacagagcggtcgtaacgtggtaccggaaatacgtccggcgatgcagctggaggcgtggtgcgccgagcaggacagcgggctgaagctcaacctgcacccgcgcgccagcgccagcattaacgacgtgccgctgccggttgaacgcgtccgtctgctgattggcccggaaggcgggctgtcggctgaagagatagcgatgaccgcgcaataccagtttactgatatcctgttgggaccgcgcgttctgcgtacagagactactgcgctcaccgccatcaccgccctacaggtgcgttttggcgacttaggttga

SEQ ID NO: 7564 - DNA, 675 bp, Klebsiella pneumoniae
  CDS (1)...(675)
atgcgtgtttacgttactggtaatattaccgtagatgaaacctggtccattccggatataccgaaaaaaggagcctccattcacggcgttaaagtgtcgcaggatatcggcggtaaaggcgcgaaccaggcgattatattatcccgctgcggaatagagacgcgtttaattgccgccacgggaaatgacagcaacggcgcgtggatccgccagcagataaaaaatgaaccactgatgctactacccgacggccatttcaatcaacatagcgatacctcgattattttaaatagcgctgatggcgacaacgccatcattaccactacggcggcggccgatacattcagcctggatgaaatgattccgcatatggcggatgccgtcgctggcgatattctgctacagcagggcaatttctccctcgataaaacgcgggcgctgttccagtacgccagaagccgcggcatgacgacggtattcaacccctcacctgtcaatcctgacttttgccatctgtggcccctcatcgacatcgcggtggtcaatgaatccgaggccgagctgctccagccatacggggtgaaaaccttagtgattacccagggcgccgcagtggccctgggtcaaggagggccagcgtcagttttgtcccgccgtgcccgccgaagcgcttga

SEQ ID NO: 7565 - DNA, 648 bp, Klebsiella pneumoniae
  CDS (1)...(648)
gtggcagggagaggcgctgaattacagcaagcgcggtctgctggcgctgcgccacaggtggcgacggtgtttcaggatccggatcagcaaatcttctataccgatatcgacagcgatatcgcttttagtctgcgtaacctcggggtggcggaagaggagatcgcccgccgggtggatgaggcgttgaccctcgtcgatgcccaggggtttcgccagcagccgatccagtgcctcagccatgggcagaaaaaacgggtggcaatcgccggggcgctggtgctgcaggcgcgctacctgctgcttgacgagcccaccgcgggcctcgacccacgcgggcgggcgcagatgatcgccatcatccgccgcattgtcgggcagggccggcatgtggtgatctccagccacgatatcgatctgatctatgaggtgagcgacgccgtttacgttctgcgtcacggcgaagtgctggccgcgggggatcccggcgaggtatttgcctgcgcggagacgatggaccgggcaggattgacccagccgtggctggtgaaacttcatagcgaactggggctgccgctgtgtaaaaccgaggcggagttttttcagcggatgcacaacaacgcgataggcgcgataaaggaggcatcatga

SEQ ID NO: 7566 - DNA, 582 bp, Klebsiella pneumoniae
  CDS (1)...(582)
caggcgcagcatatttcgctgaccaacttcctcgacagcggtctgtacaccagcctgaccgagcgcctggtcgcggcccagcgccacatcgacaacgaagtcaaagtcaccgatagcctgaaagacagctttgacgatactaacaacaacctgttccagctgggcgcggataacatcttcctcggtcgcaaagcagccaccaaagaagaagccattcgcttcgccggtgagcagctggtgaaaggcggctacgtcgagccggaatatgtgcaggcgatgctggatcgcgaaaaactgacctcgacctatctcggcgagtccatcgcggtaccgcacggcaccatcgaagcgaaggaccgcgtgctgaaaactggcgtcgtcttctgccagtacccggaaggcgtgcgcttcggtgaagaagaagatgaagtcgcgcgtctggtcatcggcatcgccgctcgtaataacgagcacattcaggttatcaccagtctgactaacgcgctggatgacgaaaccgtgattgagcgcctggcgaaaaccaccagcgtcgacgaagttctggcactgttaaataaataa

SEQ ID NO: 7567 - DNA, 480 bp, Klebsiella pneumoniae
  CDS (1)...(480)
atggcacaacgagtacaactcaccgcaacggtgaccgaaaatcaactcggtcaacgcttagatcaggctttggccgaattgttccctgattattcgcgatcgcggataaaagaatggatcctcgaccaacgcgtattagtcaatggcaccattggcgataaaccgaaagaaaaagtgctggggggagaacgcatcgctatcgatgtcgaaatcgaagaagaggcgcgcttccagccgcaggatattccgctcaatatcgtttacgaagatgatgacatcatcgtgatcaataaaccgcgcgatctggttgtacatcctggcgcgggcaaccctgacggtactgtgctgaatgcgctgctgcactactatccgcctattgccgatgtgccgcgcgcgggtattgttcatcgtctggataaagacaccaccggtctgatggtggtggcgaaaaccattccggcgcaaacccggctggtggag

SEQ ID NO: 7568 - DNA, 570 bp, Klebsiella pneumoniae
  CDS (1)...(570)
agctccagcgcgcaggtagtccgtgtgccgaccaatgaacccatcatcatcaagcgcatgctggacatcggcttctataacttcctggtgccgtttgtcgagacggctgaacaggcggcgcaggcggtggcttcgacccgttatccgccggaagggatccgcggggtctccgtttcccaccgcggcaatatgtttggcaccgtgccggactacttcgcccagtccaacaagaacatttccattctggtgcagattgagagccagaccggagtggacaacgtcgaggcgattgccgcggccgagggcgtggacggtgtgtttgtcggcccgagcgacctggccgccgccttaggccatttgggcaatgccgcccatcctgaggtgcagcgcgctatccagcatatcttcgccagcgcgaagaagcacggtaagccaagcggcattctggcgccagtggaagccgatgcgcgccgctatctggaatggggcgcgaccttcgtcgccgttggcagcgatctgggcgtcttccgttctgcaacccagaaacttgccgacgcgtttaaaaaataa

SEQ ID NO: 7569 - DNA, 696 bp, Klebsiella pneumoniae
  CDS (1)...(696)
atgattaaactttccaatatcaccaaagtattccagcaggggaatcgcagcattcaggcgctgaataacgtcagcctgcatgtccctgccggacagatttacggcgtcatcggtgcctccggcgccggtaaaagtacgctgattcgctgcgtgaacctgctggagcgcccgaccgagggcagcgtacaggttgacggtcaggaactgactgccctgtcggagaaagagctaacccgcgctcgccgtcaaattggcatgattttccagcattttaacctgttggcctcgcggaccgttttcggcaacgtggcattacccctggagctggataacacgccgcagcgtgaaatcaaacgccgtgtcacggagctgctggatcttgtcggtctgggtgataagcacgacagctacccggccaacctctccggcggccagaaacagcgcgtggcgattgcccgcgcgctggccagcaatcctaaagtattgctgtgcgatgaagccaccagcgccctggatccggccactacccgttccattctcgaactgctgaaagacattaaccgtcgtctggggctgaccatcctgttgatcacccatgaaaatgacgtggttaaacgtatctgcgactgcgtggcggtcaatagtaatggtcaactgatcgagcaggacacggtgaacgaattcttctcccatccg

SEQ ID NO: 7570 - DNA, 879 bp, Klebsiella pneumoniae
  CDS (1)...(879)
gtggccgacgagcgggtccgcaagcgctggatccgcgcccgcgacctgttccagcgcctggcggagatccagtttgaatccggctacccgtacatcatgtttgaagacaccgtgaaccgcgccagtccggtggccgggcgggtcaccatgagcaatctgtgttcggagatcctgcaggtcagtacgccgtccgcctataatgaagacctcagctatgcgcatatcggggaagatatctcctgcaacctcggctcgctgaacatcgcccacaccatggactcgccggatttcggccgcacaatcgccaccgcggtgcgcgccctgaccgccgtgtccgacatgagcgatattcagtcggttccctcggtggcggccggcaacgcggcctcccacgccatcggcctggggcagatgaatctgcacggttacctggcgcgggaaggcattgcctacggcagcccggaggggctggacttcaccaatatctacttctacaccgtgacctggcacgcgctgcacacctcgatgcagctggcccgcgagcgcggccagcgcttcgccggcttcgagcagtcgcgctacgccagcggggcgtacttcgacaaatatctgcaggaggagtggcagccgaaaaccgaacgggtgcgcacgctgttcgcccgcgccggcatctctctgcccgaccgggaaagctggcgccactgcgcgacgatgtcatgcgctatggcatctacaatcgctatctgcaggcggtgccgcccaccggctcgatctcgtacatcaaccatgccacctccagcattcacccgctcgtctcgaagattgagatccgcaaagaggggaaaaccggacgggtgtactaccccgcgccatttatga

SEQ ID NO: 7571 - DNA, 720 bp, Klebsiella pneumoniae
  CDS (1)...(720)
atgcgacttgataagtttatcgctcagcagctgggcgtcagccgcgctattgccgggcgtgaaattcgcggcagccgcgttaccgtggacggcgacattgtgaaagatgcctcttttaagctccagccggagcacgaggtggagtatgacggaaatacgctgacccagcagaatggcccgcgttactttatgctcaacaagccgcaagggtacgtctgttccaccgacgatcccgatcatccgactatcctttatttcctcgacgagccggtggcgcataagctgcacgccgccggacggctggatatcgacaccaccgggctggtgctgatgaccgatgacggccagtggtcgcatcgcattacctcgccgcgccaccactgtgaaaaaacctatctggtggcgctggaaagcccgctggcggaagggaccgcggagctgttcgccaaaggcgtccagctgcataacgaaaaagatctcaccaaaccggcgttgctggaagttatcactccgaccgaagtgcgcctcaccatcagcgaaggccgctaccatcaggtgaaacgcatgttcgccgccgtgggcaaccacgtggttggcctgcatcgggaacgcatcggcgacatcctgctggatgaatcgctggcgccgggtgaatatcgtccgctgacggaagcggaaatcgccagcgtgggcgccccgcagccacggagtaaaacgtga

SEQ ID NO: 7572 - DNA, 432 bp, Klebsiella pneumoniae
  CDS (1)...(432)
gtggcaaagaacattcaagccatccgtggcatgaacgattatctgccgggcgaaaccgctctctggcagcgcattgaaggctcactgaagcaggtgctcggtagctacggttacagcgaaatccgtttgccgattgtagagcagaccccgttattcaaacgcgcgatcggcgaagtgaccgacgtggttgaaaaagagatgtataccttcgaagaccgcaatggcgacagcctgacgctgcgtccggaagggacggcgggctgcgtacgtgccggcatcgaacatggtctgctgtacaatcaagaacagcgtctgtggtacgtcgggccaatgttccgtcacgagcgcccgcagaaaggtcgctaccgccagttccatcagatcggcgccgaagtgtttggcctgcagggccggacatcgacgcggagttga

SEQ ID NO: 7573 - DNA, 420 bp, Klebsiella pneumoniae
  CDS (1)...(420)
atgaccgttgaatataccgtgatcgagaaggtgccctccgccgaagcgttttgccacctgcgggtagccgccggcatgtcgccgcgccccctggaaggcgccagagccggactgccgcatagctgttatggcgtacatatcctctggcaggagacgccgatcgcgatgggacgcatcgtcggcgacggcgcgattaatttcgatattgtcgacgtcgccgtcgatccggctcaccagggaaaaggccttggccggctggtgatggagaagctggtcgcctggctggacgctaacgcctttgatggcgcctacgttacgctggtggcggatgtgccggaactgtacgcgaagttcggcttcgaaagcgttcgcccggagagcgaggggatggcccgcgtctggcgaacccgcagtcgttag

SEQ ID NO: 7574 - DNA, 582 bp, Klebsiella pneumoniae
  CDS (1)...(582)
atgcgccgcaaacctacagctggaactggacggcacgcgtggaccatccataaccacgccaacgtttttgcccgcagcgggctggatatcggcgcgcgtttcttcttgcagcatttaccgtctgatctagaaggcgagatcgccgatctcggctgcggcaatggggtgattggcctgcaggcgctggcgcaaaatccaaacgccagcgtgatgttcaccgatgagtcgcacatggcggtggcttccagccggttgaacgtcgagcgcaatctgccggacgatatcgcacgctgtgaattcatggtcaacaactcgctctccggcattgagcctgaccgctttacggcgatcctgtgtaatccgccgttccatcagcagcacgccattaccgaccatatcgcctggcagatgtttaacgatgcccgccgcagcctgaaatacggcggcgagctgtacgtcgtcggcaaccgccacctcgattacttccgtaagctgaagcgtgcgtttggtaattgcacgacgattgcgacgaacaataagtttgtcattttgaaagcaaccaaggtgcgtaagcagcgctga

SEQ ID NO: 7575 - DNA, 741 bp, Klebsiella pneumoniae
  CDS (1)...(741)
atgaatcacacaatccaggttttttctcgcccacaaggtagggtatatttcgcttttacaggagaatctatgctgcccgactcatcaacccgattaaacaaatacatcagtgaaagcggcatctgctcgcgtcgcgaagcggaccgctttattgaacaaggcaacgtctttatcaatggcaagcgcgccaccattggcgatcaggtgaagcctggcgatttagtcaaagttaacggacagttgattgagccgcgtgaagcggatgatctggtgctgattgcgctgaataagccggtcggcattgtgagcaccacggaagacggcgagcgcgacaacattgtcgatttcgtcaaccacagcaagcgtatcttccctattggccgtctggataaagattctcaggggctgatcttcctcaccaaccacggcgatctggtgaacaagatcctgcgcgccggcaacgaccatgaaaaagagtatctggtgacggtcgataagccggtgaccgatgagttcattcgcggcatgggcgcgggggtaccgattctcgggaccgtgaccaaaaaatgtaaggtaaagaaagaagcgccgttcgttttccgcatcactctggtgcaggggctgaatcgccagatccgtcgtatgtgcgagcactttggctatgaagtgacgaagcttgagcgtacgcggatcatgaacgtgagcctgacggggatcccttgggtgaatggcgtgatctaa

SEQ ID NO: 7576 - DNA, 1686 bp, Klebsiella pneumoniae
  CDS (1)...(1686)
caggccggtaatcaagaaaaagaagccatctcaccctacgagttgttacatgaggatttcccaatgctcagtcaaatacaacgctttggcggcgccatgtttaccccggttttattgtttccttttgccgggattgtggtcggtatcgccatcatgctgcgcaacccgatgttcgtcggcgaagcgctgaccgcacccgacagcctgtttgcccagatcgttcacatcattgaggagggcggctggaccgtctttcgtaatatgccgctgattttcgccgtcggtctgccgatcggcctggcgaaacaggcccagggccgggcctgtctggcggtgctggtgagctttctcacctggaactattttatcaacgccatggggatgacctggggccacttcttcggcgtcgatttttccgctgaacccacggccggcagcggcctgacgatgattgccgggatcaaaaccctcgacaccagcattatcggcgccatcgtcatctccggtctggtgacggccctgcacaatcgctatttcgataaacccctgccggtattcctcggcatctttcagggttcatcgtttgtggtcattgtcgccttcctcgcgatgatcccttgcgcctggctgaccctgctcggctggccaaaggtccagctgggtattgaatcgctgcaggcctttctgcgctcagccggggcgcttggagtgtgggtttacatcttccttgagcgcatcctgatccccaccggcctgcaccacttcgtctatggcccgttcatctttggcccggcggtggtggagggcggactgcaggtctactgggcagagcatctgcaggcgttcagtcagagtacggaaccgctgaagacgctgttcccggagggcggctttgccctgcacggtaactcgaaagtgtttgggtcggtggggattgcgctggcgctctatttcaccgccgcgccggaaaaccgcgtcaaggtcgccggcctgctgatccccgccaccctgaccgcgatgctggtcgggatcaccgagccgctggagttcaccttcctcttcatctcgccgctgctgttcgccgttcacgcggtgctggcggcgaccatggcgacggtgatgtacatctgcggcgtggtgggcaacttcggcggcggcctgctcgatcaattcttgccgcaaaactggatcccaatgttccatcaacacgcttcgatgatgttcattcagataggcatcggcctctgtttcaccgccctctacttcgtagtcttccgtaccctgatcctgcgtctgaacctgaagacgcctggccgggaagagagcgaaatcaagctctacagcaaggccgattaccaggcggcacgaggtaaaaccacggccgccgccgcgccagagacccggctgggtcaggccgctggcttcctgcaggccctcggcggcgccgacaacattgaaagcatcaacaactgcgccacccgactgcgcatcgcgctggtcgatatggcgaaaacgcaaagtgacgacgtctttaaagcgctgggcgcccacggggtagtacgccgcggcaacgggattcaggtcatcgtcggcctgcacgttccccaggtgcgcgaccagctggaaaacctgatgaaagattctctttcgaccgaacataccaccatgacggaggcagtatcatga

SEQ ID NO: 7577 - DNA, 1437 bp, Klebsiella pneumoniae
  CDS (1)...(1437)
atggtatttgcctctcttcttgaacgccagcgcgtacgtctgttgctggcgctgttgtttggagccagcggaacgctggctttttcaccttatgacttctggccagcggctatcgtttcgctgatcggtctgcaggcgttaaccctcaaccgacgcccgctgcaaagcgccgggatcggctatttctggggactcgggttgttcggcacgggtatcaactgggtctatgtcagcatcgcgcagtttggcggaatgcccggcccggttaacgtcttcctcgtcgttctgctggcggcctatctctcgctctacaccggcctgtttgccggcctgctcgcccgtctgtggcctaaaactaactggatacggatggctatcgctgcccctgtcgtctggcaaatcaccgagttcctgcgcggctgggtgctgaccggctttccgtggctacagttcggctacagccagattgacggcccgctgaaaggtctcgcgccggtgatgggcgtcgaggcgattaacttcctgctgatggtagtcagcggcctgctggccctggccctcgtccagcgcaactggaagccgctggcgattgccgcgctgctgttcgccctgccgttcccgctgcgctatatccagtggtatcagctgctgccggcgcgcgcgacccaggtctcgctggtgcaaggcgatatcccacaggccatgaaatgggacgaaaagcagctggtcaataccctgaaaacctacctggcgctgacccagccgcatatcggccactcgcagctgattatctggcctgaatcggcgatcccggatctggagatcaaccagcagcagttcctcagcatgatggacgatctgctgcgcgcaaaagacagctcgctgatcaccggcattgtcgatgcgcgtctcaacaagcagaaccgttacgatacctacaacaccatcattactctcggcaaagataacccgtaccgctacgactcgaccaaccgctacaacaagaaccatctggtgccgttcggcgagtttgtaccgctggagtcgattctgcgtccgctggcgccgttctttgacctgccgatgtcctccttcagccgcggcccctacgtgcagccgcagctgatggcgcataacctgaagctgaccgcggccatctgctacgagataatcctcggggaacaggtgcgggataacttccggccggacaccgacttcctgctgaccatctccaacgacgcctggttcggcaagtccatcggcccgtggcaacacttccagatggcgcgaatgccgcctctggagctggcccgcccgctgctgcgcacatccaacaacggcattactgcggtgatcggcccgcgcggcgagatccagaagatgatccgcagttacccgcgaagtgttgacacccacgtgacccccgcagcggcttaa

SEQ ID NO: 7578 - DNA, 1083 bp, Klebsiella pneumoniae
  CDS (1)...(1083)
atgaagtcttctattgttgccaaactggaagcgttgtacgagcgccatgaagaagtgcaggcgctgctcggcgatgccgcgacgattgccgatcaggataaattccgcgcgctgtcgcgggagtatgctcaactgagcgatgtggcgcgctgctataccgactggcgtcaggtgcaggaggatattgaaaccgcgcagatgatgctcgacgatccggaaatgcgcgaaatggcgcaggaagagctgcgtgacgccaaagaaaaaggcgaccagctggagcaacagctgcaggttctcctcctgccgaaagatcctgatgacgagcgtaacgccttcgtggaagtgcgcgccgggaccggcggcgacgaagcagcgctgtttgccggcgatctgttccgcatgtacacccgttacgcagaatcgcgccgctggcaggtagagatcctcagcgccaacgaaggtgagcacggcggctttaaagaggtgatcgccaagatcagcggcgacggcgtttacggtcggctgaaatttgaatccggcggccatcgcgtgcagcgtgtgccggccaccgaatcgcaggggcggatccacacctccgcctgtacggtggcggtgatgccggagctgccggaagccgaaatgccggacattaacccggcggatctgcgcatcgataccttccgttcctccggggcaggcggtcagcacgttaacaccaccgactcggctatccgcattacccacctgcccaccggcatcgtggtggagtgccaggacgagcgttctcagcataaaaacaaagccaaggcgctgtcggtgctgggcgcgcgcatccgcgccgccgaagtggccaaacgtcagcaggcggaagcctccacgcgccgcaacctgctgggcagcggcgaccgcagcgaccgcaatcgcacctataacttcccgcagggccgcgtgaccgaccaccgcatcaacctgacgctctaccgtctggatgaggcgatggagggcaaactcgacatgctgattgagccgattgtccaggaacatcaggccgatcagctggcggcgctgtccgagcaggaatga

SEQ ID NO: 7579 - DNA, 828 bp, Klebsiella pneumoniae
  CDS (1)...(828)
atgaccgatattgccattgttgctgcagtacgcaccccggtaggcagctttcgcggcgccttcgcccctctttccgccgtcgacctcggcgcggcggtggtgcgcggcctgcttgaacgctgccagctgcctgccgcagcggtcgacgaactaattttcggccaggtgcttaccgccggctgcgggcagaacccggcgcgccagaccgcgctgcgggccggcctgccggtcgacactccggcggtcaccgtcaatctggtgtgcggctccggactgaaagcggttcagcaagcggtgcaggcgatccgctgcggcgacgccgggatcgttatcgccggcggccaggagagcatgagcaatgctccctatctgatgcatggcgcccgcgacggcctgcgtttcggccacgccagcctgcaggacagcatgatccaggacggcctgtgggacgcctttaacgactaccacatgggcattaccgccgagaacctcgccgacgccttcgacatcagccgcgagcgccaggacgccttcgccgccagctcccagcgcaaagcggcggctgctatcgccgccgggcgctttcgcgaggagatcgttccggtcagcgtcccgcagggcaaaaagccgccgcgagtcgtgactgacgatgagcaaccgcgcccggagaccagcgagcagcagctggcccagctgcgcccggcgtttcgcccggctgacggcagcgtcaccgccgggaatgcctcgtcgctgaacgacggcgccgcggcggtcctgctgatgcgcgtcgataaagcgcgcgagcttgggctgccggtgctggcgctg

SEQ ID NO: 7580 - DNA, 801 bp, Klebsiella pneumoniae
  CDS (1)...(801)
atggcgttattgaatgtagataaattatcggtgcatttcggcgatgaaaacgcgccgttccgcgccgtagaccgcatcagctatagcgtgaagcagggtgaagtggtcggtatcgtcggagagtccggctccggtaaatccgtcagctcgctggcgattatggggctgattgactatcccggccgggtgatggcggacaaactggaatttaacggccgcgatctgcagcgcatctctgaaaaagagcggcgccagctggtgggggcggaagtggcgatgatcttccaggatccaatgaccagcctcaacccgtgcttcaccgtcggctaccagattatggaagcgattaaggtccatcagggtggtaataagcaaacccgccgccagcgggccatcgacctgctgaacctggtgggcattcccgatccggcctcgcggctggacgtctatccgcatcagctttccggcggcatgagccagcgtgtgatgatcgcgatggcgattgcctgtcggccaaaactactgattgccgatgaaccgaccaccgcgctggacgtgaccattcaggcgcaaatcattgagctactgctggatctgcagcagcaggagaatatggcgctggtgctgatcacccacgacctggcgctggtggcggaaccgcgcataaaattatcgttatgtacgcgggtcaggtggtggagaccggtgacgcgaaagatatcttccgcgcgccgcgccatccttatacccaggcgctactacgcacgctaccggaattcgcccaagataaagcgcgtctaa

SEQ ID NO: 7581 - DNA, 759 bp, Klebsiella pneumoniae
  CDS (1)...(759)
atggcaatccctaaattacaggcttatgcgctgccggaagccagcgatattccggcgaacaaagttaactgggcctttgagccgtcgcgcgccgcgctgctgatccacgacatgcaggagtatttcctcaacttctggggcgaaaacagcgcgatgatggagaaagtggtggctaatatcgccgccctgcgcgacttctgcaaacagaacggcattccggtgtactacaccgcccagccgaaagagcagagcgatgaagaccgcgccctgctgaatgatatgtgggggccgggtctgacccgctcgccggagcagcagcaggtgattgccgcgctggcgccggatgaagacgataccgtgctggtgaaatggcgctacagcgcgtttcatcgctcgccgctggaggagatgctgaaagagaccggtcgcgaccagctgatcatcaccggcgtttacgcccatatcggctgcatgaccaccgccaccgatgctttcatgcgcgatatcaaaccgttctttgtcgccgacgcgctggcagatttcagccgtgaagagcacctgatggcgctgaaatacgtcgccggccgctccggccgcgtggtgatgaccgaagagctgtgccgctcccagcctccaaaagcgctgcgcgcgctaattctgccgctgctcgacgaatccgacgaaccgctggatgatgaaaacctgatcgattacggtctggattcggtgcggatgatggccctggccgcccgtggcgtt

SEQ ID NO: 7582 - DNA, 822 bp, Klebsiella pneumoniae
  CDS (1)...(822)
atggcagttgttaaatgtaaaccgacatctccgggtcgtcgccacgtcgttaaagtggttaacccagagctgcacaagggcaaaccttttgctccgttgctggaaaaaaacagcaaatccggtggtcgtaacaacaatggccgtatcaccacccgtcatatcggtggtggccacaagcaggcttaccgtattgttgacttcaaacgcaacaaagatggtatcccggcagttgttgaacgtcttgagtacgatccgaaccgctccgcgaacatcgcgctggttctgtacaaagacggcgagcgccgttacatcctggccccgaaaggcctgaaagctggcgaccagattcagtctggcgttgatgctgcaatcaaagcaggcaacaccctgccgatgcgcaatatcccggttggttctaccgttcataacgtagaaatgaaacctggtaaaggcggtcagctggctcgttccgctggtacttacgttcagatcgttgctcgtgacggtgcttatgtcaccctgcgtctgcgttctggtgaaatgcgtaaagtcgaagcagactgccgcgcgactctgggcgaagttggcaatgctgagcatatgctgcgcgttctgggtaaagcaggtgctgcacgctggcgtggtgttcgtcctaccgttcgcggtactgcgatgaacccagtagaccacccacatggtggtggtgaaggtcgtaactttggtaagcacccggtatccccgtggggcctgcagaccaaaggtaagaagacccgcagcaacaagcgtactgataaattcatcgtacgtcgccgtagcaaataa

SEQ ID NO: 7583 - DNA, 1044 bp, Klebsiella pneumoniae
  CDS (1)...(1044)
ctgagcggcgttgacggcctgctgcacatcaccgatatggcctggaagcgcgttaagcatccgagcgaaatcgtaaacgttggcgacgaaatcactgttaaagtgctgaagttcgaccgcgagcgtacccgtgtatccctgggcctgaaacagctgggcgaagatccgtgggtagctatcgctaaacgttatccggaaggtaccaaactgaccggtcgcgtgaccaacctgaccgactacggctgcttcgttgaaatcgaagagggcgttgaaggcctggttcacgtttccgaaatggattggaccaacaaaaacatccacccgtccaaagttgttaacgttggcgacgttgtggaagtaatggttctggatatcgacgaagagcgtcgtcgtatctccctgggtctgaagcagtgcaaatctaacccatggcagcagttcgcggaaacccacaacaagggcgaccgtgttgaaggtaaaatcaagtctatcactgacttcggtatcttcatcggcctggacggcggcatcgacggcctggttcacctgtctgacatctcctggaacgttgcaggcgaagaagcagttcgtgaatacaaaaaaggcgacgaaatcgcagcagttgttctgcaggttgacgcagagcgtgagcgtatctccctgggcgttaaacagctcgcggaagatccgttcaacaactacgttgctctgaacaaaaaaggcgctatcgttgttggtaaagtgactgcagttgacgctaaaggcgcaaccgtagaactggctgacggcgtagaaggttacctgcgtgcttctgaagcatcccgtgaccgcgttgaagacgcaactctggttctgagcgttggcgacgaagttgaagcgaaattcaccggcgtggatcgtaagaaccgcgtagtgagcctgtctgtacgtgcgaaagacgaagcggaagaaaaagacgctatcgctaccgtgaacaagcaggaagacgcgaacttctccaacaacgctatggctgaagcgttcaaagcagcgaaaggcgagtaa

SEQ ID NO: 7584 - DNA, 1008 bp, Klebsiella pneumoniae
  CDS (1)...(1008)
tggggggcggcggcgtccggccggcaaccggaagggttcacgaataagggccatcgttccatctgggacagttggtttgccgaacagccggagcgattttatcagcaggtagggccgcagaccgtgtgtgatacttatcatcagtatccgcaggacgtggcgctgatgaaacagaccggcttcaactcatttcgtacctcgatacagtggtcacgactgatcgctgatttggaaaccggcgcgccggacccggacgcggtgcgtttttatcacgcctatctggatgagatgatcgccaacggcattgagccgatgatcaatctctaccactttgatatgccggaagcgctgcagaaacagtacggcggctttgaatcggcgcacgtagccgagctgtttgcccgctttgcccgcaccgcctttagcctgtttggccataaggttaaatactggataaccttcaacgagccgattgtgccggttgagggaggctacctgtacgactttcactatccatgtaagaaagatggccggctggcggcgcaggtggcgtttaacattatgctggcgcacgccaaagcggtaacggcttatcgtgaactggcgctggcgggcgagatcggcgtggtgctcaacctgaccccgagctataccctcaccgacagcgacgcggataaaaaagccgccgggtatgccgacctgttttttaaccgcagcttccttgacccgctggtaaaacatgaattccccaaagcgctgtgcgagatccttgccgcccacgactgcctgccgacgaccagcaaagacgacgcggcgttgatcctcagcgcggatatcgattttcttggggtaaactattatgtgccgcggcgggtaaaagcgcgtgagagcgaatatgacctcgattatttcaccccggaatactatttcgaaaacgcggtgaacccgcagggccgctttaatccttatcgtgataacaacgagatcctgccgcaggtaatgctatga

SEQ ID NO: 7585 - DNA, 318 bp, Klebsiella pneumoniae
  CDS (1)...(318)
atggaagatttagaaacgatcatcatggagctgctggttaacgcgggttccgcacgtagcgcggcgctgacggcgctacagctggcgcgcaaaggcgattttgtcgccgcggagcaggccatggctgaatcccatgagttcgtcaaacatgcgcataaaattcagacccagcttatcggcatggatgaaggcagcggtaaattgccggtcaacttgatcaccgtgcattcccaggaccatctgatgaacgctatggtcattcaggatctggcgaccgacatgattgaactctatcgtcgtctgcccctcgcgcaataa

SEQ ID NO: 7586 - DNA, 780 bp, Klebsiella pneumoniae
  CDS (1)...(780)
atgccgctttatggcgcgcgacgaattcgccgatggcgcaactaccttcagggtaaaaaagtggtcatcgtcggctgcggcgcgcagggcctgaaccagggtctgaacatgcgtgactccggcctggatatctcctatgcgctgcgtaaagaagcgatcgctgagaagcgcgcctcctggcgtaaagcgactgaaaacggcttcaaagtcggcacttatgaagagctgatcccgcaggccgacctggtggttaacctgacgccggacaaacagcactcagacgttgtgcgctccgtacagccgctgatgaaagacggcgcacgtctgggttactcccacggcttcaacatcgtggaagtgggcgagcaaatccgtaaagacatcaccgtggtgatggtggcgccgaagtgcccgggcaccgaagtgcgtgaagagtacaaacgcggtttcggcgtaccgacgcttatcgcggtacacccggaaaacgacccgaaaggcgaaggcatggcgattgccaaagcatgggctgcggcgacaggcggccaccgcgcgggcgtgctggaatcttccttcgtggcggaagtgaaatctgacctgatgggcgagcaaaccatcctttgcggcatgctgcaggcgggttctctgctgtgcttcgacaagctggtggcggaaggtaccgatccggcgtatgcagaaaaactgattcagttcggctgggaaaccatcaccgaagcgctgaagcagggcggcatcaccctgatgatggatcgcctctccaat

SEQ ID NO: 7587 - DNA, 963 bp, Klebsiella pneumoniae
  CDS (1)...(963)
tgcaccgccgccgccgaccttgccgatgcgcaagcggtctgcgataagctgggcattgaactgcacaccgttaactttgccgccgaatattgggataacgtctttgagctcttcctggaagagtacaaagccggccgcacgccgaacccggatattctgtgcaataaagagatcaagtttaaagccttcctcgagtttgctgccgaagacctcggcgccgactacatcgccaccgggcactatgtgcgccgcgccgatgtcgacggtaaaagccagctgctgcgcggcctcgacggcaacaaagatcagagctacttcctctacacccttagccacgagcagattgcccagagcctgttcccggtgggtgaactggaaaaaccgcaggtgcgtaagatcgccgaagagctggatctgatcaccgcgaagaaaaaagattccaccggcatctgctttatcggcgagcgtaaattccgcgatttccttggccgctatctgccggcgcagccgggcaaaatcctcaccgtcgacggcgaggagatcggtacccatcaggggctgatgtaccacaccctgggccagcgtaaagggctgggtatcggcggcaccaaagagggtagcgaagatccatggtacgtggtcgataaagacgttgagaataatattcttatcgtcgcccagggccatgaccacccgcgcctgatgtccgtcggtctgattgcccaacagctgcactgggtaaaccgtgaaccgctgcagggcaccctgcgctgcacggtgaaaacccgctatcgccagaccgatatcccctgcaccgttaccgcgctggatgaagaccgtatcgaagtccgcttcgatgagccggtcgcggcggtgaccccgggccagtccgcagtgttctatttaggggaagtgtgcctcggcggcggaattattgaacaacgactgcctctgcagtcctga

SEQ ID NO: 7588 - DNA, 813 bp, Klebsiella pneumoniae
  CDS (1)...(813)
atggctattaaactgattgcaatcgatatggacggcacgctgctgctgcccgaccataccatctctccagcggtgaaagccgccatcgccgcggcgcgcgagcgcggtgttaacgtggtgctgaccaccggtcgcccttacgctggcgtccacagctatttgaaagagctgcatatggagcagccgggtgattactgcattacctacaatggcgcgctggtgcagaaggctggtgacggaagcaccgtcgcgcaaaccgcgctgagctatgacgactatcgcttccttgagcagctctcccgcgaggtcggctcccacttccatgcgctggatcgcaatacgctgtataccgcgaaccgcgatatcagctactacaccgtccacgaatcctatgtggcaaccattccgctggtgttctgcgaagcggagaaaatggatcctgagatccagctgctgaaagtgatgatgattgatgagccggcaatcctcgaccaggccatcgcccgtattccggcggaagtgaaagagaagtacaccgtgctgaaaagtgcgccttacttcctcgaaatactggataaacgcgtcaataaaggcactggcgtgaagtcgctggccgatgcgctgggcatcaagccggaagagattatggcgattggcgatcaggaaaatgatatcgcgatgattgaatttgccggcgtcggcgtggcaatggataacgccattcctgcggtcaaagaagcggcgaacttcatcaccaaatcgaaccttgaagatggcgttgccttcgccattgaaaaatacgttttagcgtaa

SEQ ID NO: 7589 - DNA, 624 bp, Klebsiella pneumoniae
  CDS (1)...(624)
gtgctcaacaaactttctcgtctgctggatgaagcgggtatttcgctcaccgatcaccagaaaaatcagctggtggcttacgtcggactgctcgataagtggaacaaagcctataacctgacctccgttcgcgatccgaatgagatgctggtgcgtcatattctcgacagcatcatcgtggcgccttatctgcagggctcgcgctttatcgatgttggtacgggcccggggttgccggggatcccgttggccatcgtatgtccggagtcacatttcaccctgctggacagccttggcaagcgcgtgcgcttcctgcgtcaggtgcagcacgagctgaagctggataacgtcaccccggtgcagagccgcgtggaagccttcccggccgagccgccgtttgatggcgtgataagccgcgctttcgcatcgcttaatgatatggtgagctggtgccatcatctgccggcagcgaatggtcacttctatgcgctcaaagggttagcgcaaaaagaagaaatggaaagtctgccggaagggtatgacattgtcgaggtgattgagctgcatgttcctcggttggaaggggagcggcatctggtggtgattaagccaaaatcgagttaa

SEQ ID NO: 7590 - DNA, 906 bp, Klebsiella pneumoniae
  CDS (1)...(906)
atgcgcaatcgtacattcgctgacctcgatcgggtggtagcgctcggcggcgggcatggtttgggccgggtgatgtcctccctctcctcgctcggttcacggctgaccggcattgtcaccaccaccgataacgggggttccaccgggcggatccgtcgttcggaaggtggcattgcctggggcgatatgcgcaattgcatcaatcagttaattgccgagccgagcgtagcatcggcaatgtttgagtatcgttttggcggtaacggcgagctttccgggcataacctcggaaatttgatgttaaaggcgctggatcacctgagcgtgcggccgttagaggcgatcaatttgatcagaaacctgctgaaagtggacgctttcctgatcccgatgtcagaacaaccggtggatttgatggcgctcgatcatgaaggccatgaagtttatggcgaagtgaatattgatcagcttgataatgtgccgcaggagctgatgctcaccccgccggtaccggccacccgcgaggcggtggaggctattgccgaagccgatttgatcctcattgggccgggcagtttttacaccagcctgctgccgatcctgttgctcgacgagatggcccaggcgttgcgccgcaccccggcgccgatggtttttatcgataacctcggcaaagagcatagcccggccgcgaggctgtcgctggcggagcgcatcgcgattatggagtgctatgtaggcaaacgggtggtggatgcggtgatcgccggtccaaaagccgatatcagcggcatcgacgaccggttggtgatccagacgccgctggaggccagcgacgttccctatcgtcatgaccgggcgctgctccgcggggcgctggagaaagcgatccagctgccgggctga

SEQ ID NO: 7591 - DNA, 315 bp, Klebsiella pneumoniae
  CDS (1)...(315)
atgcttaacgcccgggaactgaaggtcttttacggcgtgatccagggtctgaagggcgtcgatatcgatgtctatgaccgggaaatcgtcaccctgatcggcagcaatggcgccggtaaaacctccaccctgaacgggatcgtcaacctggtgcgctccagtgggcgcgtcagcttcctcaacgacgatatctcacgcagccagacccaccagatcgtgcgtcgcgggctggcgctggtgccggagggacggcgcgtctttaccaacctgaccatcgaagagaacctgcgcatgggcgcttacaataatctcgtt

SEQ ID NO: 7592 - DNA, 867 bp, Klebsiella pneumoniae
  CDS (1)...(867)
gtgggtgtcactaaagggctgtggacgcagttcggctccgatcgggtgatcgacacgcccattaccgagtcggccatcatcggtatggcggccggcgccgcagcgacgggtttgcggccggtcgcggaattgatgttcatggatttttttggcgtgagccacgatgcactgtacaaccaggcggctaagttccgctacatgtttggtggcaaagccagagctccgctggtaatgcgagggatgatcggcgcggggttttccgccgcagcccagcattcacagtcaccctataatatctttgccaccacgcctggactgaaggtggtggtgccctcgacgccttatgacgtcaagggtctattaatccagtccattcgcgacgacgacccggtggtattctgcgagcataaaatgctgtacgacctcaagggcgaggtaccggacgagagctataccatcccgctaggtgtagccaactatacccgcgaaggagaggacgtcaccatcattgcgctgtcggcaatggtgcataaagccaaccaggtggcggacaagctggccaaagaggggatctcggtcgaggtagtcgacccgcgaaccatttcgccgctggatgaggaagggattctggaatcggtggcgtccacggggcgggtcgtgattgtcgacgaatccgctgcacgcttcggttttgctcatgatgtcgcggcgctgattgcgtcccaggcattccatttcctcaaagcgcccgttctgctggtgacgccgccacacacgccggtcccgttctccccagctctcgaaaaactctggatccctggcgttgaacgtatcgaagccgccgtccgtcaagtgctggaggattaa

SEQ ID NO: 7593 - DNA, 897 bp, Klebsiella pneumoniae
  CDS (1)...(897)
gtgaaacaggatctggcactaatcgaacagtttctcgatgccctttggctggagcgcaacctggcggagaatacgctcagcgcctaccgtcgcgatttgacgatgttagttgagtggctgcaccatcgcggcctgtcgctggcaagcgttggcagcgacgatctgcaggcgctgctggctgagcggcagtccggcggctacaaagccaccagcaccgcgcgcctgctgagcgccgtgcgccgttttttccagcatctgtaccgggaaaaaattcgcccggacgatcccagcgcgctgctggcctcgccgaagctaccgcagcggctgccaaaagatctcagtgaggcgcaggttgagcgcctgctgcaggcgccgctggtggagcagccgctggaattgcgcgataaagcgatgctggaggtgctgtatgccaccggcctgcgcgtctcggagctggtggggctgacgatgagcgacatcagcctgcggcagggcgtgctgcgggtggtgggaaaaggcaacaaagagcggctggtgccgctgggggaagaggcggtactgtgggtggaaaattacctcgagtatggtcgcccctggctgctgaacggcgtggcgtcggatgtcttatttcccagccagcgcgcccagcagatgacgcgccagaccttctggcatcggattaaacactatgccgtactggcggggatcgacagcgaaaagctttccccgcacgtgttacgccatgcgttcgccacgcatttgctcaatcatggcgccgatctgcgcgtggtgcagatgctgttaggacacagcgatctctccaccacgcagatatacacccacgtggcgaccgagcgtctgcgacaacttcatcaacagcaccacccgcgggcgtga

SEQ ID NO: 7594 - DNA, 1083 bp, Klebsiella pneumoniae
  CDS (1)...(1083)
atgttagtatggctggccgaacacttggtcaaatattattccggctttaacgtcttttcatatctgacgtttcgcgccatcgtcagcctgctgaccgcgctgttcatctcgttgtggatgggcccgcgcatgatcgcccgtctgcaaaaactcgcctttggccaggtcgtacgtaacgacggcccggagtctcatttcagtaaacgcggtactccgaccatgggcgggatcatgatcctcaccgcgatcaccgtttccgttctgctgtgggcctatccatctaacccgtacgtctggtgcgtactgacggtattaatcggctacggcatcatcggtttcgttgatgattaccgtaaagtcgtgcgcaaagataccaaaggcctgatcgcccgctggaagtatttctggatgtcggtgatcgccctgggcgtggccttcgcgctgtatctggcggggaaagataccccggcaaccgagctggtggtgccgttctttaaagacgtaatgccgcagctggggctgttctatatcttgctggcctacttcgttatcgtcggtaccggcaacgccgtcaacctgaccgacggcctcgacggcctggcgattatgccgaccgttttcgtcgcggcaggctttgcgctggtggcatgggccaccggcaacatgaatttcgccaactacctgcatatcccgtatctgcgccacgctggcgagctggtgatcgtctgtacggcgattgtcggggcggggctgggcttcctgtggttcaacacctacccggcgcaagtctttatgggcgacgtcggttcactggcgctcggcggcgcgttgggcattatcgccgtgctgctgcgtcaggagttcctgctggtgatcatgggcggggttttcgtggtggaaacgctgtcggttattctgcaggtcggctcctttaagctgcgcggtcagcgcatcttccgcatggcgccgatccaccaccactatgaactgaaaggctggccggagccgcgcgttatcgtgcgcttctggattatttcgctgatgctggtgctgattggcctggcgacgctgaaggtacgttaa

SEQ ID NO: 7595 - DNA, 1155 bp, Klebsiella pneumoniae
  CDS (1)...(1155)
aagcatattttcgaaggtaactgggtatttctcgctcatgaaagtcaaattccccagccgggtgattattataccctgacgctgggacggcagccggttattattacccgcgataaaaagaatgagctgcacgcgctaattaacagctgcgcccaccgcggcgccatgttatgccgacgcaaaaccgggaataaaaattcgtttacctgtccgtttcacggctggaccttcagcaataacggcaaattattaaaagccaaagatgagagcaccggcgcctatcctgaaaccttcaaacatgaagggtctcacgatctgcaaaaattgccgcgttttcagtcttaccgcggtttcttattcggtagcctcaatgccgacgtgcagccgctggaggcctatctcggggaaacctgcaagattatcgacctgatcgtcgaccaggcgccggaggggctcgaggtacttaagggttcgtcgagctatgtatatgagggcaactggaaactgggcgcggaaaacggcgccgatggctatcacgtcagcgtggtccactggaactacgcctcaaccatgtcacgccgcaactatgaagcggaagggacgcacacggtggatgccaacggttggtcaaaaagcctcggcggcggttatggatttgataacggccatatgctgttgtggacccgggcgctcaacccggaagtgcgcccggtctatgcccaccgcgaacggctgcaggcggaatttggcgaacgccgtgccgaccagatggtcaacgaaacccgcaacctgtgcctgtaccccaatgtctacctgatggatcagttctcgacgcaaatccgcgtaatccgccccattgcggtggataaaaccgaagtcaccatctggtgctttgcgccgaaaggggaatccgaccaggccagagcgctgcgtatccgccagtacgaggatttctttaacgtcagtgggatggggacgccggacgacctcgaagagttcagcgcctgtcagcgcggctatctcggcgaaaatctgccatggagcgacctcagccgcggcgcgctgcgctgggtcgatggcgcggatgagcatgcgcaacatgccggcttttcgccgcggttaagcggggtcgaatcggcggacgaagcgctgtac

SEQ ID NO: 7596 - DNA, 543 bp, Klebsiella pneumoniae
  CDS (1)...(543)
atgagcgcattaactcttttttccgtgaccgatccgcaaacgccggtctggcacagcaccgacgccaaagcgattcaggatcaacttaacgccaaaggcgtccgcttcgagcgctggcaggccgaccgcgacctcggggcaaaccccagcccagaaacggtgattgccgcctatcagcatgcgattgataaactggtcgccgaaaagggctaccagagctgggacgtcatcagcctgcgcgccgataacccgcaaaaagaggcgctgcgggaaaagttcctgaacgagcacacccatggcgaagacgaggtccggttttttgtcgagggcgctggcctgttttgcctgcacattggcgacgaggtgttccaggtgctgtgcgaaaagaacgatctgatttcggttcccgcccacactccgcactggtttgatatgggatcagaaccgaacttcaccgccattcgcatttttgataacccggaaggctggatcgctcagtttaccggtgacgatatcgccagcgcctacccgcggctggcgtaa

SEQ ID NO: 7597 - DNA, 729 bp, Klebsiella pneumoniae
  CDS (1)...(729)
gtgaaaacttttgcggcggaaaacctgctcaatcagattaaagagcgcggcactctacgcgtgggcctcgaaggcacctaccctccctttagtttccagggggatgacggcaagctgaccgggtttgaagtggaattcgctaacgaactggcgaaacatcttggcgtgaaggccgatctcaaaccgaccaagtgggacggtatgctggcctcgctggactccaagcgtatcgacgtggtgattaaccaggtcactatctctgacgaacgtaagaagaaatacgatttctccaccccatataccgtctccggcgtgcaggcgctggtgaagaagggtaacgaaggcgtgattaaaaccgcggcggatctgaaaggcaagaaagtgggcgtcggactgggcactaactatgaagagtggctgcgtcagaatgtccagggcgtggacgtccgtacctatgatgacgatcccaccaaataccaggatctgcgtgtaggccgtattgacgccattctggtagaccgtctggcggcgttggatctggtgaagaaaaccaacaatacgctggcggtaaccggcgaagccatctctcgtcaggaagctggcgttgcgctgcgtaaaggcaacgacgacctgctgaaagcggtagatggcgcgattgcagacatgcagaaagatggcagcctgaaggcgctgtccgagaaatggtttggcgctgacgtgacgaaataa

SEQ ID NO: 7598 - DNA, 1047 bp, Klebsiella pneumoniae
  CDS (1)...(1047)
tgaaaatcatgcgctctggctggtaggccagggcggaacactcatctaacggagccgtttatgaactatacgcatcttggccgcaccggcctgaaagtcagccgcctttgtctcggaaccatgaattttggtgacgtcaccgacgagaagaccagcgcccgcattctggatgaggcgcttgaggcgggtatcaatttcattgatacagcagacgtgtatggcactgaacaatctcccgatatccagcaaggctcggggctgtccgaggaaattattggtcgctggcttcagcagggtggccgccgtgaacgcatcgttctggcgacaaaagtctatcagcctatgggaccgggcccgaacgatcgccggctttctgcgtatcatattcgcaaggcctgcgaggacagtttgcgacggcttaataccgaccatattgacgtctatcagatgcatcacatcgatcgccatacgccgtgggaagagatctggcaggccatggaactgcttgttcagcagggaaaggttctttatatcggtagcagcaatttcgcgggctgggacattgcgactgcgcagtcagtcgccacggcccgtcatttcctgggcctggtcgccgagcaaagtctttataatctgacagcccgcaccattgagctggaggtcattcccgcatgccgccattttggcctggggttgatcccctggagcccgcttgccggagggctgcttggcggcgtactgaaaaagatggcaagcgggcgccgtgccaggcccgcgtttgcccgtctaatcgaacagtatcgtccgcagctggaagcctacgagggattatgtgaggacctcggcgaaaccccctccgatgtggccctggcgtggctcctgcagaatcctgtcgttaccgctccactgattgggcctcgtacggtcgaacaactccagcaggcgcttcacgcaacgacagtcacgctatcagacgacaccatgagctgtctcgacgaaatctggcccggccccgggggagaagcgccccaggcttatgcctggtaa

SEQ ID NO: 7599 - DNA, 1269 bp, Klebsiella pneumoniae
  CDS (1)...(1269)
atgaataatgttgtcacaaaagaagagggtggctacatggataaattgcttgagcgttttttgcagtacgtttctttggacacgcagtcaaagcctggcgttcgtcaggtccccagcacggaagggcagtggaagctgttacgcctgttgcaggcgcagctggaagaaatgggactggtcaaggtaacgctgagtgaaaaagggacggtaatgggaactttgcccgctaacgttgagggcgatatcccggccatcggttttatctcccacgtcgacacctccccggatttcagtggtaaaaacgttaatccgcagattgttgaaaactatcgcggcggcgatatcgcgctgggtatcggcgatgaggtgctctccccggtgatgttcccggttctgcatcagcttttgggacagacgctgatcaccaccgacgggaaaacgctgctcggggcggacgacaaagccggcattgccgaaattatgaccgcgctggcgaccctgcaggcgaaaaatattcctcatggcgatatccgcgtggccttcacccctgatgaagaggtgggtaaaggggcgaagcatttcgacgtcgaggcctttgacgcccgctgggcctataccgtcgacggcggcggggtcggcgaactggagtttgaaaacttcaacgccgcctcggtgacgattaaaattgtcggtaataacgtgcaccccggcaccgcgaaaggggtgatggtcaacgcgctgtcgctggccgcgcgcattcatgccgaagtaccggccgatgaagcgccggagaccactgaaggctatgaaggtttttatcacctcaccagcatgaaaggcagcgtcgatcgggccgagatgcattacatcatccgcgattttgaccgtaagcacttcgaggcgcgcaagcgcaagatgatggagatcgccaaaaaggtcggcaagggactgcacccggactgttatattgagctggtgatcgaggacagttattacaacatgcatgagcaggtgatcgcccatccgcacgtggtcgatattgcccgccaggcgatggtggactgcgatattgaaccgcagatgaagccgatccgcggcggcaccgacggcgcgcagctgtcatttatgggactgccgtgcccaaacctgtttaccggtggctacaactatcacggcaaacatgagtttgtcaccctggaaggaatggagaaagcggtgcaggtgatcgtgcgtatcgccgagctgacggcggcacgcaaagggcattaa

SEQ ID NO: 7600 - DNA, 369 bp, Klebsiella pneumoniae
  CDS (1)...(369)
gtggtatgcccgggcgctggacgcgttcaccttcggcgacgatgccgccgcctcgctggggattgctgtgccgcgcgtggcctgatcctcttcaccactgcggcgctgatcaccgccaccatcgtcagcatggccggctcaatcggctttgttggcctggtggtgccgcacgtgatgcgtttcttctttggcccgctgcaccgaacgttgctgatcgccagcgcgctggcaggggcgatattgatggtactggcggacattgcgtcgcgcctgctgattgccccgcaaagtctgcccgttggggtagtaaccgccctggttggggtgcctttctttgccgtgattatctaccgctcaaggaataagtga

SEQ ID NO: 7601 - DNA, 1416 bp, Klebsiella pneumoniae
  CDS (1)...(1416)
accggcgcccccattcccgaaggcttgctgcatgaaggcattttccgtatcgctctgcaacagccgcaggcgctggcggtaacggacatgcgttatcagtggaattatcatgagctgacagactatgcccgccgttgcgcgggcaggttaatcgagtgcggggttcagcccggcgataatgtggctatcacgatgtcgaaaggcgcaggacaacttgttgcggttctggccgtcctgctggccggggcggtttacgttccggtttcgctggatcagcctgccgcacggcgcgagaaaatctacgctgacgccagcgtccggctggtgctcatttgtcagcacgacgccagcgccgggtcagacgatattcccgtccttgcctggcagcaggccattgaggcggagccgatcgccaacccggtagtacgcgcccccacgcaaccggcctacattatctacacctccggctctaccggtacgccgaaaggggtagtcatttctcaccggggagcgcttaacacctgttgcgatatcaatacccgctatcaggttggcccgcatgacagggtgctggccctctccgccctacattttgatttatcggtttacgacatttttggcgtactgcgcgcgggcggcacgctggtgatggtgatggaaaatcaacggcgcgatcctcacgcatggtgtgagctgatccagcgccatcaggtcacgctctggaacagcgtcccggcgctgttcgatatgctgctgacctggtgtgaaggtttcgccgacgccacgccggaaaacctgcgcgcagtgatgctttccggcgactggatcgggcttgacctccccgcccgttatcgggccttccggccacaaggacaatttatcgcgatgggcggcgccaccgaggcgtctatctggtctaacgcctgcgaaattcacgacgtccccgcccactggcgctccatcccttacggttttccgctaaccaaccaacgctaccgggtggtggatgaacagggccgggactgccctgactgggtgccgggtgaattatggattggcggcattggggtcgcggaaggctatttcaacgatcccctgcgtagcgagcagcaatttttgacgctcccggacgagcgctggtatcgcaccggcgatctcggctgctactggccagatggcacaatcgagttcctcggtcgtcgcgacaagcaggtcaaagtcggaggatatcgcatcgagctgggcgaaatcgaaagcgcgctcagccagctggcgggggtgaaacaagcaaccgttctggcgatcggcgaaaaagaaaaaacgctggcggcatacgttgttcctcaaggcgaggctttttgcattaccgatcatcggaacccggcactgccgcaggcgtggcacacgcttgcctga

SEQ ID NO: 7602 - DNA, 1230 bp, Klebsiella pneumoniae
  CDS (1)...(1230)
atggcgcaacactgcggcagcctgacgctggatgtctgcccaacgccttacgatcaaacgctacccgcggccaaagacatgctcagctgggatcagacttcacgcgtgattggctttcgcaatgactatcgcaactatatcggcgatgtcttccgccacggcgcctcgacgccgctggagcgcgctgaaaaacaactgaccgatgcccgctatacgctcaacggccacacctggaatttgcaggattacctgaagcgcgagaacgtcagcggtatgctggtgctgaaagatggtaaagtcgcctggaaatatctcgccgaaggtaataccgacaccaccctgtggacctcgcgctcggtaggcaaatcggtggtctcgacgctggtcggtatcgccattcaacagggtaaaatccactcccttgatgacctgattaccgtttatgaacccgaactgaaaggcaccgcctgggacggcgtaacgctgaagcagttgattcaacacaccagcggggtggaatggaatgaagactacaccgacccgcagtcgcatttcgcccgcctgacccagtgtgaagcgcaccccggcgcctatgcctgcgtgcgtaagatcgtcaccggcctggcgcgtcaacacccggcgggcgagcagtggtcctactcttccggcggcgcctggctgcttggggatatcctggagcgctccaccggcatgtcgctggccgcctggcttgaacaggctctatggcagccggccgggatggcccacgacggcgtgtggcatgcttatcagcaagggaagcacgacgtcggcgcccacggctttaacgccacccttgaagactggggccgctttggtgaattcgtcgcccgtgacggtcggttaagcaatggcaaacagctggtgccggctggctggttcgatcaagccgccagctggaccaaggcgctaaactcggtctcggcagcgcatccggagggtatttacggctatcagtggtggaataacgcaattccggcgaatgcgcaaaacgtccagccgacgccgcaggaagggcttaaagggtcgctgtgggcgctggggatctacggccaggtgatcatggtgaaccgcgcggaacacctggtgatcgtccagtggtcgacctggccgcaggcggaaccttccttcaacgctcagccgttggaagcggcgctgatgtacagcgccattgcccgcgagctgcgttaa

SEQ ID NO: 7603 - DNA, 1299 bp, Klebsiella pneumoniae
  CDS (1)...(1299)
gaaaaacaacatctgggcggcatctgcctgaactggggatgcattccaaccaaggcgctgctgcatggcgctgaggttgcgcacactatcacccatgccagtcagctgggcatcagcgtgggtgaggtgaacgtcgatctgcagaaactggtgcagtttagccgtaccgtatcgcaacagctcaccgctggggttgcgtacctgttgaagaaaaatggcgtgcaggtcattgatggcaccgcgcggctgcgtggcaaggggcaaatcacggtcgaggatgcccaaggggaggcgcgcgattaccgggccgatcatgtgatcctggcaaccggcgcccgaccacgcgcattgccaggcatagcgccagatggcgaacatatctggacctatttcgaggcgctgcggcctaagctattgcccaagtcgctcttaatcatcggttcaggggcgattggcgtcgagttcgccagcctttataacgatctgggctgtaaagtgacgctggtcgagctagcgtcgcagattttgccagtggaagatgccgaggtgtctgcagcagtgcgtaagtcattcgaaaaacgcggtattcagatccatacccaaaccctggtgacgcaagtacagctcaccgataccggggtgcgctgcacactaaacaacaccggcggcgaatattctcaggatgtcgaacgtgtgctgctggcggttggcgtacagccgaatattgaagatctggggctggaagcactgggcgtcgagttagaccgcggttttatcaagacggacgcggcttgtcgcactaacgtattcgggctttatgccatcggcgatgtagccggcccgccgtgcctggcgcacaaggccagccacgaaggcgtgatctgcgttgagacactggccggtgtcgaaggcgcccaccctctcgatcgcgactatgtgcctggttgcacttatgcccggccccaggttgccagtctgggcctgacggaatcgacggccctggccaggggacggcccgtcaggatcggtaagttctcttatcagagcaatggtaaggcgctggccagcggcgagacagagggttttgtgaagacgattttcgatgctgaaaccggcgagttgctgggcgcgcatatggttggcgcactggtcacggaacagatccagggctttggcatcgcccgtcacctggaggccacagacgaaagtctcctgtcgatgatctttgcgcatccgacactttccgaagcgatgcatgaatccatactcgcggcctgcgatcaaccgttgcatcaataa

SEQ ID NO: 7604 - DNA, 1338 bp, Klebsiella pneumoniae
  CDS (1)...(1338)
atgaagctggcaattcacaacgaggtcgcggtaagcaatgacgaagttcggcaattggatcgcgcctatgtgtttcattcatggtcgatgcagggcaatctcaacccgctggtcatcgccggggcgcaaggctgcgagctatgggattatgaggggaacacctggctcgatttcagcagccagctggtgaacgtcaacattggctatcagcacccccgggtactggcggccatgaaggcgcactggagaccctggtcaccatcgcgcccgccaccgccaaccttgcccgcggcgtacgggcgtagtgcatcgtcgacctggcgccggcgggcttcagtaaggtgttcttcactaacgccggggcggatgccaatgagaacgcgattcgcatggcgcggctctataccgggcgcgacaaggtgctgtcggcctatcgttcctatcatggcaacaccggcagcgcgatcgccgctaccggcgacatggcgccgggtgccgaatgagttctcccgcggccacgttcacttcttcaacccctacctttaccgcagcgagttcaacgccgcgactgaggaagaggagtgccagcgcgcgctggcgcatctgcggcggatcattgaatgcgaggggccgacggccatcgcggcgatcctgctggagtccatccccggcaccgccgggatcctcgtgccgccggcaggctatatgcagggcgtgcgcgccctggccgacgagtttggcatcgtgctgatcctcgatgaggtgatggccggctttggccgcaccggcagctggttcgccttcgagcaggatggcgtggtgccggatctggtgacctttgccaagggagttaacgccggctacgtgccggcgggcggggtgctgattagcgagccgattgcccgctattttgacgaccacttctttgccggggggctgacctactccggccatccgctggcgatggcggcgattgtcgccaccatcgacgcgatgaaagaggagaaggtggttgagaacgcggcctctatcggcaacgaggtgctgcgccccggtctcgaggcgctggcggagaagcacgccattatcggcgaggtgcgcggtcgcggcctgttccaggcgctggagctggtgagcagccgtgaacaaaaaacgccgctgaccgccgccgacatggctgcgatcaaaggggccctgaccgaagctgggctgctggcctttgtggtggagaaccgcattcacgtggtgccgccgtgcaccattactgctgagcaggtggcgcaggggctggcgatttttgatgcggtctttgctcgctttgccagcctggcgaagtag

SEQ ID NO: 7605 - DNA, 765 bp, Klebsiella pneumoniae
  CDS (1)...(765)
gccgggatccgctcggtgatgacctttggtatttctcatcacaccgatgccaccggcagcgatacctggaatgaaaatggtctggtggcgcgtatgtcgcggatttgtaagtccacggtgccggagatgatcgtcatgtccgatacctgcttctgcgaatatacctcccacggccactgcggcgtgctgtgcgaccacggggtggataacgacgcgaccctggaaaacctcggcaaacaggccgttgtcgccgccgccgcgggggcggatttcatcgctccttccgccgcgatggacggtcaggtgcaggcgattcgccgctcgctggacgccgccggcttcaccaatacggcgatcatgtcctactcgaccaagttcgcttcttccttctacggtccgttccgcgaagcggccggtaccgcgctgaagggcgatcggaaaacctatcagatgagcccgatgaatcgccgggaggccattcgcgagtcgctgctcgatgaagcccagggcgccgactgcctgatggtgaaaccggctggcgcctacctggatattctgcgcgatatccgcgaacgcagcgatctgccgctcggcgcctatcaggtcagcggtgagtacgcgatgatcaaatttgctgcccaggcgggcgctatcgatgaagagaaagtggttctggaaagcctcggcgctatcaaacgcgcaggcgccgacctgatcttcagctatttcgccctcgatctggccgagaaaaagatcctccgttaa

SEQ ID NO: 7606 - DNA, 1266 bp, Klebsiella pneumoniae
  CDS (1)...(1266)
atgagcaaaacacatttaacagaacagaagttttccgacttcgccctgcacccggcagtcattgaagcccttgaaaagaaagggtttcataattgcacacccattcaggccctcgcccttccgctgacgctggaaggccgcgatgtcgccgggcaggcgcaaaccggtaccggtaaaacgatggcgttcctgacgtcaacgtttcattatcttctctctcacccggctatcgccgatcgccaggttaaccaaccgcgcgcgctgattatggcgccgacgcgtgaactggcggtacagatccacgccgacgctgagccactggcgcaggccaccggtctgaagctgggtctggcttacggcggcgacggctacgataagcagttgaaagtgctggaaaacggcgtcgatattctgatcggtaccactggtcgtctgatcgattacgcgaagcagaaccacattaacctcggcgccattcaggttgtcgtgctggacgaagccgatcgcatgtacgatctcggctttattaaagatatccgctggctgttccgccgcatgccgccggccactcagcgcctgaacatgctgttctccgcgaccctttcttatcgcgtccgcgaactggcgttcgaacaaatgaataacgccgagtacgttgaagtcgagccggaacagaaaacgggccaccgtattaaagaagagctcttctacccgtccaacgaagaaaaaatgcgcctgctgcagacgctgctggaagaagagtggcccgatcgcgccatcgttttcgccaataccaagcaccgttgcgaagatatctggggccatctcgccgccgacggccatcgcgtaggtctgctgaccggcgacgtggcgcagaaaaaacgtctgcgcattctcgaagaatttacccgtggcgacctcgatattctggtcgcgaccgatgttgccgctcgtggtttgcacattccggccgtgacccacgtctttaactacgatctgccggacgactgcgaagattacgttcaccgcatcggccgtaccggtcgcgctggcgccagcggtcactccattagcctcgcctgcgaagagtatgcgctgaatctgccggcgatcgaaacctatattggtcactcaattccggtcagtaagtacaacccggacgcgctgatgaccgacctgcctaagccgctgcgtctgacccgtgcgcgcccaggcaacggcccgcgccgtaacggtccaccgcgcaatcgtcgtcgttcaggttaa

SEQ ID NO: 7607 - DNA, 2436 bp, Klebsiella pneumoniae
  CDS (1)...(2436)
tgtgaagaaccgcgtatcgcctacgaccgcgtccacctgtcgtcttatttctcccatcacactgcggaagaactgtcgctggtacgcgaaggtttctatgagaaacacggcgtcaaggtgctggtcggcgaacgggcgatcaccatcaaccgccaggagaaagtgatccactccagcgccgggcgtaccgtgttctacgacaagctgattatggcgaccggctcatacccgtggatcccgccgattaaaggcgcggaaacccaggattgcttcgtctatcgcactattgaagatcttaacgccatcgaatcctgcgcccgccgcagcaaacgcggcgcggtagtcggcggcggcctgctcggcctggaagcggccggcgcgttgaaaaacctcggcgtggaaacccatgttatcgaattcgcgccgatgctgatggccgaacagctcgaccagatgggcggcgagcagttgcggcgcaaaatcgaaagcatgggcgtgaaagttcacaccagcaaaaacaccaaagagattgttcagcagggcaccgaggcgcgcaaaaccatgcacttcgccgacggtagcgagctgcaggtcgatttcatcgtcttctcaaccgggatccgcccgcgcgataagctggccacccagtgcgggctggcggtcgcccagcgcggcggcatcatggtcaacgatagctgccagacctccgatccggatatctatgccatcggggaatgcgccagctggaacaaccgcgtctacggtctggtcgcccccggctataaaatggcccaggtggccgtcgaccatctcctcggcagtgaaaatagcttcaccggcgccgacctcagcgccaagctgaagctgttgggtgtggacgtgggcgggatcggcgatgcccacggccgcacgccgggcgcccgtagctacgtctatctcgacgaaagcaaagaagtttataagcgcctgatcgtcagcgccgacaacaaaacgctgctcggcgcggtgctggtcggcgataccagcgactacggcaatctgctgcagctggtgctcaacgccatcgagctgccggaaaacccggattcgctgatcctcccggcccacgccggcagcggcaagccgtccatcggcgtggataaactgccggacagcgcgcagatctgttcctgcttcgacgtcagcaaaggcgacctgatcgccgctatcaataaaggctgccacaccgtggcggcgctgaaagcggaaaccaaagccgggaccggctgcgggggctgtattccgctggtcactcaggtgctcaacgccgagctggcgaaacagggcatcgaggtcaacaacaatctgtgcgaacacttcgcctactctcgccaggaactgttccacctgatccgcgtggaaggcatcaaaaccttcgacgagctgctggaaaaacacggtcagggctacggctgtgaagtctgtaagccgaccgtcggttccctgctggcctcctgctggaatgagtacatcctcaagccgcagcacacgccgctgcaggacagcaacgacaacttcctcgccaacattcagaaagatggtacctattcggtgatcccgcgctcagctggcggcgaaatcacgccggaagggctggtcgccgtgggccgcatcgcgcgtgaattcaatctgtacaccaaaatcaccggctctcagcgcatcggcctgtttggcgcgcagaaagacgacctgccggagatctggcggcagctaattgaagcgggattcgaaaccggccacgcctacgccaaagcgttgcgaatggcgaaaacctgcgtcggcagcacctggtgccgctacggcgttggcgacagcgtcggcttcggcgtggaactggaaaaccgctacaaaggcatccgcaccccgcacaaaatgaagttcggcgtctccggctgcacccgcgaatgtgccgaggctcagggcaaagacgtcgggatcatcgccaccgagaaaggctggaacctgtacgtgtgcggtaacggcgggatgaaaccacgccacgccgatctactggccgcggacctcgatcgcgatacgctgatcaaatatctcgaccgctttatgatgttctacatccgcaccgccgataagctgacccgcactgccccgtggctggacaatatggaaggcggtatcgactatctgcgcagcgtcatcatcgatgacaagctcggtctgaacgaccatctggaagaagaactggctcgcctgcgcgccgccttcgcctgcgagtggaccgagaccgtcaacaacccggcggcgcagacccgcttcaaacactttatcaacagcgaccagcgcgacccgaacgttcaggtggtgccggaacgtgaccagcaccgcccggccacgccgtatgagcgtatcccggttactctggtggaggaaaaagcatga

SEQ ID NO: 7608 - DNA, 513 bp, Klebsiella pneumoniae
  CDS (1)...(513)
atgagccaggctagcgctgagtttattccgacccgtattgctattcttaccgtttccagccgtcgcggcgaagaggacgacacttccggtcactggctgcgcgaggcggcgcaggaggcggggcaccaagtcgtcgagaaggcgatcgtcaaagagaatcgctacgccatccgcgctcaggtatcggcgtggatagccagcgataacgtgcaggtggtgctgatcaccggcggcaccggttttaccgacggcgatcaggcgccggaagcgctgctgccgctgtttgatcgtgaggtcgaaggctttggcgaagtgttccgcatgctgtcgttcgaagagatcggcacctcgacgttgcagtcccgggccgtggccggcgtcgccaatcgcacgctgattttcgccatgccgggctcaaccaaagcctgccgtacggcgtgggacaacatcatcgccccgcagcttgatgcccgcacccgtccctgtaacttcattccacacctgaagaaataa

SEQ ID NO: 7609 - DNA, 774 bp, Klebsiella pneumoniae
  CDS (1)...(774)
atgcgttttaccgataaagtcgtcgtcatcaccggcgcggcgcagggcattggccgccagacggcggagcaggcggctgcagaaggcgcggctctgctgctcatcgatcgctcgtcatacgtccatgagctggcggcgacgctggcgcaatccggctgtctggtgctggcgctggaggcggatctggaagcgtgggaaagtaccgagcaggcgtttgccgccggggtcgctcattttggccgtatcgacgtgctgatcaacaacgttgggggcaccatctgggcgcgcccctttgccgaataccagccggatcagattgagaaagagatccgccgctcgctgttccccacgctgtggggctgccgcgcggcgctgccatggatgctgaagcagggcaaaggcagcatcgtcaacatttcgtcggtggcgacggcgggagtgaatcgggtgccgtactcggcggcgaaaggcggcgttaacgcgctgacccggtcgattgccatggagtacagcggcagcggtattcggattaacgccgtggccccgggcgggaccgaggcgccgccgcgcctgacgccgcgtaacgaagagcagccgagcgagcaggaaaaggcgtggtatcagcaggtcgtcgatcagacggtggcgagcagtctgctgcaccggtacggcacgctggcggaacaggcgaatgcgatcctgtttctcgccagcgatgaggccagctatatcaccggcgtgacgctgccggtagccggaggcgatctcggctaa

SEQ ID NO: 7610 - DNA, 792 bp, Klebsiella pneumoniae
  CDS (1)...(792)
atgaaaccgaccaccattgccctgctgcagaaatgcaaacaggaaaagaagcgctttgccaccattaccgcctacgatcacagcttcgcgaagctgttcgccgatgaaggcataaatgtgctgctggtaggcgactcgctgggaatgacggtgcagggtcacgactccaccctgccggttaccgtggaagatatcgcctatcacacccgcgccgtccgccgcggcgcgccaaacagcctgctgcttgccgacctgccgttcatggcctatgccacccccgagcagacctttgcaaatgccgccatcgtgatgcgcgctggcgccaatatggtcaaactcgagggcggcgcctggctggccgacaccgtgaggatgctggcggagcgcgcggtgccggtttgcggccatcttggcctgacgccgcagtcggtgaacgtattcggtgggtataaagtgcagggtcgcggcgatgcggcgcagaccctgtttgaagacgcgttagcgctggaggcggcgggtgcgcagctgttggtcctggagtgcgtgccggttgaactggcgaagcgcatcaccgacgctctgaccattccagtgatcggcatcggcgcgggcaatgtcaccgacgggcaaatcctcgtgatgcatgacgctttcggcattaccggcggccacattcctaaatttgccaagaatttccttgccgaagcgggcgacatccgcgccgcggtgcggcagtatattgccgaagtcgaatccggagtctatccgggcgaagaacacagtttccattaa

SEQ ID NO: 7611 - DNA, 1086 bp, Klebsiella pneumoniae
  CDS (1)...(1086)
atggcaggaaatacaattggacaactctttcgcgtcactaccttcggcgaatcgcacggtctggcgctgggctgcatcgttgacggcgtgccgccgggcatcccgctgaccgaagccgacctgcagcacgacctcgatcgtcgtcgcccgggtacctcgcgttacaccacgcagcgtcgcgagccggatcaggtcaaaatcctctccggcgtcttcgaaggcgttactaccgggaccagtatcggtctgctgattgagaacaccgatcagcgttcgcaggattacggcgcgatcaaagatctgttccgtccgggccacgccgattacacctacgagcaaaagtatggtctgcgcgactatcgcggcggcggtcgttcttctgcgcgcgaaaccgcgatgcgcgtagcggccggggcgattgccaaaaaataccttgccgtgaagttcggcatcgtcattcgcggctgcctgacgcagatgggcgatattccgctggccatcaaagactgggatcaggttgagcagaaccccttcttctgcccggacccggataaaatcgacgccctggatgaactgatgcgcggcctgaaaaaagagggcgactccattggcgcgaaagtgacggtagtggctgacggcgtaccgccaggcctcggcgagccggtcttcgaccgcctggatgccgatatcgcccacgcgctgatgagcatcaacgccgtgaaaggggtggaaattggcgacggcttcgaggtggtgaagctgcgcggcagcgaaaaccgcgatgaaatcaccaaagccgggttccagagcaaccacgccggcggcattcttggcggcatcagcagcggccagcagatcgttgccaacatcgcgctgaagcctacctccagtattaccgttcccggtcatacgattaaccgctttggcgaagaagtggagatgatcaccaaagggcgtcacgatccgtgcgtcggcatccgcgccgtaccgatcgctgaggcgatgctggcgatcgttctgatggatcactttatgcgtcagcgcgcgcagaatggcgacgtgacgacgacaattccacgctggtaa

SEQ ID NO: 7612 - DNA, 678 bp, Klebsiella pneumoniae
  CDS (1)...(678)
atgattatgactcaacacgatcaattacatcgttatctgtttgaaaactatgccgtgcgcggcgagctggtgacggtgtcggaaaccctggaacagattctggcgaatcacacctatccccaaccggtcaaaacggtgctggcggagctgttggtcgccaccagtctgctgaccgcgacgctgaagtttgccggcgacattaccgtacagctgcagggggatggccctttacagctggcggtgatcaacggcaataaccagcagcagctgcgcggcgtcgcgcgcgtgcagggcgagattgcggacgatgcggatctgaaaacgatggtcggcaacggctacctggtcattaccatctctccggaagaaggtgagcgctatcagggcgtggtcggtctggaaggcgatacgctggccgcctgcctggaagattatttccagcgttcagagcagctgccgacgcgccttatcatccgcaccggcgatcatgaaggccagccgatggcgggcgggatgctgctgcaggtgatgccggcgcaggatgcccagactgccgacttcgagcacctggcgacgcttaccgagaccattaaggcggaagagctgttcaccctgccggcaaatgatgtgctgtggcgcctgtatcatgaagaagaagtcaccgtctacgacccgctt

SEQ ID NO: 7613 - DNA, 795 bp, Klebsiella pneumoniae
  CDS (1)...(795)
atgaaggcagctgttgttacccacgaccatcaggttaacgtcacggaaaaaacgctgcgcccgctggaatacggcgaagcgctgttgaaaatggaatgctgcggcgtgtgtcatactgacctgcacgtgaaaaacggcgattttggcgataaaaccggcgtcattctcggccatgaagggatcggggtggtacaaaaagtcggcccgggcgtcacctccctgaagccgggcgaccgcgccagcgtggcgtggttcttcgaaggctgcggccactgcgattactgtaacagcggcaacgagacgctctgccgctcggtgaaaaacgccggctataccgtcgatggcggcatggcggaagagtgcatcgtcaccgccaactacgcggtaaaagttccggacggcctcgactccgccgccgccagcagcatcacctgcgcgggcgtcaccacctacaaagcggtcaaggtctcccacatcaaaccgggccagtggatcgccatctacggcctcggcgggctgggtaacctcgcgctgcagtatgcgaagaatgtgtttaacgccaaagtgatcgctatcgacgtcaacgacggacagctggagctggcggcctcgatgggcgccgacctgaccatcaactcccgcaatgaagatgcggcgaaagtgattcaggaaaaaaccggcggcgcccacgctgcagtagtaaccgcggtggctaaagcggcctttaactcggcggtggatgccgttcgcgccggtggccgcgtggtcgcggtgggcctgccccggaggcgatga

SEQ ID NO: 7614 - DNA, 1344 bp, Klebsiella pneumoniae
  CDS (1)...(1344)
gtgctacggcatgaaacgcgtgcgcttttcgccgcgcagtcctttgctcgcacactgctcctgatcgtcaccttgctgttcgtcagcctggtgacgacctatctggtggtactgaatttcgcgatcctgccgagtctccagcagtttaataaagtgttagcctacgaagtgcgtatgctgatgaccgacaaactgcagctggaggatggcacccagctggtggtgcccccggcgtttcgtcgtgaaatttatcgcgagctggggatttcgctctattccaatgaagcggcggaagacgcaggcctgcgctgggcgcagcattatgaattcttaagtcagcagatggcccatcagcttggtggccccacagaggtgcgggtagaggtcaataaaagctcccctgtggtgtggctgaagacctggctgtcgcccaatatctgggtgcgggtgccgctgaccgagatccatcagggcgacttctcgccgctgttccgctataccctggcgatcatgctgctggcgataggcggcgcctggctgtttattcgtattcagaaccgcccgttggtggatctggagcacgcggcgctgcaggtcgggcgcggcattattccgccgccgctgcgcgagtatggcgcctccgaagtgcgttcggtgacgcgcgcctttaaccatatggcggcgggcgtgaagcagctggctgatgaccgtacgctgctgatggccggggtcagtcatgatttacgaaccccgctgacccgcattcgtctggccaccgagatgatgggcgagcaggacggctatctcgcggagtcgatcaacaaagatatcgaagagtgcaacgccatcatcgagcagtttatcgactatctgcgcaccgggcaggagatgccgatggagctggcggatctgaatgcggtgctgggggaagtgatcgctgcggagagcggctatgagcgggaaatcgccaccgccctgcaggccggcgaaattccggtacgtatgcacccgctgtctatcaagcgcgcgctggcgaatatggtggtcaacgcggcccgctatggcaatggctggatcaaggtcagcagcggcagcgaagcgagccgggcctggttccaggtagaagatgacggaccggggattaaacctgagcagcgggagcacctgtttcagccgtttgtacgcggcgacagcgcccgcagcaccagcggcaccgggctggggttggcgattgttcagcgtattatcgacaatcacaacggccggctggagattggctccagcgaacgcggcgggttactgatccgcgcctggctgccggtgcaccggatctggcgccgatga

SEQ ID NO: 7615 - DNA, 1320 bp, Klebsiella pneumoniae
  CDS (1)...(1320)
ctcagctgcgcgggatcctggggctggactaagtcgatggcacagcagaaaccccacgacgtgaacgagccgtcacgtcgtcgcttactgaaagggatcggcgcgcttggcggcgcgctggccatcaccggtggctgcccggtagcgcatgcggcaaaagcggaaagttccccggggacgctcacacccgacgcgcgccaggaaaagcagccattctatggccggcatcaggcgggcattctgacgccgcagcaggcttcgatgatgctggtggccttcgatgtgctggcggctgataaagccgacctcgagcggctgtttcgactgctgacccagcgtatcgcctttttaacccagggcggcccggcgccggacacgccgaatccgcggctgccgccgatggattccggcatcctggggccgtggattgcgccagataacctgaccatcaccgtctcggtcggccattcgctatttgatgagcgttttggcctggcggataaagcaccgaaaaagctgcagccgatgacccgcttccccaacgattcgctggatgccgcgctgtgccatggcgacctgctgctgcagatctgcgccaatactcaggatacggtgatccacgccctgcgtgatgtcatcaaacatacgccggatctgctcagcgtgcgctggaagcgggaagggtttatctccgacagcgcggcgcgcagcaaaggcaaagagacccctatcaacctgttggggtttaaggacggcaccgctaacccggcgagccacgacagcgcgttgatggataaggtagtgtgggtgacagccgatcaggacgagccgacctggaccgtgggcggcagctatcaggcggcgcgaattatccagtttcacgtcgagttctgggatcggacgccgctcaaggagcagcagacgatctttggtcgcgacaagcacaccggtgcgccgctggggatgaaaaacgaacacgataccccggattacagtaaagatcctaacggcgaagtcattgcgctggatagccatattcgtctggccaatccccgcacgccggaaacccagtccagcctgatgatgcgccgcggctacagctattcgctgggggttactaacgccggacaactggatatggggctgttattcgtttgctatcagcacgatctggaaaagggttttctgacggtgcagaaacggcttaacggcgaggcgctggaggagtatgtcaaaccgatcggcgggggctacttctttgttttacccggcgtagtggatgaaaaacactatctgggagagtcgctgctgcaggcctga

SEQ ID NO: 7616 - DNA, 618 bp, Klebsiella pneumoniae
  CDS (1)...(618)
atgagtgcaatcgcgcctggactggtactcctcgcctacctctgcggctccatttccagcgccattctggtatgtcgccttgctggcctgcccgacccacgcgacagcggctcaggcaaccccggggccactaacgtactacgaattggcggaaaaggggcggccgtagcggtacttatttttgatgtgctgaagggcatgctcccggtgtggggcgcctgggcgctgggccttacgccgttctggctggggttagtggcgattgccgcctgcgtgggccatatctggccagtcttctttcatttccgcggcggtaaaggcgtcgccacggccttcggcgctatcgcccccatcgggctcgatctgaccggggtgatggccgggacctggctgctgaccatcctgctcagcggttactcttccctgggcgctatcgtcagcgcgctgatcgccccgttctacgtctggtggttcaaaccgcagtacacctttccggtgtcgatgctctcctgcctgatcctcctgcgccatcacgacaacattcagcgtctgtggcgccgccaggagagcaaaatctggacccgcgtgaagaagaaaaaaacgccagagcagaagtaa

SEQ ID NO: 7617 - DNA, 843 bp, Klebsiella pneumoniae
  CDS (1)...(843)
atggtgctggcgaagagccatcagctgctggagcagcgctatccgcaaacccatatctcgtggattgagttcccggccggtccgcagatgctggaggcgctgaacgtcggcagcattgatatcggcagtaccggcgatattccgcctatctttgcccaggcggcaggcgccgatttggtctatatcggcgcggagccgcccaagcccaaggcggaggtgatcctggtggcgcagggcagcccgattcataacgttgctgagttaaaagggaaaaaggtcgcttttcagaaaggctccagctcccacaatctgctgctgcgcgccctgcagctcgcaggtctgaaatttagcgatattcagccggtttaccttgcccccgccgatgcgcgcgccgccttccagcagggcaatgtcgacgcatgggccatctgggatccgtactactccgccgcgctgctgcagggcggcgcccgggtactcactgacggaaccgatctgaaacagacgggatccttctatcttgcttcccggccctacgctgaacgcaatggcgctttcattgaaggcgtactcgacacctttactcaggccgatgccctgacccacagccaacgcgcgcaaagcattacgctgctggcgaaaacgatgggcttaccggaggcggtgatcgccagctatctggaccatcgtccccccaccgcggttaccccggtgagcgccgaaaccgccgctcgccagcagcagacggcagacctgttctacgagaacaagctggtgccaaaaaaagttgatatccgggcccgcatctggcagcccaccgccacacaaggagcgaaatcatga

SEQ ID NO: 7618 - DNA, 1251 bp, Klebsiella pneumoniae
  CDS (1)...(1251)
gtgcgtaacaacgaattcaatcacgaaaatctgcagctcggcatcaatgaagcccacgcgctgggtaaaaaattctatgtggtggtcaacatcgccccgcataacgccaagctgaaaacgtttattcgcgatctgaagccggtggtggagatgggtccggacgcgctgatcatgtccgatccgggtttaatcatgctggtgcgggaacacttcccggagatgtcgatccatctttcagtgcaggccaacgccgtcaactgggcgacggtcaaattctggcagcagatggggctgacccgcgtgatcctgtcgcgtgaactgtcgctggatgaaatcgaagagattcgccgccaggtgccggagatggagattgagattttcgtccacggcgcgctgtgcatggcctactccggccgctgcctgctctccgggtatatcaacaagcgcgacccgaaccaggggacctgcaccaacgcctgccgctgggaatacaacgtggcggaaggcaaagaggacgacgtcggcaacatcgtccacaaatatgagccgatcccggtgcagaccgtggagcccaccctcggcatcggcgcgccgaccgataaagtctttatgattgaggaagccaaacgtccgggcgagtacatgaccgcctttgaggacgaacacggcacctacatcatgaactcgaaagatctgcgggctatcgcccacgttgagcgtctgacccagatgggcgttcactcgctgaagatcgaaggccgcaccaaatccttctactactgcgcacgcaccgctcaggtttaccgcaaggcgatcgacgatgccgccgccggcaaaccgttcgacaccagcctgctggagaccctggaggggctggcccaccgcgggtacaccgaaggcttcctgcgccgccatacccatgacgattatcagaactacgagtacggctactccgtctccgagcgccagcagtttgtcggcgaattcaccggagagcgtaacggcccgctggcggccgtggcggtcaaaaataagttcagcgtcggcgacagccttgagctgatgaccccgcagggtaacgtcaatttcacccttgagcatatggagaatggcaaaggcgaaaccatgccggtggccccgggcgatggctataccgtctggttgcctgtgccggacgacctgcccctgcagtatgccctgctgatgcgcaactttactggtcaaacaaccagaaatccgcacggtaactag

SEQ ID NO: 7619 - DNA, 1488 bp, Klebsiella pneumoniae
  CDS (1)...(1488)
atgaacaaagaaattttggctgttgttgaagccgtttccaacgaaaaagcgctgccgcgtgagaaaattttcgaagcgctggaaagcgcgctggcaacggccaccaagaaaaaatacgaacaagagatcgacgttcgcgttgaaatcgaccgcaagagcggcgatttcgataccttccgtcgttggctggttgtagaagaagtcacccagccaacgcgcgagatcacgctggaagcagcgcgtttcgaagatgaaagcatgaacgtcggcgactatgtcgaagatcagatcgaatctgttaccttcgaccgtatcaccacccagaccgctaagcaggttatcgtgcagaaagtccgcgaagccgagcgcgcgatggtggttgatcagttccgcgagcacgaaggtgagatcatcaccggcgtggtgaaaaaagtgaaccgcgacaatatcacactggatctgggtaacaacgctgaagccgtgatcctgcgtgaagatatgctgccgcgtgaaaacttccgtccgggcgaccgcattcgcggcgtactgtacgctgtccgtccggaagcgcgtggcgcccagctgttcgtcacccgttccaaacctgagatgctgatcgaactgttccgcatcgaagtgccggaaatcggtgaagaagtgctggagatcaaagcggcggctcgcgatccgggctctcgtgccaaaatcgcggtgaaaaccaacgacaagcgcatcgacccggttggcgcttgcgtcggtatgcgcggtgcgcgtgtgcaggccgtgtcgactgagctgggtggtgaacgcatcgatatcgtcctgtgggatgataacccggcgcagttcgtgattaacgctatggcgccggcagacgtcgcgtccatcgtggtggatgaagataaacacaccatggatatcgcggtagaagcgggcaacctggcgcaggcgatcggccgtaacggtcagaacgtccgcctggcttcacagctcagcggctgggaactcaacgtcatgaccgttgacgatctgcaggctaagcaccaggcggaagcgcatgccgctatcgataccttcaccaaatatcttgatattgatgaagatttcgcgacagtgctggttgaagaaggcttctcctcgctggaagagctggcctatgtgccgatgaaagaactgctggaaatcgacggtctggatgaagccaccgttgaagcacttcgtgagcgtgcgaaaaacgcactgactacgctggcgctggctcaggaagaaagcctgggagataacaaacctgccgatgatctgttgaatctcgaaggtctggatcgtgccctggcattcaaactggctgcccgtggtgtttgtacgctggaagatctcgccgagcagggcgttgatgacctggctgatatcgaagggatgaccgacgagaaagctggcgagctcatcatggccgctcgcaacatttgttggttcggcgacgaagcgtaa

SEQ ID NO: 7620 - DNA, 930 bp, Klebsiella pneumoniae
  CDS (1)...(930)
ttcgccccggaacggttggtgaaggcgctggacggcgtttcctttacccttgagcgcggtaaaacgctggcgatggtgggagagtcgggctgcggcaaatcgaccctcggtcgtctgctgacgatgattgagatccccaccggcggcgagctctattatcaggggcaggatctgcttaagcacgacccgcaggcgcagaagctgcggcggcaaaaaatccagattgtgttccagaacccgtatggttcgctgaacccgcgtaaaaaagtggggcagattctggaggagccgctgctgattaacagcagcctgagcaaagagcagcggcgtgaaaaagcgctggcgatgatggcgaaagtgggcctgaaaaccgagcattacgatcgctacccgcatatgttctccggcggtcagcgtcagctactcgctattgctcgcgggctgatgctggatccagatgtggtgattgccgatgagccggtctccgcgctggacgtttcggtacgcgcccaggtgctgaacctgatgatggatctgcagcaggatttagggctgtcctacgtgtttatctcccacgacctgtcggtcgtcgagcacatcgccgatgaagtgatggtgatgtatcttggccgctgcgtggagaagggcaccaaagaccagatcttcaacaatccgcgtcatccgtacacccaggcgctgctgtcggcgacgccgcgtctgaacccagacgaccggcgcgagcggatcaagctgaccggcgaactgccgagcccgctaaatccgccaccgggctgcgcctttaacgcgcgctgtcgccgtcgctttggcccctgcactcagctccagccgcagctgaaggattacggcggccagctggtggcctgctttgccgtcgaccaggatgagaatccgcaaaagtcccacgcctga

SEQ ID NO: 7621 - DNA, 1017 bp, Klebsiella pneumoniae
  CDS (1)...(1017)
atggccgttaaatcactgaaaaaaggatatctggcgctggcggcttccatgctgctggtggcgcaggcgcaggcgacggagctgctgaacagctcctatgatgtctcccgcgagctgtttgccgcccttaacccgccttttgagcagcagtgggcgaaagacaatggcggggacaagctgaccatcaagcagtcgcatgccggttcatccaagcaggcgctggctattttgcagggcctgaaggcggacgtggtcacctacaaccaggtgacggacgtgcagatcctgcatgacaaaggcaacctgatcccggccgactggcaaagccgtctgccgaacaacagctcaccgttctattcgacgatgggtttcctggtgcgtaaaggcaatccgaaaaacattcatgactggaacgacctggttcgctctgacgttaagctgatcttcccgaatccgaaaacctcgggtaacgcccgatacacctacctggcggcatggggcgcggcggataaagctgatggcggcgataaagctaaaaccgaacagtttatgactcagtttctcaagaacgtcgaagtctttgacaccggcgggcgcggagcgaccaccaccttcgccgaacgcggcctcggcgatgtgctgattagcttcgaatcggaagtgaataatattcgcaagcagtatgaggcgcagggatttgaagtggttatcccgaaaaccaacattctggcggagttcccggtggcctgggtcgataaaaacgtcaaagccaatggcacggaaaaggcggcgaaagcctacctgaactggctctatacgccacaggcgcaaactatcattaccgactactactatcgggtaaacaacccgaaagtgatggatgctctgaaggataaattcccgcagaccgagctgttccgcgtggaagataagtttggctcctggcctgaggtaatgaaaacccacttcgccagcggcggcgaactggacaaactgctggcggcggggcgtaagtaa

SEQ ID NO: 7622 - DNA, 381 bp, Klebsiella pneumoniae
  CDS (1)...(381)
atggccattctcgggttgggtaccgacatcgtcgagatcgcccgcatcgaagcggtgatcgcccgcagcggcgatcgccttgcccgccgggtgctgagcgaccatgaatggagcatctgggagcagcaccagcagccggtgcgtttcctggcgaaacgctttgcggtcaaggaagcggcggcgaaagcgctgggaaacgggatccgtaacgggctggcgtttaaccagttcgaggtttacaacgacgagctaggcaagccgaagctgcggctatggggtgaagcaaaccttttagctgaacgcatgggagtaagcgctattcacgttactctcgctgatgaacgccactacgcctgcgccacggtgattgtcgaaagctag

SEQ ID NO: 7623 - DNA, 744 bp, Klebsiella pneumoniae
  CDS (1)...(744)
atgtccccaataactctacgccgcaggcttgacggagtcgctgttgtcatgagcggagaaaagatgaaagttatcattgtggaggatgagtttctggcccagcaggagctctcctggcttattaacacccatagccagatggagatcgtcggcagctttgacgacggcctggacgtgctgaaatttctccagcacaacaaggtcgacgccatctttctcgatatcaatattccgtcgctcgacggggttctgctggcgcaaaacatcagccagtttgcccataaaccttttatcgtctttatcaccgcgtggaaagaacatgcggtggaagcctttgagctggaagcctttgactacatcctgaaaccctaccaggaatcgcgcatcatcaatatgctgcaaaagctgaccaccgcctggcagcagcaaaataacgctgcttcaggattagccagcgcggcgccacgggaaaacgacaccatcaatctgatcaaagatgagcggatcatcgtcaccagtattcatgatatttattatgccgaggcgcatgaaaagatgacattcgtctatacccgccgggagtcattcgtcatgccgatgaacattactgaattctgcagcaaactgcccaccgcgcatttcttccgctgccaccgctcgtattgcgtaaatctcagcaaaattcgggaaattgagccgtggttcaacaacacctatgtgctgcgctgcgtgactggagttcat

SEQ ID NO: 7624 - DNA, 963 bp, Klebsiella pneumoniae
  CDS (1)...(963)
atgattaagaaaatcggtgtgttgacaagtggcggtgatgcgccgggcatgaacgcagcaattcgtggcgttgtgcgcgcggcattaacggaaggtctggaagtttttggaatctatgacggttacctcggattgtatgaagaccgtatggttcagctcgaccgttacagcgtttccgacatgatcaaccgcggcggcaccttcctgggctccgctcgcttcccggaattccgcgaagaacacatccgcgctgtggctatcgaaaacatgaagaagcgcggcctggacgcgctggtggttatcggcggtgacggttcctatatgggggcgatgcgcctgaccgagatgggcttcccatgcatcggcctgccgggcaccatcgacaacgatatcaaaggcactgactacaccatcggcttctttactgccctgagcaccgtggtggaagcgattgaccgtttgcgcgacacctcctcttcgcaccagcgtatctccgtggtggaagtgatgggccgttactgtggcgacctgaccctggcggcggcgattgccggcggctgtgagttcatcatggtgcctgaagtggaatatacccgtgacgatctggtggcagaaatcaaagccggtatcgcgaaagggaaaaaacacgctatcgtggccatcaccgagcacatgtgcgacgttgacgagctggcaagctacatcgagaaagagactggccgtgaaactcgcgccaccgtcctcggccacattcagcgcggcggttccccggttccttacgaccgcatcctggcttcccgcatgggcgcctatgcgattgagctgctgctgcagggccatggcggccgttgcgtcggcatccagaacgagaagctggtgcaccacgacatcatcgatgccatcgagaacatgaagcgtccgttcaagaacgactggctggattgcgcgaagaaactgtactaa

SEQ ID NO: 7625 - DNA, 762 bp, Klebsiella pneumoniae
  CDS (1)...(762)
atgcgtctaaacgcaatcaggcatcggggcaacagcagaacaatcgataaccaggcccaggattacaacatggcagccacttttccgggcgtttgcgccgtggtgccggcagccggtttcggccgccgcatgcaaacggaatgcccgaaacaatatctctcaatcggtaacaaaacgattctcgaacacgcggtcgccgcgctgctggcggatgcgcgcgtccagcgggtggtgattgccgtcagccccggcgatcgccgcttcagccagctgccgctggcgcagcatccgcaaattaccgtggtggatggcggcgctgagcgcgccgattcggtactcgccggcctgcaggcgttgccggaggcgcagtgggtgctggtgcatgacgccgcgcgcccctgcctgcatcaggacgacctcagccgcctgctgtcgctgtgcgaaaccagccgcgtcggcgggatccttgcggcgccagtgcgcgacaccatgaagcgcgccgagccgggcaaaaccgctatcgcccataccgtcgaccgcaatgacctgtggcatgcgctcaccccgcaacttttccctcgcgagctgctggtggattgcctcactcgcgcgctaaacgagggagccactatcaccgatgaagcctcggcgctggagtactgcggcttccatccgcagctggtcgccggacgcgcggataatattaaagtgacgcgcccggaagacctggcgctggctgaattttacctcacccgttccctg

SEQ ID NO: 7626 - DNA, 1797 bp, Klebsiella pneumoniae
  CDS (1)...(1797)
atgattgttttctcctcgttacaaattcgtcgcggcgtacgcgtcctgctggacaacgccaccgctaccatcaatcctggccaaaaggtcggtctggtggggaaaaacggctgcgggaaatcgacgctgctatcgcttttgaaaaacgagataagcgctgacggcggcagtatgacctatcccggcaactggcagctggcctgggtgaatcaggaaaccccggcgctaccgcagccggcaatcgattatgtcattgacggcgatcgagaatatcgccaactggaggccgcgctccagcaggctaacgaacgcaacgacggtcatgctatcgccaccgtccacggtaagctggacgccatcgacgcctggacgatccgttcgcgcgccgccagcctgctgcacggtctgggtttcagcaatgaacagcttgagcggccggtcagcgatttttccggcggctggcgtatgcgccttaacctcgcccaggcgctgatctgccgctccgatctgctgctgctcgatgaaccgactaaccacctcgatctcgatgcggtgatctggctggagaagtggctgaagggctatacgggaacgctgatcctcatctcccacgatcgcgattttctcgatcctatcgtcgacaaaattatccatatcgaacagcagacaatgtttgagtacaccggcaactacagttcgtttgaagtgcagcgcgccacccgcctcgctcagcagcaggcgatgtacgaaagccagcagcagcgcgtcgcgcacctgcaaagctatatcgatcgcttccgtgccaaagccaccaaggccaagcaggcgcaaagccggatcaaaatgctggagcggatggagcttatcgctccggcgcacgtggataacccgttccacttcagcttccgccagccggagagcttgcctaacccgctgctgaagatggagaaagtcagcgccggctacggcgagcgtattattctcgactccatcaagcttaacctggtgccgggctcgcgtatcggcctgctgggccgcaacggcgccgggaagtcgacgctgattaagctcctggcaggcgagctccagcccgtaagcggcgagatcggcctcgcgaaaggcatcaagctcggctacttcgcccagcatcagctggaattcctgcgcgccgatgagtcgccgctgcagcacctggcgcgtctggcgccgcaggagctggagcagaagctgcgtgattatctcggcggctttggtttccagggcgataaggtgagcgaagaaacccgccgcttctccggtggagaaaaagcgcgcctggtactggccctgatcgtctggcagcgccctaacctgctgctgctcgatgaaccgaccaaccaccttgacctcgatatgcgtcaggccttaaccgaagcgctgatcgactttgaaggggcgctggtggtcgtatcgcacgatcggcacctgatccgttccaccactgacgatctgtacctcgtccacgatggtaaagtcgagccgttcgacggcgatctggaagattatcagcagtggctcagcgactcgcaaaaacaggagtcccagagcggcgaggcgccaaaagagagcggcaatagcgcccaggcgcgcaaagaccagaagcgtcgggaagcggactgcgcagccagacccaaccgctgcgcaaagagatcgcccgtctggaaaaagagatggacaagctcaacgcgcagttggccagtgcggaagaaaaacttggcgacagtgagctttatgacgcctcacgtaaagccgagctga

SEQ ID NO: 7627 - DNA, 1188 bp, Klebsiella pneumoniae
  CDS (1)...(1188)
atgttttcgcacctcgattgcctggacgcgtattttcccgcaggcgatgagctggagcccaacgaggctggcctgcagttttatgatgatctgttcgacgaatgcctgaaacacggcattgagccagtcattacgctgtcgcattttgaaatgccttatcacctggtcaccgagtacggcggctggcgcaaccgcaagctaatcgactttttcgtgcgctttgccagggtcgtcttcacccgctatcaacataaagtgaagtactggatgacctttaacgagatcaacaaccaggccaacttccatgaggactttgcccccttcaccaactccggtttgaaatatttgccggatgaagaccgggaaccggtgatgtaccaggccgcgcactatgagctggtggccagcgccctggcggtgaaagcggcgcgcgagatcaacccggcgctgcagattggctgcatgatcgctatgtgccccatctatccgctgacctgcgccccggacgatatgatgatggcgatgaacgccatgcaccgccgttactggtttaccgacgtccacgtgcgcggtcgctatccgcagcatctgctcaactattttgcccgccgcggctttactctggatatcaccgaagccgatcgtcaggcgttaaccgagggctgtgtcgactacattggctttagctactatatgtcgttcgctaccaaagccaccgaagacaaccccttgcttgattatgatgaaaccaccagcctggtctccaacccgtacgtcaaaaagtcggactggggctggcagattgacccggtcggcctgcgctattcgctgaactggttctgggatcactaccagctgccgctgtttattgtcgaaaacggctttggcgcgattgatgtccgcgaagcggacggcagcgtcaatgaccagtatcgtatcgattatctctccgctcatatcgcggagatgaaaaaggcggtggtcgaggatggcgtcgatctgatgggctacaccccctggggctgtatcgatctggtttccgccggcacgggggaaatgaaaaaacgctacggctttatttatgtcgataaagataatgaaggcaatggcacgttggcacgcagccggaaaaagtcctttgcctggtatcagcaggtaattgccagcaacggggagaacctgtcgtag

SEQ ID NO: 7628 - DNA, 777 bp, Klebsiella pneumoniae
  CDS (1)...(777)
atgagtgagaccgtcatcgccttaaacggcctgagccgccgttttcccggtatggacaggccagcggtagcgccgctcacctgcacgatccgcgccggctacgtcaccgggctggtggggcccgacggcgcggggaaaaccaccctgatgcgaatgctcgccggattgctcaaacctgatgagggccgcgccagcgtgataggcttcgacccgctaaaagacgacagcgccctgcacgcggtgctcggctatatgccgcagaagttcggcctgtatgaagatctgacggtgatggaaaacctgaccctgtacgccgacctgcgcagcgtcaccggcgaggcgcggaagaaaattttcgaccgcctgctggagttcacctctcttggtccattcaccgaacggctggcaggcaagctttccggcgggatgaagcaaaagctgggcctcgcctgtaccctggtgggcgatccgaaagtactgctgctcgatgagcccggcgtcggcgtcgaccctatctcgcgccgcgagctatggcagatggtgcacgagctggccggcgacggcatgctgatcctgtggagcacctcctatctcgatgaagcggaacaatgccgcgacgtgctgctgatgaacgaaggcaaactgctctaccagggtgagccgacggcgctgacgcaaaccatggccgggcgcactttctggtttccagccccgcaggagaacaaccgccgcctgctgcagcgggcgctgaagctgccgcagttagcgacggggtga

SEQ ID NO: 7629 - DNA, 1026 bp, Klebsiella pneumoniae
  CDS (1)...(1026)
atgatgcctcgatctctttcgcaaaccggcccggagaagcgacgcttcacctggccgaagggcaccccgcagattattgccctgctgctggttctgctggtagacagcctggtggcgccccatttttatcaggtggtgctccaggatggccgcctgtttggcagcccgatcgatattctcaaccgcgccgcgccggtggcgctgctggcgattggcatgacgctggtgatcgccaccagcggcatcgacctgtcggtaggggcggtgatggcgattgccggcgcgacggccgcctcgatgaccgtcgccgggcacagcctgccggtggtgctgttggccgcgctggccgcgggcgcgctggccggattgtggaacggcatcctcgtggcggtccttaagatccagccctttgtggcgacgctgatcctgatggtggccgggcgcggggtggcgcagttgatcaccgccgggcagatcgtcacctttgattccccggccctggcgtggctcggcagcggatcgtttctgctgtttccgacgccggtgatcgtcgccgccgctacgctgctgctgttctggctgtttacccgtaaaacggcgctgggcatgtttattgaggcggtagggatcaacatccgcgcggcgaaaaacgccggtgtcaatacccgcatcgtggtgatgctggcctatgtcctgagcggcgtctgcacggcgatcgccgggatcatcgtggcggcggacatccgcggcgcggatgccaataacgccgggctatggcttgagctggacgccattctggcggtggtcatcggcggcgcctcgctgatgggcgggcgctttaacctgctgctctcggtggtgggggcgctgattatccagggaatgaacaccgggattttgctctccggcttcccgccggagctcaaccaggtggtgaaagcggtggtggtgctgtgcgtactgattgtccagtcgccgcgctttatcggtttactgaaaggggtacgcggccatgataaagcgtaa

SEQ ID NO: 7630 - DNA, 1599 bp, Klebsiella pneumoniae
  CDS (1)...(1599)
  misc_feature (1)...(1599): n = A,T,C or G
gtgatcgaaaatctgcgtaatatcgccatcatcgcgcacgttgaccatggtaaaactaccctggttgacaagctgctacagcaatccggtacgttcgacgcacgtactgaagcacaagaacgtgtgatggactccaacgatttggagaaagagcgtgggattaccatcctcgcgaaaaacaccgcaatcaaatggaatgattaccgtatcaacatcgttgataccccagggcacgccgacttcggaggtgaagttgagcgtgttatgtccatggttgactctgtgctgctggtggtagatgcctttgatggcccgatgccgcaaacgcgcttcgtgaccaaaaaagcttttgcccacggtctgaagccgatcgtggtcatcaacaaagttgaccgcccgggcgcgcgtccggactgggttgtcgatcaggtgttcgacttgttcgttaacctcgatgcgaccgacgaacagctggacttcccgatcgtttacgcgtccgcgctgaacggtatcgcgggtctggatcacgaagacatggctgacgacatgaccccgctgtaccaggcgattgtcgatcgcgtgccggcgccggacgttgatcttgacggtccgctgcagatgcagatctcccagctggactacaacaactacgttggtgttatcggcatcggccgcatcaagcgcggtaaagtgaagccgaaccagcaggtcactatcatcgatagcgaaggcaaaacccgtaacggtaaagtcggtaaagtgctgactcacctgggtctggagcgaattgagagcgacgtagctgaagctggcgacatcatcgcgatcaccggtctgggcgagctgaacatctccgacaccatctgcgacccgcagaatgtcgaagcgctgccggccctgtccgttgatgagccgaccgtttccatgttcttcaacgtcaacacctctccgttctgcggtaaagaaggtaagttcgttacctctcgccagatcctggaccgtctgaataaagagctggtgcacaacgtggcgctgcgcgttgaagaaaccgaagacgctgatgcgttccgcgtgtccggccgtggtgaactgcacctgtccgttctgattgaaaacatgcgtcgtgaaggtttcgagatggcggtttcccgtccgaaagttatcttccgcgaaatcgacggccgtaaacaagagccgttcgagaacgtgacgctggacgtcgaagagcagcaccagggttctgtcatgcaggcgctgggcgagcgtaaaggcgacctgaaaaacatgaatccggacggtaaaggccgcgtacgtcttgactacgtgatcccaagccgcggtctgatcggcttccgttcagagttcatgaccatgacctccggtaccggtctgctgtactccaccttcagccactacgacgacgttcgtccgggcgaagtgggccagcgtaacaacggcgtactgatctccaacggtcagggtaaagcggtactntcgcgctgttcggtctgcaggatcgcggtaagctgttcctcggccacggcgctgaagtttacgaaggccagatcatcggtattcacagccgttccaacgacctga

SEQ ID NO: 7631 - DNA, 768 bp, Klebsiella pneumoniae
  CDS (1)...(768)
atgcgacatcctttagtgatgggtaactggaaactgaacggcagccgccacatggtaaacgaactggttgcgaacctgcgtaccgagctggctggcgtaagcggctgtgcagttgccatcgccccgccggaaatgtatctggacctggctaagcgcgcggcagaaggcagccacattcacctgggcgcgcagaacgttgacgtgaacctgtccggcgcattcaccggtgaaacctccgccgaaatgctgaaagatatcggcgcgcagtacatcatcatcggccactccgagcgtcgtacctaccacaaagaatccgacgagctgatcgcgaagaaattcgcggtgctgaaagagcagggtctgaccccggttctgtgcatcggtgaaaccgaagccgaaaacgaagcgggcaaaacggaagaagtttgcgcacgtcagatcgacgccgtgctgaaaacccagggcgctgccgctttcgaaggcgtggttatcgcttacgaaccagtatgggctatcggtaccggcaaatcagcgaccccggctcaggcgcaggcggtgcacaaattcatccgtgaccacattgctaaagctgacgccaaaatcgctgagcaagtgatcatccagtacggcggttccgttaacgctggcaacgccgcagagctgttcacccagccggacatcgacggcgcgctggttggcggcgcctccctgaaagctgacgctttcgcggtgatcgttaaagcagcagaagcagcgaaaaaagcgtaa

SEQ ID NO: 7632 - DNA, 831 bp, Klebsiella pneumoniae
  CDS (1)...(831)
attggcctgatcgccaccccgattcgtcacagcatgtcgcccaccatgcacaacgaggctttcgcccatctcgggctggactacgtctatctcgcttttgaagtcggtaaccaggagctaaaagacgtggtgcagggcttccgggcgatgaagctgcgcggctttaacgtctctatgccgaacaaaaccgagatttgccagtatctcgataaactgtcgccggcggcacagctggtcggggcggtcaataccgtggtcaacgacgacggcgtactgaccggacatatcaccgatggcaccggctacatgcgcgcccttagcgaagccggtatcgatatcatcggcaagaagatgaccgtactcggcgccggcggcgcggcaacggcgctctgcgtccaggcagcactggatggcgtgaaggcgatctccatcttcaaccgccgcgataaattcttcgccaacgcagaagaaaccgtggccaagatccgccacaacaccgactgcgagatccatctgttcgatctcgacgatcatgacaagctgcgcgccgaaattgacagcagcgtgatcctgaccaatgccaccggggtcggcatgaagccgttcgaaggccagatgctgctacctgacgacagcttcctgcgtccggacctgatcgtctccgacgtcgtctacaacccgcgcaaaacccacctgctggaagtggccgagaaaaaaggctgccgcacgctgaacggcctggggatgatgctgtggcaaggcgcgcgcgcgttcgaaatctggacgggcaaacagatgccggttgattacatcaagagcattctgttctaa

SEQ ID NO: 7633 - DNA, 906 bp, Klebsiella pneumoniae
  CDS (1)...(906)
atggcaacacgcatcgaattttcgaaacacgggggaccggaggtgcttcaggcggttgagttcacgccacgcgatcccgcagaacatgagattcaggtcgaaaacaaagccatcggcatcaactatatcgacacctatgttcgcagcggcctctatccgccgccgtcgctgccgagcggcctgggcaccgaggcggccggcatcgtcagtaaagttggccatggggtcacgcatattaaggtaggcgatcgggtggtgtgcgcccagtcggcgctcggcgcctacagcacggtacacaatgtgctggccgacaaagcggcggtcctgccggacgctatctctttcgaacaggccgccgcgtcgttcctcaaaggattaacggtctggtatctgctgcgcaaaacctatgaaattaagcctgatgagatgttcctgtttcacgcggccgctggcggcgtggggctgatagcctgtcagtgggcgaaagcgctgggggcgaaacttatcggtaccgtcggcagctcgcagaaagcgcagcgcgccaaagaggcgggcgcctggcaggtgattaactatcgcgaggagtctatcgtggagcggctcaaggcgctcaccgacggtaagaaagtggccgtcgtctacgactcggtggggaaagatacctgggaggcctctctggactgcctgcagcgccgcggcctgatggtcagctttggtaactcctccggtccggtgaccggcgttaatctggggatcctgaatcaaaaaggctccctgtacgtcactcgcccatcgctgcagggctatatcaccaaccggaaagaactggaggaagcctgcagtgaattgttttcgctgatcgccagcggggtgattaaagtggacgtggctgaaagtcagatctat

SEQ ID NO: 7634 - DNA, 1128 bp, Klebsiella pneumoniae
  CDS (1)...(1128)
  misc_feature (1)...(1128): n = A,T,C or G
atggcaggaaataaacccttcaacaaaccacagacagaaacccgcgaacgcgatccgcagctcgccgggctgaaagtcccgccgcactcgattgaagcggagcagtcggtgttgggcggtttaatgctggataacgagcgctgggacgacgtcgccgaacgcgtcgttgccgacgacttttatacccgtccgcaccgtcatatttttaccgagatggcgcgcctgcaggagtccggcagcccgattgacctgattacgctcgccgagtcgctggagcgtcaggggcagctggacagcgtgggcggcttcgcctatctggccgaactgtccaaaaacacgcccagcgcggctaacatcagcgcctatgccgacatcgtgcgcgaacgcgcggtggtgcgcgaaatgatttcggtggccaacgagatcgccgaagccggcttcgacccgcaggggcgaaccagcgaagatctgctcgacctcgccgaatcccgggttttcaaaatcgccgaaagccgggccaacaaagacgaagggccgaagaacatcgccgatgtcctcgatgccactgtcgcccgtatcgaacagctgttccagcagccccatgacggcgtcaccggggtcaacaccggctacgacgacctcaacaaaaagaccgccggcctgcagccgtcggatctgattatcgtcgccgcccgtccatcgatgggtaaaacgaccttcgcgatgaacctcgtggaaaacgcggcgatgctgcaggacaagccggtattaatcttcagtctcgagatgccctcggaacagatcatgatgcgttctctggcctcgctgtcgcgcgtcgatcagacccgcattcgtaccggtcaactggacgacgaagactgggcgcggatctccggcaccatgggcatcctgctggaaaagcgcaatatctatatcgatgactcctccggcctgacgccgacggaggtgcgctcccgcgcgcggcgtatcgcccgcgagcacggcggcatcggactgattatgatcgactacctgcagctgatgcgcgtgccgtcgctctccgacaaccgtacccttgagattgccgaaatctnccgctcgctgaaggcgctggcgaaagagctgctt

SEQ ID NO: 7635 - DNA, 840 bp, Klebsiella pneumoniae
  CDS (1)...(840)
atggcgcggcgctgccggtggcgattgatccgctgcaggtcattgttatcgccctggtggcgatggtgctggccctgttgtctacgttgtacccttcctggcgcgctgccgccacccaacccgctgaggctttacgttatgaataagatcctgctgcaatgcgacaacctgtgcaaacgctatcaggaaggcaatgtgcaaaccgatgtcctgcacaatgtcagcttcagcattggtgaaggcgagatgatggctatcgtcggcacctccggctctggcaaaagtacgctgctgcatctgctcggcggcctggatacgcccacctctggcgacgtgattttctccggtcagccgatgagcaagctctccaccgccgcgcgcgccgacctgcgtaaccgcgagctgggctttatctatcagttccaccatctgctgccggactttagcgcactggaaaacgtggcgatgccgctgctgattggcaaaaagaagccggcggatattgaacgccaggcgaaagcgatgctgcaggcggtcgggcttgaacaccgcagccatcaccgtccgtcggagctctccggcggcgagcgccagcgggtggcgattgcccgcgcgctggtgaataaaccgcggctggtgctggcggacgagccaaccggtaacctcgacgctcgcaacgccgacagcatcttccagctgctgggcgaactgaacgtcgcgcagcgcaccgcgtttctggtggtgacccacgacctgcagctggcgaagcgcatgagccgccagctggagatgcgcgatggccgtctgaccgccgacctgaccctgatgggggccgagtaa

SEQ ID NO: 7636 - DNA, 903 bp, Klebsiella pneumoniae
  CDS (1)...(903)
atgagcgagaaactgcaaaaagtgctggcccgcgccggccacggctcccgccgtgaaattgaagcgaaaatcgaagctggccgcgtcagcgtcgacggcaaaatcgccaccctcggcgatcgtgtggaaattgtccctggtttaaaaattcgtatcgatggtcatctgatctcggtgaaagagtctgccgagcagatctgccgcgtgctggcttactataagccggaaggcgagctgtgcacccgtaacgatccggaaggacgcccgacggtgtttgatcgtctgcctaaactgcgcggcgcgcgctggattgccgttggtcgtctggacgtgaatacctgcggcctgctgctgttcaccaccgatggcgaactggccaaccgcctgatgcacccgagccgtgaagtcgagcgtgagtatgccgttcgcgttttcggccaggtggatgatgataagctgcgccagctgtcgcgcggcgtacagttagaagatggtccggcagcgtttaaaaccatcaaattcaccggcggcgaagggattaaccagtggtataacgttaccctgaccgaagggcgtaaccgcgaagtgcgtcgcctgtgggaagcggtcggcgtgcaggtcagccgtctgatccgcgtgcgctacggcgatattctgctgccgaaaggcctgccgcgcggcggctataccgagctggacctggcgcagaccaactacctgcgcgagctggtggagctcacgccggaaaccagctctaaggttgccgtcgagaaagaccgtcggcggttgaaagccaatcagatccgtcgggcggtgaagcgtcacagccagaccagcgctaatccgcgccagggtaacaacagcaaccgtcgttccagtactcgtaataagactaacggttaa

SEQ ID NO: 7637 - DNA, 822 bp, Klebsiella pneumoniae
  CDS (1)...(822)
atgaataatcgagtccatcagggccatttagcccgtaaacgcttcgggcagaacttcctcaacgatcagtttgtgatcgacagcatcgtctcggcgattaacccgcagaaaggccaggcgatggttgaaatcggccccggcctggcggccctgaccgagccggtcggcgaacgccttgaccagctgaccgtcatcgaactggaccgcgatctggcggctcgcctgcagacgcatccgttcctcggtccaaagctgaccatctatcagcaggatgcgatgaccatgaactttggcgaactggcggagaaaatgggccagccgctgcgcgtcttcggcaacctgccgtacaatatctcgaccccgctgatgttccatctgttcagctatactgatgccattgccgatatgcactttatgctgcagaaggaagtagtgaatcgtctggttgccggaccgaacagtaaggcgtatggtcggttaagcgtgatggcgcaatattattgccaggtgatcccggtactcgaagtgccgccgagcgcgtttaccccgccgcctaaggtcgactccgcggtggtacgcctggtgccgcacagcaccatgccgtatccggtcaaagagatccgggtgctgagccgcatcaccaccgaagcgttcaaccagcgccgcaagactatccgcaacagtctcggcaatctgttcagcgtggaagtgctgaccgagctgggcatcgacccggccatgcgcgccgaaaatatttccgtggcgcagtactgcctgatggccaactggctgtctgacaatctgccaacgaaggagagctaa

SEQ ID NO: 7638 - DNA, 1668 bp, Klebsiella pneumoniae
  CDS (1)...(1668)
gtggctcaattcgtttataccatgcatcgtgtcggcaaagtggttccgccgaaacgtcatattttgaaaaatatctccctcagctttttccctggcgcgaaaatcggtgtgctcggtctgaacggcgccggtaaatctaccctgctgcgcatcatggccggtatcgacaccgagatcgaaggtgaagcgcgtccgcagcccggcatcaaaatcggctacctgccgcaggagccgcagctcaacccggagcacaccgtgcgcgagtccgtggaagaagcggtcgccgaagtggttaacgcgctgaaggggctggacgaagtctatgccaaatacgccgagccggatgcggacttcgataatcttgccgcacagcaaggcaagttcgaagagattatccaggcgcacgacggccacaacctgaacgtccagctggagcgcgcggccgacgccctgcgcctgccggactgggatgcgaaaatcgctaatctttccggtggtgaacgccgccgcgtcgcgctgtgccgtctgctgctggaaaaaccggatatgctgctgctcgacgaaccgaccaaccacctcgacgccgagtccgtcgcctggctggaacgcttcctgcacgacttcgaaggcaccgtggtggcgattacccacgaccgttacttccttgataacgtcgccggctggatcctcgagcttgaccgcggcgaaggtattccgtgggaaggcaactactcctcctggctggagcagaaagaccagcgtctggcgcaggaagcttctcaggaagccgcacgccgcaaatctatcgagaaagaactcgagtgggttcgccagggcgcgaaaggccgtcagtctaagggcaaagcccgcctggcgcgctttgaagagcttaacaacgttgaatatcagaaacgtaacgagactaacgaactgttcattccgccaggcccgcgtctgggcgataaagttctggaagtcagccatctgcgcaaatcctacggcgaccgcgttctgattgacgatctgagcttctcggtaccgaaaggcgctatcgtcggcatcatcggtccgaacggcgcgggtaaatccaccctcttccgcatgatgtccggccaggaacagcctgattccggcaccatcaccctgggtgaaaccgttaagctggcttccgtcgatcagttccgcgacgcgatggacaacagtaagaccgtgtgggaagaagtgtctggcggcctggatatcatgaagatcggcaacaccgagatgccgagccgcgcctacgtgggccgctttaacttcaaaggcgtcgaccagggtaaacgcgttggcgagctgtccggcggtgaacgtggtcgtctgcacctggcgaaactgctgcaggtcggcggtaacgtcctgctgctcgatgaaccaaccaacgacctggatatcgaaaccctgcgcgcgctggaaaacgccctgctggagttcccgggctgcgcgatggttatctcgcacgaccgctggttccttgaccgtattgccacccacattctggattaccaggatgaaggtaaggttgagttcttcgaaggtaactttaccgagtacgaagagtacaagaaacgcactctcggcgccgacgcgctggagccgaagcgaatcaagtacaaacgtatcgcgaaataa

SEQ ID NO: 7639 - DNA, 1026 bp, Klebsiella pneumoniae
  CDS (1)...(1026)
gcggcggtcagtaagctgatgcgcaatcaggatctgatccttgccgccagcaaatgccaggtggtgacgcgctttcgcaacaccatcggcctgcccggccacctcagcgtacgcctgcagcccaaccatcccaccgacgacctgaaaggcatcgccgccagtatgctcgacgggctgctgtacggcgccggggacgcggtgatcggcatcaacccggccagcgacagcttaccggtgctggcgcagctgaacgtcatgctggacgatattattcagcgcttcgccatccctacccagtcctgcattctgacccatgtgaccaatacgctgcagctgattgagcgcggcgcgccggtggatctggtgttccagtcggtggccggtaccgaagcggccaacagcggcttcggcatcaatcttgccatgctgcaggaggcccgcgaggcggccctgagcctcaggcgcggtaccctcggcagcaatgtgatgtattttgagaccggccagggaagctgcctgtcggccaacgcccaccacggcgtcgatcagcaaacctgtgaggcgcgggcctacgccgtcgcccgccactttgaaccgctactggtcaataccgtggtcggttttatcggtccggagtatctctacgacggcaagcagattattcgcgccgggctggaggatcatttctgcggcaagctgatgggcctgccgatcggctgcgacgtctgctataccaaccacgcggaagcggatcaggatgatatggacaccctgctgaccttgctgtgcgccgccgggctcaccttcctgatcggcgtgcccggagcggacgatatcatgctcaattaccagagcacctcgttccatgacgcgctgtacgcccgtcgcctgctgggcttaaagcatgccccggagttcgccgactggctggcgaaaatgcaaattatcgatccgcacggcgcgctgcggctcaccgacgcccgtcatccgctgctgtccgtcctgccgcaaggagcctccgtatga

SEQ ID NO: 7640 - DNA, 186 bp, Klebsiella pneumoniae
  CDS (1)...(186)
atgattcttgatgcattctccctgcagggaaaagtggccgtcgtgagcggatgcgataccggtttaggtcaggggatggccctcgggctggcggaagcgagctgcgatattgtcggtatcaatatcgtcgaaccggtggagactatcgagcgggtaaccggctgggacgccgttttctcagcctga

SEQ ID NO: 7641 - DNA, 711 bp, Klebsiella pneumoniae
  CDS (1)...(711)
atgcgataccggtttaggtcaggggatggccctcgggctggcggaagcgagctgcgatattgtcggtatcaatatcgtcgaaccggtggagactatcgagcgggtaaccggctgggacgccgttttctcagcctgaccgccgacctgcgccagatcgacggtattcctcagcttctggagcgggcggtggcggagttcggccatattgatattctggtcaacaatgccggcctgattcgccgcgaggacgcgctggcgttcagcgaaaaagactgggacgacgtgatgaacctcaacatcaagagcgtattttttatgtcccaggcggcggcgaaacactttatcgcccagggcagcggcgggaagatcattaacatcgcctccatgctgtcgttccagggggggatccgcgtgccgtcgtataccgcatccaaaagcgcggtgatgggcgtcacccgcctgctggccaacgagtgggccaaacacaacatcaacgtcaacgccatcgccccggggtatatggcgaccaacaacacccagcagctgcgcgccgacgagcagcgtagcagcgaaatcctcgatcgcattcccgccgggcgctgggggctaccggccgatctgatggggccagtcgtgttccttgcctcctcagcctccgattacatcaatggctacacggtggcggtggacggcggctggctggcgcgctaa

SEQ ID NO: 7642 - DNA, 753 bp, Klebsiella pneumoniae
  CDS (1)...(753)
gtgcagtttacgctacagcatgcgatccagggtctggaaaatctggcgttaatccctggctgcgcaggatcttcgccgatccagaatattggcgcctacggcgttgagctacagcgggtttgcgaatatgttgactgcattgagctggaaaccgggcgtaagcaacgtctttcagccgcggaatgccgttttggctatcgcgacagtatcttcaaacatgaatatcaggaccgctatgccatcgttgcgattggcttatcgttagcgaaaacatggcagcctgtactgagttacggtgatttaacgcgtctcgatccgcagaccgtcacgccgcagcaggtatttgatgcggtctgtcatatgcgaatgactaaattgccggatccaaagattaacggtaatgccggcagcttttttaagaacccgatcgtcagcgctcaggttgcggaagcgctgctggcgcagttccctcatgcaccgcactatccgcaggcaaatggcagcgtcaagctggccgctggctggctaatcgatcaatgtgagctcaaaggacaacgcatcggcggcgctgccgtccatcggcagcaggcgctggtactgattaatgaagatcgagcgaccagcgaggatgtggtgaaacttgctcattatgttcgccagcgggtgggtgcgaaattcgatgtatggcttcagcccgaggtgcgcttcattggcacgcatggtgaagtcaacgcagaggagagcattgcgtga

SEQ ID NO: 7643 - DNA, 762 bp, Klebsiella pneumoniae
  CDS (1)...(762)
atgttcggccagccgctgctggtgcgtaccgtgccgccgcgccccaccgagcaaggacagaaactgctggctctgttgcgccaggttgaactgctggaggaagaatggctgggcgatgaacaaaccggctctacgccgctgctgctgtcgctggcggtgaacgccgacagtctggcgacctggctgctgccggcgctagccaatgttctgtcagactcccctattcgtctcaacctgcaggtggaagatgaaacccgcacccaggagcgcctgcgccgtggcgaagtagtgggcgcagtgagtatccagccgcaggcgctgccaagctgcctggtggatcagctgggggcgctcgattacctgtttgtcgcatcaaaagagtttgcgcaacgctatttcccgaatggcgtgacgcgttcggcgctgcttaaggcgccggtcgtcgccttcgaccatctggacgatatgcatcaggcgttcctgcagcaaaacttcgacctgccgccgggcagcgtcccctgccacatcgtcaactcgtcggaagctttcgtgcagctggcgcgccagggcaccacctgctgtatgatcccgcatctgcagatcgaaaaagagctcaacagcggcgaacttatcgatctcaccccgggcctgttccagcgccgcatgctctactggcaccgcttcgccccggaaagccgcatgatgcgccgggtgaccgatgcgctcattgactacggacacaaggtgctgcgtcaggattaa

SEQ ID NO: 7644 - DNA, 1578 bp, Klebsiella pneumoniae
  CDS (1)...(1578)
  misc_feature (1)...(1578): n = A,T,C or G
atgacggaaaacattcataaacatcgcatcctcatcctcgacttcgggtctcagtatactcagctggtggcgcgtcgcgtgcgtgagctgggcgtctactgtgagctgtgggcatgggatgtcacggaagcacagatccgcgaatttaatccaagcggcatcattctttccggcggcccggaaagcaccaccgaagagaacagcccgcgcgcgccgcagtatgtgttcgaagccggcgtgccggtatttggcgtctgctacggcatgcagaccatggcgatgcagctgggcggccatgtagaaggttctaacgagcgtgagtttggttacgcacaggttgaagtggttaacgacagcgcgctggtgcgcggtatcgaagattccctgaccgcagacggcaaaccgctgctggacgtgtggatgagccacggcgacaaagtgaccgccatcccagcggacttcgtaaccgtcgccagcaccgacaactgcccgttcgccattatggccaacgaagaaaaacgcttctacggcgtgcagttccatccggaagtgacccacacccgtcagggaatgcgtatgctggagcgcttcgtgcgcgacatctgccagtgcgaagcgctgtggaccccggcgaaaatcattgacgacgccgttgagcgtatccgtcagcaggttggcgacgacaaagtgatcctcggcctctccggcggtgtggactcttcggtgactgcgatgctgctgcaccgcgctatcggcaaaaacctgacctgcgtattcgtggacaacggtctgctgcgcctgaacgaagcgcagcaggtgatggagatgttcggcgaccactttggcctgaacattgttcacgttgaaggcgagcagcgtttcctcgacgcgctggcgggtgaaatcgatccggaagcgaagtcnaaaattatcggtcgcgttttcgtggaagtgttcgacgaagaagcgctgaagctggacgacgtcaaatggctggcgcagggtaccatctaccctgacgttatcgaatctgccgcttccgccaccggtaaagcgcacgtcatcaaatctcaccacaacgtgggcggcctgccgaaagagatgaagatgggcctggttgagccgctgcgtgagctgttcaaagacgaagtgcgtaagatcggcctggaactgggcctgccgtacgacatgctctaccgtcacccgttcccgggccccggccttggcgtgcgcgtgctaggcgaagtgaagaaagagtactgcgacctgctgcgtcgtgcggacgctatcttcatcgaagagctgcacaaagctgacctgtataacaaagtcagccaggcgttcactgtgttcctgccggttcgttccgtcggcgtgatgggcgatggccgtaaatatgactgggtggtttccctgcgtgcggtggaaaccatcgactttatgaccgcgcactgggcgcacctgccgtatgattttctcggccgcgtctccaaccgtatcatcaatgaagtgaacggtatctcccgcgtggtgtatgacatcagcggcaagccgccagcaacgattgagtgggagtaa

SEQ ID NO: 7645 - DNA, 522 bp, Klebsiella pneumoniae
  CDS (1)...(522)
gtggttgagcaaaacggagaggacctgattatgcgccggatattatcggtattactggaaaacgaatcgggcgcattgtcccgcgttatcggcctcttttcccagcgtggctataatatagaaagcctgactgtcgcgccgacggacgatcccactctctccagaatgaccattcaaaccgtgggcgatgaaaaagcgattgagcagattgaaaagcaactgcacaagctggtggatgtcctgcgggtcagcgagctggggcagggggctcatgttgaacgcgaaattatgctggtgaaggttcaggccagcggctatggccgtgaagaagtgaagcgcaacaccgaaatcttccgcggacagattatcgacgtgacgccttctatctataccgtccagctcgccggcaccagcgataagctggatgcatttctggcctcgctgcgcgatgtcgctcggattgtggaagtggctcgctccggcgtggtcggcctgtctcgcggtgataaaatcatgcgctaa

SEQ ID NO: 7646 - DNA, 1023 bp, Klebsiella pneumoniae
  CDS (1)...(1023)
atgggctggcgtccggatctctccgacgtgaagccgaccggtaaaaccgtcgcgatcatcggcgctggcccggcgggcttcgcctacgccgacgtgctgacccgtaacggcgtcaaggcggtggtatttgaccgccatccggaaatcggcggcctgctgaccttcggtatcccggcgttcaagctggaaaaagaggtgatgacccgccgccgggagatcttcaccggcatgggcattgagttcaaactcaataccgaagtgggccgcgacgtgcagctcgacgacctgctgaaggagtacgatgcggtgttcctcggcgtcgggacctatcagtcgatgcgcggtggactggacaacgaagacgctccgggtgtttacgacgcgctgccgttcctgatcgctaacactaagcagatcatgggctttggtgaaaccgccgatgagccctatgtcagcatggaaggcaaacgcgtggtggtgctcggcggtggcgataccgcgatggactgcgtacgcacctccgtccgtcagaatgcggcgcacgtgatctgcgcctatcgccgtgacgaagagaacatgcccggctcaaaacgcgaagtgaaaaacgcgcgcgaagaaggcgttgagttccagtttaacgtccagccgctgggcgtggaagtgaatgccaacggtaaggtttgcggcgtgaagatggcgcgcaccgaaatgggccagccggatgcgaagggccgccgccgcgcggagatcgtccccggctctgagcacgtggtgccggctgacgccgtagtcatggcgtttggcttccgtccgcacagcatggagtggctggcgaagcacagcgtcgaactggactcccagggccgtattatcgccccggaaggcagcgaaaacgccttccagaccagcaacccgaaaatcttcgccggtggcgatatcgttcgcggttccgatctggtggtcaccgcgattgccgaaggccgtaaagcggcggacgggatcctcaactaccttgaagtctga

SEQ ID NO: 7647 - DNA, 321 bp, Klebsiella pneumoniae
  CDS (1)...(321)
atgatccccggtgaatatcacgttaagcccggtcagatagccctgaataccggccgggcaacctgtcgcgtggtcgttgagaaccacggcgatcggccgattcaggtcggttcgcactaccatttcgccgaggttaacccggcgctgaagttcgaccgtcagcaggccgccggctatcgcctgaatatcccggcgggcacggcggtacgctttgaacccggccagaaacgcgaggtcgagctggtggccttcgccggtcaccgcgccgtcttcggcttccgcggcgaggtcatgggccctctggaggtaaacgatgagtaa

SEQ ID NO: 7648 - DNA, 303 bp, Klebsiella pneumoniae
  CDS (1)...(303)
atggaactgaccccccgagaaaaagacaagctgttgctgtttaccgccgcgctggtggcggagcgtcgcctggcccgcggcctgaagctcaactatccggagtccgtggccctcatcagcgcctttattatggaaggcgctcgggacggcaaaagtgtggcctcgctgatggaggaaggccgtcacgtcctgacccgcgagcaggtgatggagggcgtcccagaaatgatcccggatatccaggtcgaagccaccttcccggacggctcgaagctggtcaccgttcacaacccgattatctga

SEQ ID NO: 7649 - DNA, 1683 bp, Klebsiella pneumoniae
  CDS (1)...(1683)
atcgttttaaaagattggcgtccctatacacatgtcatgctggcgtcgctggcgatcaatattttggcattagccggtatcctcttttccatgcaggtatatgatcgggtaattccggcccaatcctatcccacgttatatgtcttgtttagcggcgtattaattgccgcagtgttcaatttcgttctgaaaattacccgcggtcacgtgaccgacctgctgggaaaacgtggggatattcgtatctccgatcgcgtatttggtcacgcattacggctgaaaaatacggcggtgccgcgctcgacgggcagctttatttcccagattcgcgagctagagcaggtacgggaaatgatgacctcgaccatgatgacggtcattgccgatttaccttttttcctgctttttcagcttgtgctatttatcgtctcgccatggctgagttggatcgcgcctgttgcgactatcctgatgctgttaccgggattgttactgcagaaaaaactggctgagctggcaaataaaaatcagcatgaaagcacgctacgcaacgccattttggtggaaagcattcagggcctgccggatataaaaatgatgcaggcagaaagtcgctttctgcaacaatggaacagctatgtggcgattactgcggaatcgggagttcaaacccgaaaagtcactcatgggctggtgagctggggcatgtcgatccagaacctgttgtatgccaccgtagtggccgttggggcgccgctggtgattaatggcgacatcacgaccggcgccatggtggcggcatcgatgctgtccagtcgaatggttgctccgatgacggcgctctgcggggtactggctcgctggcagcaggtgaaagtagcgaaagcaagcctggataatttaatggcgctgccggtagaaggggggttggatgagccgcggatccatcgagcggttctgcacggtaattatgaatttcgcaacgccgagtttcgttacggcaaagacaatggccccgcaccgctgcgaattaaacagctttctatcaaagccggggaaaaaatagctgttctggggcgcattggcgccgggaaatcaacgcttttgcaggcaatgatgggtaatgttgagatgacgtcaggcgaactaaggcttgacgatctttcgctgccgcaaatcgatctggcggatattcgccgtaatgccacgctactgacgcagcaggctcggttatttcatgggacattaagggaaaatgtgaccctgggacggcctatggcgagcgatgatgaactggtgaaagtgctggagctgtgcggtgcgctggagtttgtcaacaaactgcctatggggcttgaacatctggtgatggagggagggcttgggctttccggcgggcagcggcagtcactgctgctggctcgagcgctcatccgcgatcccaatattattctgctggatgaacccacctcattctttgatgaacgaacagaaaaagcgtttgtcgagcagctggcccgttgggcaggagagcgtacgttaatcatcgccactcacaaagcggcggtgctcaatatcgtcgatcgtatactggtaattcaagacgggcagctggcgctggataagcctaaagcgacggtatttgagcaagaaaaagcgcgtgctcaggtggtgaacatatga

SEQ ID NO: 7650 - DNA, 1344 bp, Klebsiella pneumoniae
  CDS (1)...(1344)
caaagctcgacgctggtcgaagcgctggccaaagcggatatcaactccgatcagatcgcggccatcggcatcaccaatcagcgtgagaccgtggtggtgtgggagcgagagaccggtaaacccatctacaacgctatcgtctggcagtgccgccgtaccgcggagatctgcgagcagctcaagcgtgacgggatggaagagtatatccgtaaggccacaggcctggtggtggacccgtacttctccggcaccaaggtgaaatggatcctcgaccatgtcgaaggttcccgtgagcgtgcgaagcgcggcgagctgctgttcggcaccgttgacacctggcttatctggaagatgacccagggccgcgtgcacgtcaccgactacaccaacgcctcgcgtaccatgctgttcaacatccacgacctcgactgggacgacaagatgctcgacgcgctggacattccgcgcgccatgctgccggaagtgcgcaagtcttccgaagtgtacggccagaccaacatcggtggtaaaggcgggacccgtattcctatcgccgggatcgccggtgaccagcaggcggccctgttcggccagctgtgcgtcaaagaagggatggcgaaaaacacctacggcaccggctgctttatgctgatgaataccggcgaaaaagcggtcacctccacccacggtctgctgaccaccatcgcctgcggcccgcgcggcgaggtgaactacgctctggaaggggcggtgtttatggccggcgcgtctattcagtggctgcgcgacgagatgaagctcatcagcgatgccttcgactccgagtacttcgccaccaaagtgaaggataccaacggcgtatacgtggtacccgcgttcaccggtcttggcgcaccgtactgggacccgtatgcccgcggcgcgattttcggcctcacccgcggcgtgaactccaaccacattatccgtgcgacgctggagtccatcgcctttcagacccgcgacgtgctggaggctatgcaggctgactctggcattcgtctgcacgccctgcgcgtagacggcggcgcggtggctaacaacttcctgatgcagttccagtccgatatcctcggcacccgtgtcgagcgtccggaagtacgcgaagtgacggcgctgggcgcggcctatctggccggtctggcggtcggtttctggcagaatctggatgaactgcaggagaaagcggtgattgagcgcgaattccgcccggggattgaaactactgagcgtaactatcgttacagcggctggaagaaagcggtgaaacgcgcgttagcgtgggaagagcacgacgaagcgtaa

SEQ ID NO: 7651 - DNA, 660 bp, Klebsiella pneumoniae
  CDS (1)...(660)
atgacacatccaaccgttataaaactgcacgacggcaacctgatgccgcagctgggtctcggcgtgtggaaagctggcaacgaggaagtcgtctccgccattcataaggcgctggaagtcggttatcgctcttttgacaccgccgccgcgtaccaaaatgagaccggcgtcggcaatgcgctgcacagcgctggcgtcaaccgcgatgagctcttcatcaccaccaagctgtggaacgacgatcaaaaacggccgcacgaggcgctgaaagagagcctcagcaaactgaagctggactatgtggatctctatttaatccactggccggtaccggctatcggccattacgtcgaggcctggcaggcgttgatcgagctgcagcagcaggggctgaccaaaagcattggcgtgtgtaatttccaggtaccgcatctgcagaagctgattgatgaaaccggcgtcgccccggtgatcaatcagatagaactccatccacttatgcagcagcgtcagctgcacgcgtggaacgccacccacaagatccagaccgaatcctggagcccgctggcccagggcggcgaaggcgtcttcgatcaaaaagtcatccaccagctcgccgataagtacggcaaaacgccggcgcaaatcgtcatccgctgt

SEQ ID NO: 7652 - DNA, 1905 bp, Klebsiella pneumoniae
  CDS (1)...(1905)
atgggacggcacgcaccgtcccatttaataaacacagatgggagtaaaaagagcatgcctaagtaccgttccgccaccaccacacatggccgcaatatggcgggcgcccgcgcgttgtggcgcgcaaccggaatgaccgatgccgatttcggcaaaccgattatcgccgtcgttaactcctttacccagtttgtccccgggcacgtgcacctgcgcgatctcggcaaactggttgccgagcagattgaagccgccggtggcgtggccaaagaattcaacaccatcgcagtggatgatgggatcgctatgggccacgggggtatgctctattcactgccatcccgcgagctgatcgccgactcggtggagtacatggttaacgcccactgcgctgatgccatggtttgtatctccaactgcgacaaaatcaccccggggatgctgatggcctccctgcgtttgaatattccggtgatctttgtttccggcggcccgatggaagccgggaagaccaagctgtcagataaaatcatcaagcttgacctggtggatgcgatgattcagggggcggatccgaaagtgtccgacgagcagagtaatcaggtggaacgctccgcctgcccgacctgcggctcctgttccgggatgttcacggcgaactccatgaactgcctgaccgaagcgctgggcctgtcgcagccgggcaacggctctctgctggcgacccacgccgatcgtaaggagctgttcctaaacgccgggaaacgtatcgtggagctgaccaaacgctattacgagcaggatgacgcttccgcgctgccgcgcaatatcgccagcaaggcggcctttgagaacgctatgacgctggatatcgccatgggcggctccaccaataccgttctgcacctgctggcggcggcgcaggaagctgaaatcgacttcaccatgagcgatatcgataagctctcccgcaaagtgccgcagctgtgtaaggtggcgccgagcacgcagaaataccatatggaagatgtgcatcgcgccggcggcgtgctgggcattctgggcgagctggaccgcgccgggctgctgaatcgcgaggtcaaaaacgtccttggcctgacgctgccgcagaccctggaacagtacgatgtgatggtgacccaggacgacgcggtgaaaaaaatgttccgcgccggcccggcgggcatccgtaccacccaggcgttctcgcaagactgccgctgggataccctggatgacgatcgcgccgaaggctgtatccgttctctggaacacgcttacagcaaggacggcggcctggcggtgctgtacggcaatttcgcagaaaacggttgtatcgtgaaaaccgccggcgtggacgacagcatcctgaaatttaccggtccggcgaaagtatatgagagccaggacgatgcggttgaggccatcctcggcggtaaagtcgtggaaggcgacgtcgtggtgatccgctacgaagggccgaaaggcgggccggggatgcaggagatgctttaccccaccagcttcctgaagtcgatggggctgggcaaagcgtgcgcgctgatcaccgatggccgtttctccggcggcacctcagggctctctatcggtcacgtctctccggaagcggcgagcggcggcaacattgcgctcattgaagatggcgacatgatcgcgattgatattccgaaccgcagcatccagctgcagctgagcgatgcggaaattgcggcgcgtcgtgaagcccaggaagcgcgtggcgaccaggcgtggacgccgaagaatcgccagcgtcaggtctcctttgcccttcgcgcctacgccagcctggcgaccagcgccgacaaaggcgcggtacgcgataaatccaagctgggtggctaa

SEQ ID NO: 7653 - DNA, 1017 bp, Klebsiella pneumoniae
  CDS (1)...(1017)
gtgcgtctggtccgacgcattgagcgctttcaaccagcgcccggaggcgctaccatagcgcctcttttttttccgggtaacgatatgcgtgttctactggcgccgatggaaggcgtgctcgattcgctggtgcgcgagctgctgaccgaggttaacgattacgatctctgcatcaccgaatttctgcgcgtggtggatcaactgctgccggtaaaatcgttctacaggctatgcccggaactgcatcaccagagccgcacgccgtccggcacccgcgtacgcgtccagctgctgggacaatatcccgagtggctggcggaaaatgccgcccgcgcggtggcgctgggttcatggggggtggatttaaactgcggctgtccgtcgaagctggtaaacggcagcggcggcggggcaacgctgctgaaagatccagagttgatctatcgcggcgcgaaagccatgcgagaggcggttcccgagcatctgccggtgacggtgaaagttcgtcttggctgggacagcggtgaacggcgctttgaaatcgccgacgcggtgcagcaggcgggggccagcgaactggtggttcacggccgtaccaaagaagatggctacaaagccgaacgcatcaactggcaggcgatcggcgagatccgccagcgcctgactatcccggtggtcgccaacggtgaaatctgggactggcaaagcgcccaggattgtatggctgtcaccggctgcgattcggtgatgattggccgcggggcgctcaatgtgccgaacctcagccgggtgatcaaatacaatgaaccgcgcatgccgtggccgcaggtggtccagctgttgcaaaaatatacccgcctggaaaagcagggtggtaccggtctgtatcatgtggcgagaattaagcagtggttaggctatttacgcaaggaatatgccgaggcgctgaccctgtttaatgaaattcgcgccctgcaaacgtctgctgaaatagcggcggcgatcggccgctattaa

SEQ ID NO: 7654 - DNA, 1968 bp, Klebsiella pneumoniae
  CDS (1)...(1968)
atggggacatataccattgctccccggcatctccgctttgccattaagcttgcatgcgcggtggtgctggcgctgtttgtcggtttccattttcagctcgaaacgccgcgctgggcggtactgacggcagcgatcgtcgccgccgggccggcctttgctgctggcggcgaaccgtactccggcgcgatccgctatcgcggtatgttgcgtattgccgggacctttattggctgtattgcggcgctggttatcatcatcctgatgatccgcgcgcctctgttgatgatgctggtctgctgtctgtgggccgggttttgtacctgggtttcgtcgctggtcaaggtcgaaaactcctatgcctgggggctggccgggtacaccgcgctgattatcattattaccatccataccaatccgatgctggcgccgcagtttgctgtcgaacgctgcagcgaaattgtcatcggtattgtcagcgccatcgtcgccgatctcctgttttcgccgcgttcgattaaaaaagagatcgacctcgagctcgataatctgctgattgcacagtataagctgatgcagttatgcgtcgcgcacggtgaaaaagaggaagtggatcaagcctggggagcgctggtacgccgcactacggcgctggaaggtatgcgtagtaacctgattatggaatcctcacgctgggcaaaggcgaatcagcgcctgaaggcgatcaacaccctttcgctaacccttatcacccaggcttgcgaaacctatctgattcagaactcacgcccggaaatggtcacggacgactatcgcgagctgttcgccgagccggttgagacggtgcaggatgttcaccagcagctgaagcgcatgcgccgcttcctgacctggaaaggcgagcataataccccggtcacgatttatagctgggtgggcgccgccacgcgttacctgctgcttaagcgcggcgtggtggggaatactaaaatcagccgtatcgaggatggcgtgttgcgcggcgaaacggtggttaaagtggagtccgccgaacgtcatcacgcgatggtgaacttctggcgcacctctgtctcctgtattctcggaacgctattctggctgtggacgggctggacctcaggcagcggcgcgatggtaatgatcgccgtggttaccgcgctggcgatgcgcctgccaaacccgcgtatggtggcgatagacttcctctatggcaccctggcggcgttaccgttgggcaccttgtacttcctggtgatcatgccggcgacgcagcagagcatgctgttgctttgcatcagcctggcggcgatggcgttctttatcgggatcgaagtgcagaaaaggcgtctcggatcgctgggggcgctggcgagcaccatcaacattctggtgctggataacccgatgcagttccagttcagccagttcctcgatagcgcgctggggcagatcgtcggctgtttcctcgctctgatggttattctcattgtcagggataactcccgggccagaaccggtcgggtgctgctgaaccagtttgtctccgcggcggtctcttcgctgaccaccaactcggcgcgtcgcaaagagaatcatctgcccgcgctttatcagcagctgtttttattactcaataaattcccgggtgacgtcgcccgtttccgtctggccttgacgttaatcatcgcccatcagcgcttgcgagatgcgcccgtgccggtgaatgacgatctctccgccttccatcgtcagctgcgacgtaccgcggaccatgtgatctccgccggcagcgatgataagcgtcggcgctattttacccagctgctggcggagcttgatgtctatcaggagaagctgcgggtctgggaggcctcgccgcaggtcaccgagccggtacggcgactggttgagatgttgcataagtatcagcatgtgctgaccagcagctaa

SEQ ID NO: 7655 - DNA, 471 bp, Klebsiella pneumoniae
  CDS (1)...(471)
gaaggcgccggcgggcaggtcatcttcaatgggtcaatcaccgacagctcttgcaacgtcgatagtagttctaatggccagaaggttgatctgggcaaatgggccagcaactattttaccggcactggttttgaaaccaccaaaacccccttccatatcaaagtgaaagattgcccggccagcgtgactacggtcgccgtgctgtttgacggcgcgcgcgatcagtctgataactccctgctggccatcaacggcggcgccagcggcgtagcgattaagctgtatgagcacgatcggtcgacggctgtcagcctcggtaaaacgtcagccaaacagacggtcactccgggtaccagcggcggcaccggctctgccgacctcgagttttacgccgactatatctccaccgcggcgaccgtgacggcaggtaaagccgacggtacagctaatttcaatatgatttataattga

SEQ ID NO: 7656 - DNA, 1758 bp, Klebsiella pneumoniae
  CDS (1)...(1758)
atgatcatggcgatggtgcaggacattcgcgtcatcctcatcaagcttgccgaccgcacccacaacatgcgtactctgggctcgctgcgcccggataaacgccgccgcatcgcccgcgaaacgctggaaatttacagcccgctggcgcaccgtttaggtatccatcacatcaaaaccgagctcgaagagctgggctttgaagcactgtaccctaatcgctaccgcgtcattaaagaggtggtcaaagcggcgcgcggcaaccgtaaggagatgattcaaaagatcctctccgaaatcgaagggcgtttgcaggaagcggggatcccctgccgcgtcagcggtcgcgagaagcatctatactccatctactgtaaaatggtgctcaaagagcaacgttttcactcgatcatggatatctacgccttccgcgttatcgtccatgatgccgatatctgctatcgcgtgctcggccagatgcacagcctctacaaaccgcgtccgggtcgttttaaagactatatcgccattccgaaagctaacggctatcagtctttgcacacctcgatgatcggcccccacggcgtcccggtcgaggtacaaattcgtaccgaagacatggaccagatggcggagatgggggtagcggcgcactgggcttataaagagcacggcggcgaaagcagcaccaccgcgcagatccgcgctcagcgctggatgcaaagcctgctggagctgcagcagagcgccggtagctcgtttgaatttatcgagagcgtaaaatccgatctgttccccgatgagatttacgttttcaccccggaagggcgcattgtcgaactgcctgctggcgccacgccggtggacttcgcctacgcggtgcataccgatatcggtcatgcctgcgtcggcgcgcgcgtcgaccgtcagccctatccgctgtcgcagccactctccagcggtcagactgtcgaaattatcaccgcgccgggcgctcgcccgaacgccgcctggctgaactttgtcgtcagctcgaaagcgcgcgccaaaatccgtcagctgctgaaaaaccttaagcgcgacgattcggtcagccttggccgtcgtctgctcaatcacgcgctgggcggaagccgcaaactcgccgagatcccaccggagaatatccagcgcgaactcgatcgcatgaagctggcctcgcttgacgatctgctggcggaaatcggtctgggcaacgccatgagcgtcgtggtggcaaaaaacctgcaacagggcgaagccgctgcggcgccggtaccggctaacgcgtcgaaccacggtcatctgccaatcaaaggcgccgatggcgtgttgatcaccttcgccaagtgctgtcgtccaattccaggtgacccgattatcgcccacgtcagcccgggtaaagggctggttatccaccatgaatcctgtcgtaacattcgcggctatcagaaagagccggagaaatttatggcggttgagtgggataaagagaccgctcaggagttcatcaccgaaatcaaggtggacatgtttaaccaccagggcgcgctggctaacctgacggcggcgatcaacaccgcgtcttccaatatccagagcctgaatacggaagagaaagatggccgcgtatacagcgcctttatccgcctgaccgcgcgcgaccgcgtgcatctggcgaatatcatgcgcaaaatccgcgtcatgccggacgtgattaaagtcacccgtaaccgaaactag

SEQ ID NO: 7657 - DNA, 270 bp, Klebsiella pneumoniae
  CDS (1)...(270)
atgtctctaagcgttgaagctaaagcaaaaatcgtttctgagtttggtcgtggcgaaaacgacagcggttctaccgaagttcaggttgcactgctgaccgcacagatcaaccacctgcagggccactttgcagagcacaaaaaagatcaccacagccgtcgtggtctgctgcgcatggtttctcagcgtcgtaaactgctcgactacctgaaacgtaaagatgttgcccgttactctgcgctgattgagcgtctgggtctgcgtcgctaa

SEQ ID NO: 7658 - DNA, 1842 bp, Klebsiella pneumoniae
  CDS (1)...(1842)
gtgaccctggaaaccggcatgatggcgcgccaggcaacggccgctgtgatggttagcatggatgacactgcggtattcgttaccgttgtgggtcagaaaaaagcgaagccaggccaggactttttcccgctgaccgttaactaccaggagcgtacctacgctgccggtaaaatcccgggtggtttcttccgtcgtgaaggccgtccaagcgaaggcgaaaccctgatcgcgcgtctgattgaccgcccggttcgcccgctgttcccggaaggcttcgttaacgaagttcaggttatcgctaccgtcgtttccgttaacccgcaggttaacccagacatcgtcgcgatgatcggtgcttccgctgcgctgtcgctgtctggtattccgttcaatggcccaatcggcgctgcgcgcgtgggttacatcaacgaccagtacgtactgaacccaacccaggaagaactgaagtccagcaaactggacctggtggttgccggtaccgaagcggccgtgctgatggtggaatccgaagcggaactgctgagcgaagaccagatgctgggcgcggttgtcttcggccacgagcagcagcagattgttattcagaacatcaacgacctggtgaaagaagccggtaaaccgcgttgggactggcagccggaagcggtcaacgaagcgctgaacgcgcgcgtggctgcgctggctgaatcccgtctgagcgatgcttaccgtatcaccgacaaacaagagcgttacgctcaggttgacgtgatcaaatctgaaaccatcgccacgctggttgctgaagatgaaaccctggacgctaacgagctgggtgaaatcctgcacgccatcgagaaaaatgtggttcgtagccgcgtactggccggcgagccgcgtatcgatggccgtgaaaaagatatgatccgtggtctggacgttcgtaccggcgttctgccgcgtactcacggttccgcgctgttcacccgtggcgaaacgcaggcgctggttaccgcgactctgggtaccgcacgcgatgcgcagaacatcgacgaactgatgggcgagcgcaccgactccttcctgttccactacaacttccctcagtactccgtaggcgaaactggcatggtggggtctccgaagcgtcgtgaaatcggtcacggtcgtctggcgaagcgcggcgtactggccgtgatgccgactattgaagaattcccgtacaccgtgcgcgtggtatcggaaatcaccgaatctaacggttcctcttccatggcttccgtctgcggcgcctctctggcgctgatggacgccggcgtgccggtaaaagccgctgtggcgggtatcgcaatgggtctggtgaaagaaggcgacaacttcgtcgtgctgtctgacatcctcggtgacgaagaccacctcggcgatatggacttcaaagttgcgggttcccgcgacggtatctctgcgctgcagatggatatcaaaattgaaggtatcaccaaagaaatcatgcaggttgcattgaaccaggctaaaggtgcgcgtctgcacatcctgggcgtgatggagcaggcgattaacgcgccgcgcggcgatatctctgaattcgcaccgcgtatccacaccatcaagatcaacccggacaagatcaaagacgttatcggtaaaggcggttctgttatccgtgccctgaccgaagagaccggtactaccatcgagatcgaagatgacggtaccgtgaagatcgcagcgaccgacggcgacaaagcgcacatgctatccgtcgtatcgaagagatcaccgctgagatcgaagttggccgcatctacaatggtaaagtga

SEQ ID NO: 7659 - DNA, 1011 bp, Klebsiella pneumoniae
  CDS (1)...(1011)
atgccctttgatgttatctggatggaagttgaaatggcaaagatgagggttgggatcgtttttaccggcaagtcggcggagcatgaagtgtcgctgcagtcagcgaagaatatcgtggaagcgattgataaatcgcgcttcgatgtggttctgttgggtattgataaacaggggctgtggcacatcaacgacgccggcaactacctgctcaacgcacaggatcctgcccgcattgccctgcgcccttccacggtgactctggcgcagatcccgggccgcgaagcgcagcagctgattaacgccgaaagcggccaaccgctggcggccatcgatgtgattttcccgatcgtccacggcacgctgggtgaagatggctccctgcaggggatgctgcgcatggcgaatctgccgttcgtcggctccgatgtgctgggctctgcagcctgtatggataaagacgtgaccaaacgtctgctgcgcgacgccgggctcgccgtcgccccgtttatcacactcacccgcgccaaccgcgcgcagttcagctttgccgatgtcgaagcgaagcttggcctgccgctgttcgttaagccggctaatcagggctcgtcggttggcgtcagcaaagttaaaaacgaagagcagtaccatcaggcggtggccctggccttcgaatttgaccataaagtggtggtggagcaaggcattaaagggcgggaaattgagtgtgcggtgctgggtaacgaccacccgcaggccagcacctgcggtgaaatcgtcctcaacagcgagttttacgcctacgacaccaagtatatcgacgatcagggcgcgcaggtggtagtcccggccgctatcgcccctgagctcaacgacaaaattcgcgctatcgcggtgcaggcctaccagaccctgggctgcagcggcatggctcgtgtcgacgtgttcctcaccgccgacaacgaggtggtgatcaacgagatcaacaccctgccgggctttaggaacatcagc

SEQ ID NO: 7660 - DNA, 1521 bp, Klebsiella pneumoniae
  CDS (1)...(1521)
atggtcagcaataatagcgaacggtcaggcgaatatttgttggagatgagcaacatcaacaaatcgtttcctggcgtcaaggctcttgataatgtcaacctgaaggttcgtccgcactccattcatgcgttaatgggtgagaacggcgccggtaaatcgacattattaaaatgcctttttgggatctatcaaaaagattccggtagcattctttttcagggaaaagagatcgatttccattcggcgaaagaagccctggaaaacggtatttcgatggtgcatcaggaattaaacctggtattacagcgttcggtcatggataacatgtggctcgggcgctatccaactaaaggcatgtttgtcgatcaggacaaaatgtaccgggataccaaggccatttttgatgagctggatattgatatcgatccgcgcgcccgcgtcggtaccttatcggtatctcagatgcagatgattgagatcgcgaaggcgttttcctatgacgccaaaatcgtcatcatggatgagccgacgtcatcgctgacggaaaaagaggtcaaccatctgtttaagatcatccgtaagctgaaagatcgcggctgcggtatcgtctatatctcgcataaaatggaagaaattttccagttgtgcgatgaaataaccatcctgcgcgacggccagtggatcgccacccagccgctggaagggctggatatggataagatcatcgccatgatggtcgggcgttcgcttaaccagcgttttccggatcgcgaaaacactccgggcgaagtgatcctccaggtgcgcaatctcacctcgctgcgccagccctccattcgcgatgtctcctttgacctgcataagggcgaaattctcggtatcgccggcctggtgggcgctaaacgcaccgacatcgtggagaccctgttcggcatccgtgagaaggccagcggcaccatcacgctgcacggcaagaagatcaacaaccacagcgccaacgaggcgattaaccacggttttgcgctggtgaccgaggagcggcgctctaccgggatttacgcctatctggatatcgggtttaactcgctgatctccaatattaagaaatataaaaacagcgtcggcttgctggataactcgcgaatgaagagcgatacccaatgggttattgactcgatgcgcgtcaaaacccccggtcagcatacgcagattggctcgctttccggtggtaaccagcaaaaggtcattataggccgctggctgctgacccagccggagatcctgatgctggatgagccaacgcgcggtatcgacgtcggcgccaagtttgaaatctatcagctgattgccgaactggctaaaaaagacaaagggatcattattatttcttccgaaatgccggaactgctggggattaccgaccgcattctggtgatgagcaacggcctggtcgcgggcattgttgagactaaaaccaccacgcaaaacgaaatactgcgtcttgcgtcattgcacctttaa

SEQ ID NO: 7661 - DNA, 1830 bp, Klebsiella pneumoniae
  CDS (1)...(1830)
atgtgtggaattgttggcgcagtcgcgcagcgtgatattgctgaaatccttctcgaaggtttacgtcgtctggaataccgtggctatgactctgccggtctggcagtggtcgacagcgaaggtcatatgacccgcgtgcgtcgcctgggtaaagttcagatgctggctcaggcggtagaagagcaaccgttacacggtggtaccgggatcgcccatactcgttgggcgacgcacggcgaaccgtctgagagcaatgcgcatccgcatgtttctgaacacattgtggtggtccataacgggatcatcgaaaaccatgagccgctgcgcgccctgctgcagtctcgcggctatgtcttcgtcactgagaccgataccgaagttattgcccatctggtgcactgggagctggaacaaggcggtaccttgcgtgaagccgtcctgcgcgctatcccgcagctgcgcggcgcttacggtacggtgatcatggatacccgtgacccgggaactctgctggcggcccgctccggtagcccgctggtaattggcctggggatgggtgaaaactttatcgcttccgaccagctggcattgctgccagttacccgccgcttcatcttcctcgaagaaggcgatatcgcggaagtgactcgccgttcggtggtgatttttgataagtccgctgcgcaagtgaagcgccaggagatcgaatccaatctgcagtatgacgctggcgataaaggtatctaccgccactatatgcagaaagagattttcgagcagccgaacgcgattaagaacaccctgaccgggcgcatcagccatggcgaagtggatctcagcgaactggggccgaacgccaatgaaatgctggctcaggttgaacatattcagatagttgcctgcgggacttcctataactccgggatggtctcccgctactggttcgaagcgttagccggcgtcccgtgcgatgtggaaatcgcctccgaattccgctatcgcaagtccgcagtgcgtcgcaatagcctgatgatcaccctctcccagtccggtgaaaccgccgataccctggcggcgctgcgtctgtcgaaagagctgggctatctcggctcgctggccatctgcaacgtgccgggctcgtcgctggtgcgcgagtccgatctggcgctgatgaccaaagccggaacggaaatcggcgtggcctcgaccaaagcctttaccactcagctaaccgtgctgttgatgctggtggcgaaactggcgcgactgaaaggtcaggatgcgtctatcgagcatgatatcgtgcacggccttcaggctctgccgaaccgtatcgagcagatgctctcccaggacaagcgtattgagcagctggcagagcgcttctctgataagcaccatgcgctgttccttggccgtggcgatcagtatccgatcgctatggaaggggcgctgaagctgaaagagatctcctacattcacgcggaagcctatgcggcgggcgagcttaagcacggcccactggcgctgattgatgcggaaatgccggtgatcgtggtggcgccgaacaacgaactgctggaaaaactgaaatccaacatcgaagaggttcgtgcccgcggcggtgaactatacgtcttcgccgacggtgaagccggcttcaacggtagcgataacatgcacatcattgagatgccgcatgtggaagagaccatcgcccctatcttctatacggttccgctgcagctgttggcttatcacgtcgcgctgatcaaaggcactgacgttgaccagccgcgtaacctggcgaaatcggtaacggttgagtaa

SEQ ID NO: 7662 - DNA, 1377 bp, Klebsiella pneumoniae
  CDS (1)...(1377)
atgagtatgtcaaatagtgcgatgagcgtggttatccttgctgcaggcaaagggacccgcatgtattccgatcttcctaaggtgcttcataccctggccgggaagccaatggtgcagcatgtcattgatgccgctaacgatttaggcgcatgtgcggtacacctggtatacggccacggcggcgatctgctgcgtcagactctgcatgaagacaacctgaactgggtgctgcaggccgagcagctcggaaccgggcacgctatgcagcaggcggcgccattcttcaatgatgatgaagacatcctgatgctctatggcgacgtgccgctgatctccgttgagacgctacagcgcctgcgcgccgcgaaaccacagggtgggattggtctgttaacggtgaagctggatgacccaaccggctatggccgcattacccgtgaaaatggccaggtgacgggcatcgttgagcacaaagatgccagcgaggcccagcgccagatccaggaaatcaacaccgggatcctgatcgccggcggagcggatctaaagcgctggctggcgaaactcaccaataacaacgctcagggtgaatactacatcaccgatatcatcgccatggcgcaccaggaaggacaccagatcgtcgcagtgcatccgcagcgcctgagcgaagtcgaaggcgtcaacaaccgcctgcagcttgcgcgcctggagcgcgtctaccaggcggagcaggcggaaaagctgctgctggcgggcgtgatgctgcgcgatccggcgcgtttcgatctgcgcggtacgctgcagcacgggcgcgatgtagagatcgatactaacgttattctggaaggcaacgtggtgctgggcgatcgagtgaaaatcggcgccggctgcgtgatcaaaaacagcaccatcggcgatgactgcgaaattagcccctacagcgtggtggaagatgcccagctgcatgcggcctgcaccatcggtccatttgcccgtctgcgcccgggcgccgaactgctggaaggcgcccacgttggtaacttcgtggaaatgaaaaaagcgcgtctcgggaaaggctccaaggcgggtcatctgacctatctgggcgatgcggagattggcgataacgtcaatatcggcgcgggcaccatcacctgcaactacgatggtgcgaacaagcataaaacgattattggcgatgatgtctttgtcggctcggatacccagctggtggccccggtcacggtaggcaacggcgtcacgatcgccgccggcaccaccgtcacgcgcaatatcgccgataacgagctggtgttgagccgcgtaccgcaggtccacaaacagggctggcagcgtccggtgaagaagaaataa

SEQ ID NO: 7663 - DNA, 1734 bp, Klebsiella pneumoniae
  CDS (1)...(1734)
atgaatcacaaggattgggattttgttaaccgccagctggtggcaaaaatgctggccgagctggagtatgagcaggttttccacgcggaatctcagggcgatggccgctactgcattaacctgccgggcgcacaatggcgcttcagcgctgaacgcggcatctggggctggctgtggattgatgctcaaacgctgcgctgcgcggacgagcccgttctggcgcaaacgctactgatgcagctaaagccggtgctgtcgatgagcgatgccaccgttgctgagcatatgcaggatttgtatgccacgctgctgggtgacctgcaactgctgaaggcacggcgcgggctgagcgccagtgacctgattgatcttgatgccgaccgcctgcaatgcctgctaagcggccatcctaaattcgcttttaataaaggtcgtcggggctggggcaaagaggcgctggagcgatatgcgccagagtacgccaacaccttcagactgcactggctggcggtaaaacgtgagcatatggtctggcgctgcgacagcgagctggatattcagcagttgttggcggccgcgatggacccgcaggagtttgcccgcttcaatcaggtctggcaggacaacgggctggataacgactggctgccactgccggtacatccgtggcagtggcagcaaaaaatctccctcgacttcatcgccgatcttgccgaaggcaggatggtttcgctcggcgagtttggcgacttgtggctcgcgcagcagtcgctgcgcaccctgaccaacgccagtcgccagggcgggctggatatcaagctgccgctgaccatctacaacacctcctgctaccgggggattccgggcaaatacatcgccgccgggccgctggcctcacgctggctgcaacaggtttttgcgaccgacgccacgcttaagcaaagcggcgcggtgatcctcggtgaaccggcggcgggctatgtgtcccatgaaggctatgccgcgcttgcccaggccccctaccgctaccaggagatgctcggcgttatctggcgtgagaatccgtgtcgctggctgaagccggacgaaagtccgattctgatggcaacactgatggagtgcgatgaaaacaatcagccgctgataggcgcatatatcgaccgctccgggctggacgctgaaacctggctcacgcagctgttccgagtggtagtggttccgctgtatcacctgctttgccgctacggcgtcgcgcttatcgcccacggacaaaatataacgctcgccatgaaaaagggcgtaccgcagcgcgtgctgttgaaagatttccagggcgatatgcggctggtgaaagatgcgttcccggaaatggactccctgcctcaggaggtgcgtgacgtcaccgctcgcctgagtgccgactacttaattcatgatttacagaccggccacttcgtgacggttctgcgctttgtttcgccactgatggctcgccttggcgtaccggagaggcgtttttatcaactgctggcagcagtgttgagtgattacatgcaggaacacccacaaatgtcagcgcgctttgcgcttttctcactcttcaagccacaaattattcgcgtagtactgaacccggtaaaactgacctggcacgaccaggacggcggcagccgcatgttgccgaattaccttgaggatctgcaaaacccgctgtggctggcaaccagggactga

SEQ ID NO: 7664 - DNA, 996 bp, Klebsiella pneumoniae
  CDS (1)...(996)
atgaaatgtctggcaattgccgatctgtttatcaatgcagcgatgatggaatcaggactgaaagcgctcagggataacgggattgaagtagaagtacgcgagtggtcacatgactccgttgagaaacttcaggaagataatctgcgggttgaacaggaaggggcagaagccgtggccttaccggaagcgctgcttcagggaacggatgatattgacatcctgatcactcagtttgcccccgtcaatactgcggtgttcgataaactaccaaagctgaaatatgtaggcgtgctccgcggtggcgtggaaaacgtgaatcttcaggtggcgaacgcccggggcgttgaggtgatgaacaccccggggcgtaacgctcgcagcgtcgccgaattcacggtcggcatgatcctggcggaaatgcgcaatatcgcccgttcacacgatgccctgcgtgacaaatactggcgtaaagacagcccgaaccatcaggcaatccctgagcttggcggaaaagtcgtggggctggttggcctcggtcatattgcccaactggtcgcgggatttctcagcggctttggcacggagattatcttttacgataagtacgttgcaggccatgaacgttatgagaaagtcgattctctggacgaactggtacaacgcgccgacgttatctcgttacatgctcgcctgacgccggaaaccgaaaatctgattaacgcacaccatttcgcgctgatgaagcgcagtgccatcattgttaacacggcacgctccgggttaatcaatgaaaaagagatgattgatgcgctcagatccgggcaaatcatgggcgccgcgcttgatacctttgatgacgagccgcttccagacgacagtgcattctatactctgaataacgtgaccattacgccgcatattgccgggagtaccattgacgcattcagtaattcgcccaaactcttcgctgagatccttttaaagaaactcagttaa

SEQ ID NO: 7665 - DNA, 543 bp, Klebsiella pneumoniae
  CDS (1)...(543)
atggcagcacgtggcgttaacaaagtcattctggttggacatctgggacaggacccggaagtgcgttacatgcccaacgggggcgcagtggccaatctgacgctggccacgtctgaaacatggcgtgacaagcagacgggagagatgcgcgaaaacaccgagtggcaccgtgttgtcatgttcggcaagctcgcggaagtggcgggcgaatacctgcgtaaaggcgcacaggcctacatcgagggccaactgcgcacccgcaactggcaggacgatgccggagtcacgcgctacgtcaccgaggtgctggtcgggcagaacggcaccctgcagatgctcggcggccgccgtgaatccggagtgcctgagagcgccgcgcagccgcagaatcctgccaccccggcacaacctgctcaggccgcagctaaatccccgaaagcgaagggcggtaagaaaggccgtcaggatgccgccccgtctcagcaaccgcctcagcctctcccgaatgatttcccaccaatggatgatgacgcgcccttttaa

SEQ ID NO: 7666 - DNA, 264 bp, Klebsiella pneumoniae
  CDS (1)...(264)
atgaaagcccatatccatcctccctatcgtacggtggtgtttcacgacaccagcgcgaatgagtattttaaagtcggctcaactatccgcaccgatcgcgtgattgaactcgatggcgaaacttttccgtatgtgacgatcgacgtctcctcgaaatcgcatccgtactacacgggcaaacaaaaaaccttcgccaatgaaggcagtgcagcccgattccgccagcgcttcggcggctttattgatgcgaaaaggaaagcatga

SEQ ID NO: 7667 - DNA, 174 bp, Klebsiella pneumoniae
  CDS (1)...(174)
atgaaaagattaaaatatctgtcaacgctgctggtcgcggccgtcgccctggtaagcgcatggttgttatggaatttctacactcagtcaccctggacccgcgacggcaaagtgcgcgccgagcaggttgggatcacccctcaggtctccggcagtattctgcagttgaacgta

SEQ ID NO: 7668 - DNA, 384 bp, Klebsiella pneumoniae
  CDS (1)...(384)
cttctgacgccgcgccgcctcgatcttgccgacgacggcgacacaaaatcggtgtcagtcattattaacaatcataacggcctgcacgtgcgtccggcgtcgaagctggtcgccgcgctggcgggctttaacgccgatttgctgctggagaaaaacgggaagtgcgtcaaaccggacagcctcaaccaaatcgcgctattgcaggtccgccgcaacgataagctgcgcctgctggcccgcggtccggatgccgacgcggcgctggcggcgtttcaggcgctggccgccgataacttcggtgaatcgcctgcggcgcaaccggcagcggctccggcaacgccgagcgcgtcgaaggcgatgccctgcgctatccgctggccctga

SEQ ID NO: 7669 - DNA, 546 bp, Klebsiella pneumoniae
  CDS (1)...(546)
gcgaccggctcgtatccctttgttccgccaatccccggtaacgatctcgcggggtgctttgtctaccgcactcttgacgatctcgaccgtatcgccgcccatgccgccgcggcgaagagcggggtggttatcggcggcgggctgctcgggctggaggcggccaacgccctgaaacagctggggctggagacgcaggtggtggagtttgccccgaacctgatggccgtccagctggataacggcggggcggcgatgctccgggagaagattgtcgccctcggcgtgggggtgcataccagcaaagcgaccaccgccatcgtgcgcgaggctgacggcctgcggctgaactttgccgacggcggcgcgttgcggaccgacatggtggtcttctcggcggggatccgcccgcaggacgcgctggcccgcggctgcgcgctgcaggtgggcgaacgcgggggaattcacatcgacggccagtgccgcacctctgacccggacgtgctggcgataggcgaaatcgccctgtgggacaataaaatttacggt

SEQ ID NO: 7670 - DNA, 198 bp, Klebsiella pneumoniae
  CDS (1)...(198)
gaaatcggcggtaactggaaacagtttaaaggtaaagccaaggaacagtggggcaaacttaccgatgatgatatgaccgtaatcgaagggaagcgcgaccagctggtcggcaaaattcaggagcgttacggctatgagaaagatcaggctgagaaagaagtctcagactgggagcataagaacgactatcgctggtag

SEQ ID NO: 7671 - DNA, 555 bp, Klebsiella pneumoniae
  CDS (1)...(555)
tattggcatgtttgtcccatttctcattatgttacgcgaagcctggaggcggcgctgattgtcagcctgatcgccagctatctgaaacgcacccagcgcggcaactggattggcgtgatgtggattggcgtgatcctcgcggcggcgctatgtcttggcttaggcatttttatcaacgaaaccaccggtgaatttcctcagcgtgaacaggagctgttcgaagggatcgtcgcggtcattgcggtggtgatcctgacgtggatggtcttctggatgcgcaatgtctcacgcaacgtcaagcagcagctggagcaggccgtggacaaggcgctgcagcgcggtaatcaccacggctgggcgctggtgatgatggtctttttcgcggtcgcccgtgaggggctggagtcggtcttctttctgttggcggccttccagcaggatgtcggcatctggccgccgctgggggcgctgctgggtctggctaccgctatcgtgctgggcttcctgatctactggggcggtatccgcttaacctgggcgtgttcttcaaatgga

SEQ ID NO: 7672 - DNA, 600 bp, Klebsiella pneumoniae
  CDS (1)...(600)
gcctacgggaacaagaccatcgccgagtcgctgaacgtgaccatccctgacggtcacttcaccgccattatcggccccaacggctgcggcaagtcgacgctattgcgcaccctcagtcgcctgatgacgcccgccagcggccacgtctggctcgacggcgcgcagatccagcagtacgccagtaaagatgttgcccgccgcatcgggctgctggcgcagaatgccaccacccctggcgatatcacggtgcaggagctggtggcccgcgggcgctatccgcaccagccgctgtttacccgctggcgcaaagaagatgaagaggcggtgaacaaggcgatgcgagcgaccgggatcagcgatctggcgctgcagagcgtcgacacgctttccggcggccagcggcatcgagcgtggattgcgatggtgctggcccaggaaacggcgattatgctgctggatgagccgaccacctggctggacatcagccatcagatcgacctgctggaactgttgagtgagctgaatcgcgagaagggctataccctggcggcggtgctgcacgattctaaccaggcctgcggctacgccacccacctgatt

SEQ ID NO: 7673 - DNA, 582 bp, Klebsiella pneumoniae
  CDS (1)...(582)
ttctggaatattgcgaaccgcttcggcagcggcgttaacggttcgtttcccggtagcccggacactgggcctggactgacagcggcaggtatcgatctgattaagcaggccaatgccttgaagatgcagatggacgtgtctcatatgaatgaaaaagcgttctgggataccgcccatcactcgacgtcaccgctggtggccacccactccaatgcccacgccctgtgcccgcagccgcgcaatctgaccgaccagcaactgcgggcgatccgcgacagcggcggcgtggtgggcgtcaatttcggcaatgctttcctgcgcgccgacggccggcgcgatagcgacacgcccttaaccaccattgtccggcatatcgactatcttattaacataatgggtgaggatcatgtggcccttggctcggattttgacggcatcaccctgccggacgagctgggcgatgtggccggcttaccgcggcttatcaatacgttgcgcgctacgggctatgatcaattggtgctggataagctgctgtggcgtaactggctacgggtattaaaaaatgtttggcaacaatag

SEQ ID NO: 7674 - DNA, 168 bp, Klebsiella pneumoniae
  CDS (1)...(168)
gtgccgctggttattcactggccgggcacgccggcgcaggagattgccaccctgaccggtaacaaagatgtgatgactacgctgatgcagcgcctgcttcacgtttcgacgccggccaatgagtactcgcagggagaagatctgttcagcgccgcgcggcgtgcgtaa

SEQ ID NO: 7675 - DNA, 1545 bp, Pseudomonas aeruginosa
  CDS (1)...(1545)
gtgtccgtggaactttggcagcagtgcgtggatcttctccgcgatgagctgccgtcccaacaattcaacacctggatccgtcccttgcaggtcgaagccgaaggcgacgaattgcgtgtgtatgcacccaaccgtttcgtcctcgattgggtgaacgagaaatacctcggtcggcttctggaactgctcggtgaacgcggcgagggtcagttgcccgcgctttccttattaataggcagcaagcgtagccgtacgccgcgcgccgccatcgtcccatcgcagacccacgtggctcccccgcctccggttgctccgccgccggcgccagtgcagccggtatcggccgcgcccgtggtagtgccacgtgaagagctgccgccagtgacgacggctcccagcgtgtcgagcgatccctacgagccggaagaacccagcatcgatccgctggccgccgccatgccggctggagcagcgcctgcggtgcgcaccgagcgcaacgtccaggtcgaaggtgcgctgaagcacaccagctatctcaaccgtaccttcaccttcgagaacttcgtcgagggcaagtccaaccagttggcccgcgccgccgcctggcaggtggcggacaacctcaagcacggctacaacccgctgttcctctacggtggcgtcggtctgggcaagacccacctgatgcatgcggtgggcaaccacctgctgaagaagaacccgaacgccaaggtggtctacctgcattcggaacgtttcgtcgcggacatggtgaaggccttgcagctcaacgccatcaacgaattcaagcgcttctaccgctcggtggacgcactgttgatcgacgacatccagttcttcgcccgtaaggagcgctcccaggaggagttcttccacaccttcaatgcccttctcgaaggcggccagcaggtgatcctcaccagcgaccgctatccgaaggaaatcgaaggcctggaagagcggctgaaatcccgcttcggctggggcctgacggtggccgtcgagccgccggaactggaaacccgggtggcgatcctgatgaagaaggccgagcaggcgaagatcgagctgccgcacgatgcggccttcttcatcgcccagcgcatccgttccaacgtgcgtgaactggaaggtgcgctgaagcgggtgatcgcccactcgcacttcatgggccggccgatcaccatcgagctgattcgcgagtcgctgaaggacctgttggcccttcaggacaagctggtcagcatcgacaacatccagcgcaccgtcgccgagtactacaagatcaagatatccgatctgttgtccaagcggcgttcgcgctcggtggcgcgcccgcgccaggtggccatggcgctctccaaggagctgaccaaccacagcctgccggagatcggcgtggccttcggcggtcgggatcacaccacggtgttgcacgcctgtcgtaagatcgctcaacttagggaatccgacgcggatatccgcgaggactacaagaacctgctgcgtaccctgacaacctga

SEQ ID NO: 7676 - DNA, 1104 bp, Pseudomonas aeruginosa
  CDS (1)...(1104)
atgcatttcaccattcaacgcgaagccctgttgaaaccgctgcaactggtcgccggcgtcgtggaacgccgccagacattgccggttctctccaacgtcctgctggtggtcgaaggccagcaactgtcgctgaccggcaccgacctcgaagtcgagctggttggtcgcgtggtactggaagatgccgccgaacccggcgagatcaccgtaccggcgcgcaagctgatggacatctgcaagagcctgccgaacgacgtgctgatcgacatccgtgtcgaagagcagaaacttctggtgaaggccgggcgtagccgcttcaccctgtccaccctgccggccaacgatttccccaccgtagaggaaggtcccggctcgctgaacttcagcattgcccagagcaagctgcgtcgcctgatcgaccgcaccagcttcgccatggcccagcaggacgtgcgttactacctcaacggcatgctgctggaagtgaacggcggcaccctgcgctccgtcgccaccgacggccaccgactggccatgtgctcgctggatgcgcagatcccgtcgcaggaccgccaccaggtgatcgtgccgcgcaaaggcatcctcgaactggctcgtctgctcaccgagcaggacggcgaagtcggcatcgtcctgggccagcaccatatccgtgccaccactggcgaattcaccttcacttcgaagctggtggacggcaagttcccggactacgagcgtgtactgccgcgcggtggcgacaagctggtggtcggtgaccgccagcaactgcgcgaagccttcagccgtaccgcgatcctctccaacgagaagtaccgcggcattcgcctgcagctttccaacggtttgctgaaaatccaggcgaacaacccggagcaggaagaggccgaggaagaagtgcaggtcgagtacaacggcggcaacctggagataggcttcaacgtcagttacctgctcgacgtgctgggtgtgatcggtaccgagcaggtccgcttcatcctttccgattccaacagcagcgccctggtccacgaggccgacaatgacgattctgcctatgtcgtcatgccgatgcgcctctaa

SEQ ID NO: 7677 - DNA, 2421 bp, Pseudomonas aeruginosa
  CDS (1)...(2421)
atgagcgagaacaacacgtacgactcttccagcatcaaggtgctgaaggggctggatgccgtacgcaagcgccccggcatgtacatcggcgacaccgacgatggcaccggtctgcaccacatggtgttcgaggtggtggataactccatcgacgaagcgctggccggttactgcagcgaaatcagcatcaccatccatacggatgagtcgatcactgtccgcgacaatggacgcggtattccggtggatatccacaaggaagaaggggtttctgcggcggaagtgatcatgaccgtcctccacgccggcggcaagttcgacgacaacacctacaaggtgtccggcggcttgcacggtgtgggcgtctcggtggtgaacgcgctgtcccatgaactacgcctgaccatccgtcgccacaacaaggtctgggaacaggtctaccaccacggcgttccgcagttcccactgcgcgaagtgggcgagaccgatggctccggcaccgaagttcacttcaagccgtccccggagaccttcagcaacatccacttcagttgggacatcctggccaagcgcatccgcgagctgtccttcctcaactccggcgtcggcatcctgctgcgcgacgagcgtaccggcaaggaggagctgttcaagtacgaaggcggtctgaaggccttcgtcgagtacctgaacaccaacaagaccgcggtgaacgaggtattccacttcaacgtccagcgtgaagaggacggcgtgggtgtggaagtcgccttgcagtggaacgacagcttcaacgagaacctgctctgcttcaccaacaacatcccgcagcgtgacggcggcacccacctggccggtttccgttcggcgctgacgcgtaacctgaacaactacatcgaggccgaaggcctggcgaagaagttcaagatcgccaccaccggcgacgatgcccgcgaaggcctcaccgcgatcatctcggtgaaggtaccggacccgaagttcagctcgcagaccaaggacaagctggtctcctccgaggtgaagactgcggtggaacaggagatgggcaagtacttcgccgacttcctgctggagaatcccaacgaagccaaggccgtggtcggcaagatgatcgacgccgcccgtgcccgcgaggccgcgcgcaaggcgcgcgagatgacccgccgcaagggcgcgctggacatcgccggcctgcccggcaaactggccgattgccaggaaaaggacccggcgctctccgaactgtacatcgtggagggtgactccgcgggcggttccgccaagcagggccgcaatcgccggacccaggcgatcctgccgctcaagggcaagatcctcaacgtcgaaaaggcgcgcttcgacaagatgctctcctcccaggaggtcggtacgctgatcaccgccctgggctgtggcatcggccgcgaggaatacaacatcgacaagctgcgctaccacaacatcatcatcatgaccgatgctgacgtcgacggttcgcacatccgcaccctgctgttgaccttcttcttccgccagatgcccgagctgatcgagcgtggctacatctacatcgcccagcccccgttgtacaaggtcaagcgcggcaagcaggagcagtacatcaaggacgaccaggccatggaagagtacatgacccagtcggccctggaagacgccagcctgcacgtcaacgagcacgctccgggcctgtccggggcggcgctggagaaactggtcaacgagtatcgcggggtgatcgccaccctcaagcgcctgtcgcgcctgtacccccaggagctgaccgagcacttcatctacctgcctaccgtgtcggtggacgacctggctaacgagtcggccatgcagggctggttggagaagttccaggcgcgcctgaccgccgccgagaagtccggcctgacctacaaggccagcctgcgcgaagaccgcgagcgccacctgtggctgcccgaggtggaactggtggcccacggcctgtccagctacgtcaccttcaaccgtgacttcttcgccagcaatgactaccgctcggtgtcgctgctcggcgaccagctgaacagcctgctggaagacggcgcctacgtgcagaagggtgagcgcaagcgcccgatcagcgccttcaaggacggcctggactggctgatggccgaaggtaccaagcgccacagcatccagcgatacaaggggctgggcgagatgaaccctgagcagctgtgggaaaccaccatggatccgaacgtccggcgcatgctcaaggtgaccatcgaggatgccatcgccgccgaccagatcttcaacaccctgatgggcgatgccgtggagccgcgccgcgacttcatcgaaagcaacgcgctggcggtgtcgaacctggacgtgtga

SEQ ID NO: 7678 - DNA, 948 bp, Pseudomonas aeruginosa
  CDS (1)...(948)
gtgagccagactacgcccgccgtgcgcaccttccaagacctgattctcgccctgcagaactactgggcagagcagggctgcgtggtgctgcagccctacgacatggaagtgggcgccggcaccttccacaccgccaccttcctccgcgccatcggcccggagacctggaacgccgcctacgtccagccgagccgccgccccaccgacggtcgctacggcgagaaccccaaccgcctgcagcactactaccagtttcaggtggtcctgaagccgaacccggagaacttccaggagctgtacctcggctcgctgaaagccatcggcatcgacccgctggtccacgacatccgcttcgtcgaggacaactgggagtcgccgaccctcggcgcctggggcctgggttgggaaatctggctgaacggcatggaagtcacccagttcacctacttccagcaggtcggcggcatcgagtgctatccggtcaccggcgagatcacctacggcctggagcgcctggccatgtacctgcagggcgtggactcggtctacgacctggtctggaccgacggcccgttcggcaaggtcacctatggcgacgtgttccaccagaacgaggtggagcaatccactttcaacttcgagcacgccaacgtgccgaagctgttcgaactgttcgacttctacgaaagcgaagccaaccgcctgatcgcgctggagctgccgttgccgacctacgagatggtcctcaaggcttcgcataccttcaacctgctggatgcgcggcgcgccatctcggtcaccgagcgccagcgctacatccttcgcgtgcgtaccctggcccgcgccgtggcgcagagctacctgcaggcccgcgcgcgcctcggcttccccatggccacccccgaattgcgtgacgaagtactggccaagctgaaggaggccgaatga

SEQ ID NO: 7679 - DNA, 564 bp, Pseudomonas aeruginosa
  CDS (1)...(564)
atgtccctgatcaacactcaagtccaaccgttcaaggtcaacgctttccacaacggcaagttcatcgaggtgaccgaggaatccctgaagggcaagtggtcggtcctgatcttcatgccggctgccttcaccttcaactgcccgaccgagatcgaagacgccgccaacaactacggcgagttccagaaagccggtgccgaggtctacatcgtgaccaccgacacccacttctcgcacaaggtctggcacgaaacctccccggcagtcggcaaggcccagttcccgctgatcggcgacccgacccaccagctgaccaacgccttcggcgtgcacatcccggaagaaggcctggccctgcgcggtaccttcgtgatcaacccggaaggcgtgatcaagaccgtcgagatccactccaacgagatcgcccgtgacgtcggcgagaccgtgcgcaagctgaaggccgcccagtacaccgccgcccacccgggcgaagtctgcccggccaagtggaaggaaggcgagaagaccctcgctccgtccctggacctggtcggcaagatctaa

SEQ ID NO: 7680 - DNA, 1503 bp, Pseudomonas aeruginosa
  CDS (1)...(1503)
gtgcagatcggtgtccccctcgagacccatgccggtgagacgcgggtttccgccaccccggaaaccgtcaagaagctgatcggccaaggccaccaggtgatcgtccagagcggcgccggcgtcagcgccagccagccggacagtgcctatgaagccgccggcgcgacgatcggcagcgccgccgaggccttcggcgccgacctggtgctgaaggtggtcgcgcccagcgccgccgagctggcccagatgaaaagcggcgccgtgctggtcggcatgctcaaccccttcgacaacgagaacatcgcccgcatggccgagcgcggcatcaccgccttcgccctcgaggccgcgccgcgtacctcgcgggcgcagagcctggacgtgctctcctcgcaggccaacatcgccggctacaaggcggtgatgctcgccgccaaccactacccgcgcttcatgccgatgctgatgaccgccgccggcaccgtgaaggccgcccgcgtgctgatcctcggcgccggcgtcgccggcctgcaggcgatcgccacggccaagcgcctgggcgcggtgatcgaggcttccgacgtgcgtccggcggtgaaggagcagatcgagtcgctcggcgccaagttcgtcgacgtgccctacgagaccgacgaagagcgcgagtgcgccgaaggcgtcggcggctacgcgcggccgatgccggcctcgtggatggagcgccaggccaaggccgtgcacgagcgcgccaagcagtcggacatcgtcatcaccaccgcgctgatccccggccgcaaggcgccgacgctgctgcacgaggcgaccgtggcggagatgaagccgggctcggtggtcatcgacctggccgccgcccagggcggcaactgcccgctgaccgaggccgaccaggtcgtggtccggcacggcgtgaccatcgtcggccacagcaacctggccgcgctggtaccggcggacgcctcggcgctatacgcgcgcaacatcctcgatttcctcaagctcaccctgaacgccgaaggcttcagcgtgaacctcgaggacgacatcgtcgccgcctgcctgatgtgccgcgacggccaggcggtgcgcaagaacggctgagccgctgcgtcgggaagcttcgataacgataaatgcgcacgcctcgcgcctgcgccctgaagaccggtgaaaacgatggatatcatttctgacgggatctacaacctgatcatcttcgtgctggccgtgtacgtcggctaccacgtggtatggaacgtcacccctgccttgcacaccccgctgatggcggtgaccaacgcgatttccgcgatcgtcatcgtcggcgccatgctcgccgccgccctgaccgtgaccccgctgggcaaggccatgggcaccctcgccgtggccctggccgcggtcaatgtgttcggtggcttcctggtcacccggcgcatgctggaaatgttcaagaagaaagcgccgaaggcggggggccactga

SEQ ID NO: 7681 - DNA, 855 bp, Pseudomonas aeruginosa
  CDS (1)...(855)
atgagcgcgccgcgatcggttctcgccggcctgatcggtgccggcatccaggcgtcgcggacccctgccctgcacgagcgcgagggcgacgcccagggcatccgctatctgtaccggctgatcgatctcgacccgctgggcaagtcggcggacgacctggagttcctgctcgccgccgccagcgacctcggcttcaccgggctgaacgtcaccttcccctgcaagcaggcgatcatccccctgctcgacgacctctccgccgaggcacgcggcatcggcgcggtgaacaccgtggtgctgcgcgatggccggcgcatcggccacaacaccgactgcctgggcttcgccgagggctttcggcgcggcctggccgacgcgccgcgccagcgcgtggtgcagatgggcgcgggcggcgccggcgcggcagtggcccatgcgctgctcgccgagggcgtcgagcggctggtcctgttcgacgtcgacccggcgcgggcccaggccctcgcggacaacctcaaccagcacttcggcgcgccacgagcgctcgccggcagcgacctggccggcgccctgggcgacgcccagggattggtcaacaccaccccggtgggcatggccaagctacccggcatgccggtgccggcggaactgttgcgcgccgacctgtgggtcgccgaggtgatctactttccgctggaaaccgagctgctgcgccaggcccgcgccctcggctgccgcacactggacggcggcaccatggcggtgttccaggcggtgaaggcattcgaactgttcagcggggtgacggccgacgccgcgcgcatgcaggcgcacttcgccagcctgggcgactga

SEQ ID NO: 7682 - DNA, 507 bp, Pseudomonas aeruginosa
  CDS (1)...(507)
atggcacgaccgctggcgatgatcgccgcccttggcgagaaccgcgcgatcggcatcgacaaccgcctgccctggcgcctgccggccgacctcaagcatttcaaggcgatgaccctcggcaagccggtgatcatggggcgcaagacctgggactcgctgggtcggccgctgccgggccggctaaacctggtggtcagccgccaggccggcctggcactggagggtgcggaagtgttcgccagcctggacgccgcgctggcgcgcgccgaggcgtgggcgcaggcggaggacgccgacgaactgatgctgatcggcggcgcccagctctatgccgaggccttgccgcgcgccgcgcgtctctacctgacccgggttggcctggcgccggagggcgacgcctttttccccgagatcgatggtgcggcctggcgcctggcgtcgagcatcgaacacgccgcggctgacgatgcgcctgcctacgccttcgaggtatgggagcgccgctga

SEQ ID NO: 7683 - DNA, 1197 bp, Pseudomonas aeruginosa
  CDS (1)...(1197)
atgaccctgcccagcttgcgtctcaaagccaacgccgagcgccgcctgcgcgccggccacctgtgggtctacagcaacgaggtggatgtcgccgcgacgccgctgaatgccttcgccgccggcgaccaggcggtgctggaaatggccaacggcaagccgctgggcatcgtcgcgctgagcccgaacaatctcatctgcggccgcctcatttcccgtgataccaagcacgttctcgacaaatcgctgctggttcatcgcatcaacatcgccctcagcctgcgcgagcggcttttcgacaagccgttctaccggctggtctacggcgattccgacctgctgcccggcctggtggtcgatcgctttggcgacgtgctggtggtgcaactggcgtccgcagccatggaactgcgcaaggacgaggtgctcgccgccctgctgcaggtgctcaagcccgccgccgtgctctggaagaacgactccagcgcgcgcgacgccgagggcctggagcgctacgtggccaatgcctacggcgaagtgccggagtgggtcgccctggaagagaacggcgtgaagttcgaggcgccggtgctggccgggcagaagaccggctggttctacgaccaccgcatgaaccgcgcgcgcctggcgccctacgtgcagggcaagcgggtcctcgacctgttcagctatatcggtggctggggcatccaggccgccgccttcggcgccagcgaagtgatgtgcgtggacgcgtccgccttcgccctcgacggcgtcgagcgcaacgcggcgctgaacggcgtggcggagaaggtcgcctgcgtcgagggcgacgtgttcgaggccctgcgcgagctgaaggccgccgacgaacgcttcgacgtagtgatcgccgacccgccggccttcatcaagcgcaagaaggacctgaagaacggcgaggccgcctaccgccgtctcaacgaacaggccatgcgcctgctgagcaaggacggcatcctggtcagcgcctcctgctcgatgcacctgcccgaggacgacctgcagaacatcctgatcggcagcgcccgccatctcgaccgcaacatccagctgctcgagcgcggcggccagggccccgaccatccggtgcacctggcgatcgcggaaacccgctacatcaagagcctgacctgccggctgctgcccaacggctga

SEQ ID NO: 7684 - DNA, 1368 bp, Pseudomonas aeruginosa
  CDS (1)...(1368)
atgtttggttccaacgacgacaagaaggccccgcagggcggggaaaagaaaggtctgttcggctggtggcggaaaaagccgcaagccggcgagcagcctgccgatcagcctgtcgagccggtctccgagacagcggccgccgagcagcgcgcgcctgccgatgacgtggcgcaatccctgacagaacagccaggtcggcagcagccctccgctgccgagccggccgagccgccggcgccggttgccgaagcgccgctcgccggtgacgagccagcgtcggccgaggagcattcgccccgccccgaggcgcccgtcgcacaacccgagcctatcctcgctgccgagcccgagcccgagcccgagcccgagcccgagcccgagcccgagcccgttgcgccgctggccgccgctccggcagtcagcgagccggcgaccaggccgggcttcttcgcccgcctccggcagggactgtccaagaccagcgccagcatcggcgaaggcatggccagcctgttcctcggccgcaaggaaatcgacgacgacctgctcgacgacatcgagacgcgcctgctgaccgccgacgtcggcgtcgaggccaccaccctgatcgtgcagaacctgaccaagcgcgtggcgcgcaaggagctggccgacagcggcgcgctgtacaaggcgctgcaggaagagctggccagcctgctgcgcccggtggagcagccgttgcaggtcgacgtcgcgcgcgagccctatgtgatcctggtggtcggggtgaacggcgtgggcaagaccaccaccatcggcaagctggcgaagaagctgcaactcgagggcaagaaggtcatgctggccgccggcgacaccttccgcgccgccgccgtggagcagttgcaggtctggggcgagcgcaaccgcatcccggtgatcgcccagcacaccggcgccgactccgcctcggtgatcttcgacgcggtgcaggccgccaaggcccgcggcatcgacgtgctgatcgccgataccgccggacgcctgcataccaaggacaacctgatggaggagctgaagaaggtgcgccgggtgatcggcaagctggacgagacggcgccccatgaggtcctgctggtgctcgacgccggcaccgggcagaacgccatcaaccaggccaagcagttcaacctcgcggtggagctgaccggcctggccctgaccaaactggacggcaccgccaagggcggggtgatcttcgccctggccaagcagttcggcctgccgatccgctatatcggtgtcggcgaggggatcgacgatctccgtaccttcgaggccgacgccttcgtccaggcactcttcgcagagcgggagaacgcatga

SEQ ID NO: 7685 - DNA, 594 bp, Pseudomonas aeruginosa
  CDS (1)...(594)
atgatcaagctcgaacagctggtgctggccagccacaatgccggcaaactcaaggaactccaggccatgctcggcgccagcgtgaaggtgcgctcgatcggcgagttcagccaggtggaaccggaggaaaccggtctttccttcgtcgagaacgccatcctcaaggcacgcaacgccgcacgcctctccggcctgccggcgctggccgacgactccgggctggcggtggacttcctcggcggcgcgccgggcatctactcggcgcgctatgccgacggccggggcgacgcggcgaacaacgccaagctgctggaggccatgaaggatgtcccggacgccgagcgcggcgcacagttcgtcagcgtgctggcgctggtgcgccacgccgacgacccgctgccgatcctctgcgagggcatctgggaaggccgcatcctccgcgaagcccgcggcgcccacggcttcggctacgacccgctgttctgggtgccggaacgcgactgctccagcgccgagctggcgcccgaggagaagaaccgcctcagccaccgagcccgcgccatggccctgctcaagcagcgcctgggtctctga

SEQ ID NO: 7686 - DNA, 693 bp, Pseudomonas aeruginosa
  CDS (1)...(693)
atgtccacgatagcagagaatattgcaaaggttgccgcgcgcatccgtgaggcagcgcaagctgcggggcgcgatccggccacggtcggcctgctcgccgtgagcaagaccaagcccgccgccgcggtgcgcgaggcgcacgccgccggccttcgcgacttcggcgaaaactacctgcaggaggccctcggcaagcaggccgaactggccgacctgcccttgaactggcacttcatcggccccatccagtcgaacaagacgcggcccatcgccgagcatttccagtgggtgcactcggtggaccggttgaagatcgcgcagcgcctgtcggagcaacgcccggccgggctgccgcccctgaatgtctgcctgcaggtcaacgtcagcggcgaagccagcaagtccggctgcgcccccgaggacctgccggccctggccgaggccgtgaagcaactgcccaacctccgattgcgtggcctgatggccatccccgaacccaccgccgaacgcgccgcgcaacacgccgcgttcgcccgcctgcgcgaactgctgctggacctgaaccttggcctggacaccctgtccatgggcatgagcgacgacctcgaggcagccatcggcgaaggtgcgacctgggtccgcatcggtaccgccctgttcggcgcccgcgactacggcgcgccggcttcttga

SEQ ID NO: 7687 - DNA, 1185 bp, Pseudomonas aeruginosa
  CDS (1)...(1185)
atgagccagcacgaccagcatcccgacgccccggcccaggcctttgcgacccgggtcatccacgccgggcaggcccccgatccctcgaccggcgcgatcatgccgccgatctacgccaactccacctatatccaggaaagccccggggtacacaaggggctcgactacggccgctcccacaacccgacccgctgggccctggagcgctgcgtggccgacctcgagggcggcacccaggccttcgccttcgcctccggcctggcggcgatctcctcggtgctggagctgctcgacgccggttcccacatcgtttccggcaatgacctctacggcggtaccttccgcctgttcgagcgggtccgccggcgcagcgccgggcatcgcttcagcttcgtcgacccgaccgacctgcaggccttcgaggccgcgctgaccccggaaacccgcatggtctgggtggaaaccccgagcaacccgctgctgcgcctcaccgacctgcgcgccatcgcccagctctgccgcgcccgcggcatcatcagcgtggccgacaacaccttcgccagcccctacatccagcgccccctggagctgggcttcgacgtggtggtgcactccaccaccaagtacctgaacggccattccgacgtgatcggcggcatcgccatcgtcggcgacaacccggacctgcgcgagcgcctgggcttcctgcagaactcggtgggcgccatctccgggccgttcgacgccttcctcaccctgcgcggggtgaagaccctggcgctgcgcatggagcgccattgcagtaacgccctggccctggcccagtggctggagcgccagccgcaagtggcgcgggtctactaccccggcctggcttcgcacccgcagcatgagctggcgaaacggcagatgcgtggcttcggcgggatgatctccctcgacctgcgttgcgacctggccggcgcccggcgcttcctggagaacgtgcggatcttctccctggcggagagcctgggcggggtggaaagcctgatcgagcatccggcgatcatgacccacgccagcatcccggcggaaacccgcgccgacctgggcattggtgactcgctgatccgcctgtcggtgggcgtcgaggcgctggaggacctgcaggccgacctggcgcaggcgctggcgaagatctga

SEQ ID NO: 7688 - DNA, 435 bp, Pseudomonas aeruginosa
  CDS (1)...(435)
atggccagcgacaagccgctgcgcctgctgctgggcttcgactacggcacccggcagatcggcgtcgccgtcggccaggcggtgaccggccaggcccgcgagctgtgcgtattgaaggcgcagaacggcgtgccggactggaaccgggtggaagcgctgatcaaggaatggcagccggacgccatcgtcgtcggcctgccgctgaacatggacggcagcccaagcgagatgagcgagcgcgcggaaaagttcggccgccgcctcaacggccgtttcaacctgccggtctttacccacgacgaacgcctcacgacctacgccgccaagggcgagcgcctggcccagggccagcgcgacggctaccgcgagcgaccggtggacgccctggccgccgccctgctgctggaaggctggctggccgaacacccggattga

SEQ ID NO: 7689 - DNA, 1404 bp, Pseudomonas aeruginosa
  CDS (1)...(1404)
atgggccttaacgccgactggatgcagcgcgacctgaacgtactctggcatccctgtacccagatgaaagaccacgaacgcctgccggtgatcccgatccgccgcggcgaaggcgtctggctggaggatttcgaaggcaagcgctacatcgacgcggtcagttcctggtgggtcaatgtgttcggtcacgccaacccgcgcatcaaccagcgcatcaaggaccaggtcgaccagttggagcacgtgatcctcgccggattcagccaccagccggtgatcgagctgtcggagcgactggtgaaaatcaccccgccggggctcgaccgggtgttctacgccgacagcggctcggcgggcatcgaggtcgcgctgaagatgagctaccacttctggctcaatagcggcaggccgcgcaagaagcgcttcgtcaccctgaccaacagctaccacggcgaaaccatcgcggcgatgtcggtgggcgacgtggcgctgttcaccgaaacctacaagtcgctgctgctggacaccatcaaggtgcccagcccggactgctttctgcgtccggacggcatgtgctgggaagaacattcgcggaacatgttcgcccacatggagcgcaccctggccgaagggcacgacgagatcgccgcggtcatcgtcgaaccgctgatccagggcgccggcggcatgcgcatgtaccatccggtctacctcaagctgctgcgcgaagcctgcgaccgctatggcgtgcacctgatccacgacgagatcgcggtgggcttcggccgcaccgggacgatgttcgcctgcgagcaggccggcatcgccccggatttcctctgcctgtccaaggccctcaccggcggctacctgccgatgtccgcggtgctgaccagcgagaccatctaccggggcttctacgacgactaccagaccctgcgcgccttcctccactcgcacacctataccggcaacccgctggcctgcgccgccgccctggcgaccctggacatcttcgaggaagacaaggtgatcgaggccaaccgcgcgctgtccacccacatggccagggccaccgcgcacctggccgaccacccgcatgtcgccgaggtgcgccagaccgggatggtcctggccatcgaaatggtccaggacaaggcgtccaggacgccctacccctggcaggagcgccgcggcctgaaggtcttccagcatggcctggagcgcggcgcgctgctgcgcccgctgggcagcgtggtgtatttcctgccgccctacgtgattaccccggagcagatcgacttcctcgccgaggtggccagcgaaggcatcgacatcgccacccgcgacgcggtcagcgtggcggtcagcgacttccacccggaccaccgcgatccgggctga

SEQ ID NO: 7690 - DNA, 2553 bp, Pseudomonas aeruginosa
  CDS (1)...(2553)
gtggacatcgccgaatacttcagcaagcagaccaccgagtacctgcaacgcgccgcgcaggtcgccgccgaattcggcaagcgcgaagtggacaccgagcacctgctctacgccctggccgacgccgacgtggtgcaggcggtgctcaagcagttcggcctgtcgccggccgacctcaagcagtacatcgaggccaacgccgtgcgcggcgccagcaagggcgaggcgagcgaggacatgaccatctcgccgcgggtgaagagcgccttgcagcatgccttcgccctgtcccgcgaactcggccacagctatgtcggccccgagcacctgttgctcggcctggcggcggtgccggacagcttcgccgggacgctcctgaagaagtacggcctgaccgagcaggcgctacggcagaaagcggtcaaggtggtcggcaagggcgccgaggacggccgcgtggacggcccgagcaacactccgcaactggacaagttcagccgcgacctgacccggctggcccgcgaaggcaagctcgatccggtgatcggccgctcgaaggaagtcgagaccaccatcgaggttctcgcccggcgcaagaagaacaacccggtgctgatcggcgagcccggcgtcggcaagaccgccatcgtcgaaggcctggcccagcgcatggtccagggcgaggtgccggaggtgctgcgcgacaagcgcctggtcgaactgaacatcaacgccatggtcgccggcgccaagtaccgcggcgagttcgaggaacgcctcaagcaggtgatggacgaactgcaggcggcgcagagcgagatcatcctgttcatcgacgaggtgcacaccatcgtcggtgccggccagggcggcggcgaaggcgggctggacgtggccaacgtgctgaagccggcgatggcgcgtggcgagatgaacctgatcggcgccaccaccctcaacgagtaccagaagtacatcgagaaggacgccgcgctggagcggcgcttccagccggtgttcgtccccgagccgacggtggagcagaccatctccatcctccgtggcctgcgcgacaagctcgaaggccaccacaaggtgaccatccgcgacgaggccttcgtcgccgccgccgagctgtccgaccgctacatcggcaaccgtttcctgccggacaaggccatcgacctgatcgaccaggccgccgcccgcgtgcgcatcgccagcacctcgcggccggccgagatccaggaactggaggccgagctggcgcagctcaagcgcgagcaggactacgccgccagccgcaagtggtacgacgaggcgaaggtcttcgagaaacgcatccaggaacgcaaggaacacctcgagcagatcaccgagcgctggcagcagacccaggggtcgaagaccgaggaggtgcgggtcgaggacatcgccgagatcatctccaagctcaccggcatcccggtcaccgaactgaccgccgaggagcgcgagaagctcctgcagatggaagagcgcctgcaccagcgggtgatcggccagcaggaagcgatcaccgcggtcagcgacgccgtgcgcctggcccgcgccgggctgcgccagggcagccggccgatcgccaccttcctgttcctcggcccgaccggggtgggcaagaccgagctggccaaggccttggccgaggtggtgttcggcgacgaagacgcgatgatccgcatcgacatgagcgaatacatggagcgccacgcggtgtcccggctgatcggtgcgccgccgggctacgtcggctacgacgagggcggccagctcaccgagcgggtgcgccggcggccgtacagcgtgatcctgctcgacgagatcgagaaggcccacgccgacgtcaacaacatcctcctgcaggtgttcgacgacggccgcctgaccgacggcaaggggcgcgtggtggacttcaccaacaccatcatcatcgccaccagcaacctcggctccgagctgatcatgaagaacgcccaggccggcgagttcgcccagccgccggagaagctcaagcgcgaactgatgactaccctgcgcgggcatttccgcccggaattcctcaaccgcctcgacgaggtgatcgtcttcgaatcgttgagcaaggcgcagatcgaggacatcgtgcgcctgcaactggagcgggtgaagcgcgccgcgcacgcccaggacatctacctgcacatcgacgacagcctggtcggccacctcgccgaagaggcctaccagccggagttcggcgcccgcgaactgaagcggcagatccgccagcaactggagacgcgcctggccacggcgatgctcaagggcgaggtgaaggagggcgagacggtcaccttcttctacgacgccaaggacggcgtcggctaccgcaagggcgccgcgccgaatccggcggcacgcaagaagtccggtgccggcgagacgcccaggggccgcgcgacggcggcgaggaagccggcggcgaagaaaggcgccgccgccaagggcaaggccgacaagccgaaggccaagtga

SEQ ID NO: 7691 - DNA, 1059 bp, Pseudomonas aeruginosa
  CDS (1)...(1059)
atgagtgcaaccgcttccgtcgccacccgtcacgactggtccctcgccgaagtccgtgccctgttcgagcaaccgttcaacgacctgctgttccaggcgcagacggtgcatcgcgcgcacttcgacccgaaccgcgtgcaggtctcgacgctgctgtcgatcaagaccggcgcctgccccgaggactgcaagtactgcccgcagtccggccactacaacaccggcctggacaaggagaagctgatggaggtgcagaaggtcctcgaggcggcggccgaggccaaggccatcggttcgacccgcttctgcatgggcgctgcctggaagcacccgtcggccaaggacatgccctacgtcctggagatggtcaagggcgtgaagaagctcggcctggagacctgcatgaccctcggtcgcctgacccaggaacagacccaggcgctggcggacgccggcctcgactactacaaccacaacctggatacctcgccggagttctacggcaacatcatcaccacccgcacctacagcgagcgcctgcagaccctggcctacgtgcgcgaggcggggatgaagatctgctccggcggcatcctcggcatgggcgagtcggtggacgaccgcgccggcctgctgatccaactggcgaacctgccggagcacccggagtcggtgccgatcaacatgctggtgaaggtcaagggcacgcccctggcggaagagaaggacgtcgatcccttcgacttcatccgcaccctggcggtggcccggatcatgatgccgaagtcccacgtgcgcctgtccgccggccgcgagcagatgaacgagcagatgcaggcgctggccttcatggccggggccaactcgatcttctacggcgaaaagctgctgaccacgaagaacccgcaggccgaaaaggacatgcagttgttcgcccgtctcggcatcaagccggaagagcgcgaagagcacgccgacgaagtgcaccaggccgccatcgagcaggcgttggtggaacaacgcgaatcgaagctgttctataacgccgcttccgcctga

SEQ ID NO: 7692 - DNA, 1206 bp, Pseudomonas aeruginosa
  CDS (1)...(1206)
atgtccttcgatctcgcttcccgcctcgccagccggcgcgcggaagacctctaccgccagcggccgctgctggagtcggcccagggcccggacgtcgtggtcgacggccagccgctgctggccttctgttccaacgactacctcggcctggccaaccatcccgaggtgatcgccgcgctgcgcgccggcgccgagcgctggggcgtgggcggtggcgcctcgcacctggtggtcggccacagcggcccgcaccacgaactggagctggccctcgccgaattcaccgggcggccgcgcgcgctgctgttctccaccggctacatggccaatctcggcgcggtggccgcgctggtcggcaagggcgacacggtgctggaggaccgcctcaaccacgcttcgctgctggatgccggattgctctccggcgcgcgtttctcgcgctacctgcacaacgacccggcaagcctcgccgcgcgcctggacaaggccgagggcaataccctggtggtcaccgacggggtcttcagcatggacggcaatctcgccgacctgccggccctggccgccgtcgcgcaggcccgcggcgcctggctgatggtcgacgacgcgcatggcttcggcccgctgggcgccagcggcggcgggatcgtcgaacacttcggcctcggccaggagcaggtgccggtgctgatcggcaccctcggcaagggtttcggtaccgccggcgccttcgtagcgggcagcgaggaactgatcgagaccctgatccagtacgcccggccctacatctacaccaccagccagccgccagcggtggcctgcgccaccctgaagagcctggagctgctgcgccgcgaaagctggcggcggcaacacctggcggcgctgatcgcccgtttccgccatggcgccgaggcgcttggcctgaccctgatggacagcttcacgccgatccagccgatcctggtcggcggcagccgccaggccgtggccctggccggcatgcttcgagcccgtggcatcatggtcggcgcgatccgcccgccaaccgtgccggccaacagcgcgcggctgcgcgtcacgctgtccgccgcgcacagcgaagcgcaggtcgaccgcttgctcgaagccctcggcgaaagctggcgacagctgtcgtctagccttctggcagagatcgaagccgaggagggagacgatgcgtga

SEQ ID NO: 7693 - DNA, 969 bp, Pseudomonas aeruginosa
  CDS (1)...(969)
atgcgtacgctgatccgcctggttcgcacgcttatcctgctgctggtcctggcgctgctcgccggcgcctggtggtggttgcaggacgaggccctgcgcccccccgcgctggccggccacagcgaggactcgagtctgaaggtcgcgggcctgcgccggcattacctgctctacgtgccgccgggcgtgtccgagggagcgccgttgctggtggtgctgcacggctcacggggcgacggcgcgcagatgcgccgcatcagcggctacggcttcgaccggctggcggcgcaagaaggtttcctggtggcctacccggacggcttcgagggccactggaacgattgccgcaaggccgccagctattcggcgcggctgcgtgacgtcgatgacgtggctttcctccgcgcgctggtggcgcggctggcccaggaataccgcgtcgattcgcagcgggtatatgtcgccggctactccaatggcggccagatggctttccgcctggccgccgaagcgccggggttgccggcggcgatcgcagcggtggcggcgagcctgccgaccacggggaacgatgcctgtcggccggtcgagcggccgaccgcggcgttgctgatcaacggcacgcgcgatccgatcaatccctatctcggcggcaaggtcagcctgttcggcttcggcgaccggggcgcggtacgctcgaccctggactcggcacgctggtgggccggcctgaacggcatcgcagcgccgccggacgtggcgccgctgacccgtcccggcccggtctggaccgagcgacagcgctggcaggaagacggccatccgccggtggagctgctcagcgtgcatggcggcggccacgtgctggcgcagccggactatcgcttcccgcggattctcggcaagagcgacccggaactggacgcgccagtggaaatctggcgcttcttcagccagttgccgcgctga

SEQ ID NO: 7694 - DNA, 1191 bp, Pseudomonas aeruginosa
  CDS (1)...(1191)
atgagcgaatattccgttttcacctccgagtccgtgtccgaaggccatccggacaagatcgcggaccagatctccgacgcggtgctggacgccatcatcgccaaggacaagtacgctcgcgtggcatgcgaaaccctggtcaagaccggcgtggcgatcatcgccggtgaagtcaccacctccgcctgggtcgacctggaagagctggtgcgcaaggtcatcatcgacatcggctacgacagctccgacgtcggcttcgatggtgccacctgcggcgtgctgaacatcatcggcaagcagtcggtggacatcaaccagggcgtcgaccgggccaagccggaagaccagggcgccggcgaccagggcctgatgttcggctacgccagcaacgagaccgacgtgctgatgccggcgccgatctgtttctcccaccgcctggtcgagcgccaggccgaggcgcgcaagtccggcctgctgccatggctgcgcccggacgccaagtcccaggtgacctgccgctacgaaggcggcaaggtggtcggcatcgatgcggtggtgctgtccacccagcacaacccggaagtctcctataacgacctgcgcgacggcgtgatggagctgatcatcaagcaggtgctgccggccgagctgctgcacaaggacacccagttccacatcaacccgaccggcaacttcgtgatcggcggcccggtcggcgactgcggcctgaccggacgcaagatcatcgtcgactcctacggcggcatggcccgccacggcggcggcgcgttctccggcaaggacccgtccaaggtcgaccgctccgccgcctacgccggccgctacgtggcgaagaacatcgtcgccgccggcctcgccgagcgttgcgagatccaggtttcctacgccatcggcgtggcccagccgacctcgatctcgatcaacaccttcggcaccggcaaggtcagcgacgagaagatcgtgcaactggtccgcgagcacttcgacctgcgcccgtacgcgatcaccaagatgctcgacctgctccacccgatgtaccagccgaccgcggcctacggccacttcggtcgtcatccgttcgagctgaccgtggacggcgataccttcaccgcgttcacctgggagaagaccgacaaggccgctctcctgcgcgacgccgccggcctctga

SEQ ID NO: 7695 - DNA, 1998 bp, Pseudomonas aeruginosa
  CDS (1)...(1998)
atgcccagccgtcgtgagcgagccaatgccatccgtgcactgagcatggatgccgtgcagaaagccaacagcggccacccgggcgccccgatgggcatggccgatatcgccgaggtcctctggcgcgactacatgcagcacaacccgagcaacccgcagtgggccaaccgcgaccgcttcgtgctgtccaacggccacggctcgatgctgatctactccctgctgcacctcaccgggtacgacctcggcatcgaggacctgaagaacttccgccagctcaactcgcgcaccccgggccacccggagtacggctacaccgccggcgtcgagaccaccaccggtccgctcggccagggcatcgccaatgcggtgggcatggcgctggcggagaaggtcctggccgcccagttcaaccgcgacggccacgcggtggtcgaccactacacctacgccttcctcggcgacggctgcatgatggaaggcatttcccatgaggtcgcctcgctggccggcaccctgcgcctgaacaagctgatcgccttctacgacgacaacggcatttccatcgacggcgaggtccacggctggttcaccgacgacaccccgaagcgcttcgaggcctatggctggcaagtgatccgcaacgtcgacgggcatgacgccgacgagatcaagaccgccatcgataccgcgcgcaagagcgaccagccgaccctgatctgctgcaagaccgtgatcggtttcggctcgccgaacaagcagggcaaggaagagtgccacggcgcgccgctgggcgccgacgagatcgccgcgacccgcgccgcgctgggctgggagcacgctccgttcgagatcccggcgcagatctacgccgagtgggacgccaaggaaaccggcgccgcccaggaagccgagtggaacaagcgtttcgccgcctaccaggctgcccatccggaactggccgccgaattgctgcgccgcctgaagggcgagctgccggccgacttcgccgagaaggccgcggcctacgtcgccgatgttgccaacaagggtgagaccatcgccagccgcaaggccagccagaacgcgctgaacgccttcggcccgctgctgccggagctgctcggcggttccgccgacctggccggctccaacctgaccttgtggaagggctgcaagggcgtcagcgccgacgacgccgccggcaactacgtgttctacggcgtgcgcgaattcggcatgagcgcgatcatgaatggcgtcgccctgcacggcggtttcattccctacggtgcgaccttcctgatcttcatggaatacgcgcgcaacgccgtgcgcatgtccgcactgatgaagcagcgcgtgctctacgtgttcacccacgactccatcggcctcggcgaggacggcccgacccaccagccgatcgaacaactggccagcctgcgcctgaccccgaacctggacacctggcgcccggccgacgcggtcgagtcggcggtggcctggaagcatgccatcgagcgcgccgacggtccgtccgcgctgatcttctcccgccagaacctgccgcaccaggcgcgcgacgtcgcccaggtggccgacatcgcccgcggcggctacgtgctgaaggactgcgaaggcgagccggaactgatcctgatcgccaccggttcggaagtcggcctggccgtgcaggcctacgacaagctcagcgagcagggccgcaaggtccgcgtggtatcgatgccatgcaccagcgtctacgagcagcaggacgagtcctacaagcagtccgtgctgccggtggaagtcggcgcgcgcatcgccatcgaggccgcccatgccgactactggtacaagtacgtcggtctcgacgggcgcatcatcggcatgaccagcttcggcgagtcggcgccggccccggcgctgttcgagcacttcggcttcaccctggacaacgtcctggcggtggccgaggagctgctggaagactga

SEQ ID NO: 7696 - DNA, 1164 bp, Pseudomonas aeruginosa
  CDS (1)...(1164)
atgaccgtgttgaagatgactgacctcgacctcaaaggtaagcgcgtgctgatccgcgaggacctcaacgtgcccgtgaaggacggccaggtgcagagcgatgcacggatcaaggccgccctgccgaccctcaagctggccctggagaagggcgcggcggtgatggtctgctcgcacctgggccgtccgaccgagggcgagttctccgccgagaacagcctgaagccggtggccgagtacctgtccaaggccctgggccgcgaagtgccgctgctggccgactacctcgacggcgtcgaggtcaaggcgggcgacctggtgctgttcgagaacgtgcgcttcaacaagggcgagaagaagaacgccgacgagctggcgcagaagtacgccgcgctgtgcgacgtgttcgtgatggatgccttcggtaccgcccaccgcgccgaggggtcgacccacggcgtggccaggttcgccaaggtcgccgccgccggcccgctgctggccgccgaactggacgcgctgggcaaggcgctgggcaacccggcgcggccgatggcggcgatcgtcgccggctccaaggtttccaccaagctcgacgtgctgaacagcctggccggcatctgcgaccaactgatcgtcggcggcggcatcgccaacaccttcctcgccgcggccggacacaaggtcggcaagtcactgtacgaggccgacctggtcgagaccgccaaggccatcgccgccaaggtcaaggtgccgctgccggtggacgtggtggtggccaaggaattcgccgagagcgccgtggcgaccgtcaaggccatcgccgaggtcgccgacgacgacatgatcctcgacatcggcccgcagaccgccgcgcagttcgccgagctgctgaagacctcgaagaccatcctgtggaacggtccggtcggggtgttcgagttcgaccagttcggcgagggcacccgtaccctggccaatgccatcgccgatagcgcggcgttctccatcgccggcggcggcgataccctggcggcgatcgacaagtacggcatcgccgagcggatctcctatatttccaccggtggcggcgcgttcctcgagttcgtcgagggcaaggtcctgccggccgtggaaatcctggagcagcgcgccaagggctga

SEQ ID NO: 7697 - DNA, 1065 bp, Pseudomonas aeruginosa
  CDS (1)...(1065)
atggcactcatcagcatgcgccagatgctggatcacgccgccgaattcggctacggcgtgccggccttcaacgtcaacaacctcgagcagatgcgcgccatcatggaagcggcggacaagaccgattcgcccgtgatcgtccaggcttccgccggtgctcgcaaatacgccggcgcgcccttcctgcgccacctgatcctcgccgcgatcgaagaattcccgcacatcccggtggtcatgcaccaggatcacggcaccagtcccgacgtctgccagcgttccatccagctgggcttcagctcggtgatgatggacggctccctgcgtgaagacggcaagacccctgccgactacgactacaacgtccgtgtgacccagcagaccgtggcgttcgcccatgcctgcggcgtgtccgtggaaggcgagctgggctgcctgggttccctggaaaccggcatggccggcgaggaagacggcgtcggcgcggaaggcgtgctggaccacagccagttgctgaccgatccggaagaagccgccgacttcgtgaagaagaccaaggtcgacgccctggccatcgccatcggcaccagccacggcgcctacaagttcaccaagccgccgaccggggacaccctgtcgatccagcgcatcaaggaaatccacgcgcgcatcccggacacccacctggtgatgcacggctcttcctcggtaccgcaggactggctggcgatcatcaacgagtacggcggcgagatcaaagagacctacggcgtgccggtcgaggaaatcgtcgagggcatcaagtacggcgtgcgcaaggtgaacatcgacaccgacctgcgcctggcctccaccggtgccatccgccgcttcctggcgcagaacccgagcgagttcgacccgcgcaagtacttctccaagaccgtcgaggccatgcgcgacatctgcatcgctcgctacgaagccttcggcaccgccggcaacgcttccaagatcaagccgatctccctggaaggcatgttccagcgctacgctcgcggcgagctggatccgaaggtcaactaa

SEQ ID NO: 7698 - DNA, 1179 bp, Pseudomonas aeruginosa
  CDS (1)...(1179)
gtggcaagtacagatgtgctgatcgttggcgccggggcggccgggctgatgtgtgcgatgacggcggccgggcgcgggcgccgcgtgcgggtactcgaccacgccaacaaggccggcaagaagatcctcatgtccggcggcgggcgctgcaatttcaccaacctgtacaccgagccggccaacttcctttcgcgcaacccccacttctgcaagtcggcgctggcccgctacacccagtgggacttcatcggcctggtggccaagcaccaggtgccgtaccacgagaagaaactcggccagctgttctgcgacaacaagtccagcgacatcctcgagatgctgctgcgcgaatgcgccgaggccggagcggaaatcctgctggacacctcgatcgaagagatcgcccgcgacgacgccggctaccgcctgcgtaccagcgccggcgagatgcgctgcgagtcgctggtgatcgccagcggcggcctgtcgatcccgaccctcggcgctagcggtttcggctaccaggtggcgcgccagttcggccacgaggtgctgccgacccgcgccgggctggtgccgttcaccatcaccgaccagctgaaggagctgtgcgccgagctttccggcacctccgtggattgccgggtgagctgcaacggccaggcgttccgcgagaacctgctgttcacccatcgcggcctcagcggcccggcgatgttgcagatttcctcctactggcaaccgggcgataccctggaaatcgacctgctgccggaccacgacgccagcgaatggctggcgcagcaacagcgcgagcgtcccaacagcgagctgaagaccctgctcgccgagctgttcaccaagaagctcgccggactgctggccgaccgctggttcgtctccaagccgatgaagcagtacaccccgaccgaactggcgggtatcgccgggcagctttcggcctggcgggtcacgccctcgggcaccgagggctaccgcaccgcggaagtgaccctgggcggggtgagcaccgacgaagtgtcgtcgaagaccatggagtcgcagcgctcgccggggctgtatttcgtcggcgaagtactggacgtcagcggccatctcggcggcttcaacttccagtgggcctgggcctcgggttatgcggcggggcagtacgcctag

SEQ ID NO: 7699 - DNA, 450 bp, Pseudomonas aeruginosa
  CDS (1)...(450)
atgagcgaaatcaaatcccgcctcctcgacgccgtcaaggtcgccatgcgcgcccaggacaagccgcggctgaccacgttgcgcctggccctcgcggacatcaagcgcgtcgaagtcgacgaacgcatcgaggtggatgacgcccgagccctgctgatcctagaccggatgatcaagcagcgccgcgacgcccagcgccagttcagcgacgccggccgccaggacctcgccgaggtcgaggccgccgagatcctcgtgctccaggacttcatgcccaagcccctggacgaccatgagatcgacgccctgatcgagcgcagcatcgtcgacagcggcgcccagggtccgcaggacatgggcaaggcgatgaacctgctgcgaccgcaggtccagggtcgcgtcgacatggcacaggtcagtcagcgcctgaaggcgcgcctctcctcctga

SEQ ID NO: 7700 - DNA, 216 bp, Pseudomonas aeruginosa
  CDS (1)...(216)
atgccagccgtcaaagtaaaagagaacgaacccttcgacgtagccctgcgtcgtttcaagcgctcctgcgaaaaagcaggtgtactggctgaagttcgcagccgcgagttctacgagaagcccactgccgagcgcaagcgcaaggccgctgccgcagtgaagcgccacgcgaagaaagtacagcgcgaacagcgccgtcgcgagcgcctgtactga

SEQ ID NO: 7701 - DNA, 1026 bp, Pseudomonas aeruginosa
  CDS (1)...(1026)
atgcgcgtgctgggactggaaacgtcctgcgacgaaaccggcgtcgccctttacgacagcgaacgcggcctgctggccgacgcgctgttcagtcagatcgacctccatcgcgtctacggcggcgtcgtgcccgagctggcctcgcgcgaccacgtcaagcgcatgctgccgctgatccgccaggtgctcgacgagtccggctgcacgccggcggatatcgacgcgatcgcctataccgccggtcccggcctggtcggcgccctgctggtgggggcttcctgtgcccaggcgatggccttcgcctggggcgtgccggcggtcggcgtgcaccacatggaagggcacctgctggcgccgatgctggaagagcagccaccgcggttcccgttcgtcgccttgctggtttccggcggtcacacccagttggtgcgggtggacggtatcggccgctaccagttgcttggcgaatcggtggacgatgccgccggcgaagccttcgacaagaccgccaagctgatcggcctgggctatcccggtggtccggaaatcgcccgcctggcggagcgcggcactcctggccgcttcgtgttcccgcggccgatgaccgatcgccccggcctggacttcagcttcagcgggctcaagacctttaccctgaacacctggcagcgttgcgtcgaggccggcgacgacagcgagcagacccgctgcgacatcgccctggcgttccagaccgcggtggtcgagaccctgctgatcaagtgccgtcgcgccttgaagcagaccggcctgaagaacctggtgatcgccggcggcgtcagcgccaaccaggcgctgcgcagcggcctggaaaagatgctcggcgaaatgaaggggcaggtgttctacgcccgcccgcgcttctgcaccgacaatggcgcgatgatcgcctacgccggctgccagcgcctgctcgccggccagcatgacggcccggcgatcagcgtccagccgcgctggccgatggagtcgctgccggcggtctga

SEQ ID NO: 7702 - DNA, 570 bp, Pseudomonas aeruginosa
  CDS (1)...(570)
atggtctggctactggcgatcctcgcctacctgctcggttccctctccttcgccgtcctgctcagccgctggttcggcacccaggacccgcgcgccagcggttccggcaaccccggcgcgaccaacatgctgcgcgtcgccgggaagaaactcgccatcctgaccctgctcggcgacgtcggcaaaggcctgttgccggtgctggtcgcccgctggctggggctcggcgtgatggaggaggcctgggtcggcatcgccgccgtgatcggccacctgtacccgctgtacttcaacttccgcggcggcaagggtgtcgccaccgccgcgggcatgctcctcggcctctatccgccggccgtactgctggccgcggcggcctggctgctgaccttcaagctgtcgcgcaccagctcgctcgcctcgctggtggccaccccgctgaccctgccgttgctggcctggcagcagcccggagcgctgctgccgatgaccgtgctgaccggcctgatcgtctggcggcaccgcgccaacttacgcgatctgttcgccggccgcgaacggcatttctaa

SEQ ID NO: 7703 - DNA, 807 bp, Pseudomonas aeruginosa
  CDS (1)...(807)
atgtccgagctttaccaacaccgcgcgcgcaagcgcttcggccagaacttcctgcacgatgccggggtgattcaccgcatcctccgtgccatccatgcccgcgagggtcagcgcctgctggagatcggcccgggccagggcgccctgaccgagggactgctgggcagcggcgcacgcctggacgtgatcgagctcgaccaggacctgatccctctgttgaagctgaaattcggcctcgagtcgcgcttcagcctgcaccagggcgacgccctcaagttcgatttcgcctcgctggtggagagcggcgagaagctgcgagtggtcggcaacctgccctacaacatctccacgccactgatcttccatctgctggagcacgcgccggtgatcgaggacatgcacttcatgctgcagaaggaagtggtcgagcgcctggcggccacgccgggcggcggagactggggccggctctcgatcatggtccagtatcactgtcgggtggagcacctgttcaacgtcggccccggcgcgttcaacccgccgcccaaggtcgactcggccatcgtccgtctcacccccttcgccgagccgccccatccggcacgcgatccgaaactgctcgaacgggtggtccgcgaggccttcaaccagcgccgcaagaccctgcgcaacaccctcaagcctctcctgagcgtcgaggacatcgaggccgcagaggtcgatccgacccttcgtcccgaacaactcgacctggccgcattcgtccgcctggccaaccagctggccgagctgccaggcaatcgttag

SEQ ID NO: 7704 - DNA, 693 bp, Pseudomonas aeruginosa
  CDS (1)...(693)
atgcgcctggaccgcttcctcgccaacctgcccgaactcagccgccgcgacgcgcagatgctgatcgccggtggacacttgcgcgtggacggccaggtggtgcgcgacggcacccacgaggtgcgggtgttcagccgggtggaactggacgagcggctgctccaggctggcaagccggcgcgctactacatgctgcacaaaccgatgggctgcgtcagcgccacccgcgacccgcaacacccgaccgtcctcgacctgttcccggaagacctgcgcgacgacctacacattggcggtcgtctcgactacaacaccaccggcctgatgctgctgaccaacgatggccagtggtcgcgccgcctgaccctgccgggcagccggcgcgacaaggtctactacgtggaaaccgaggcgcccatcgaccaacgctacgtggatgccttcgccgccggcctccacttccgcttcgaagacctggtcaccctccccgcgcagctcgaaccgatcggcccacgctgcgcccgcctgaccctgcacgaaggccgctatcaccaggtcaagcgcatgttcggccacttcgacaacaaggtgctgcgcctgcaccgcgagcgcatgggcgatatttgtctcgacccgcagttgccgccgggtgcctggcgccccctgaatgctgaagaaatctgttcggtgtga

SEQ ID NO: 7705 - DNA, 918 bp, Pseudomonas aeruginosa
  CDS (1)...(918)
atgactgacatgcacgacgacatccccgccggcagccgttgcggctacgtggcgatcgtggggcgccccaatgtgggcaagtccaccctgctcaaccacatcctcgggcagaagctggcgatcacctcgcgcaagccgcagaccacccgccacaacatgctcgggatcaagaccgagggcgaggtgcaggccgtctacgtcgatacgcccggcctgcacaagagcggcgagaaggccctcaaccgctacatgaaccgtaccgccagcgcggcattgaaggatgtcgacgtggtgatcttcgtggtcgaccgcacccgctggaccgaagaggaccagatggtcctggagcgcgtgcagtacgtcagttgcccggtgctgatcgcggtgaacaagaccgaccgcatcgaggaaaaggccgacctgctgccgcacctcgaatggctcacccagcagttgccgaaggccgaggtagtaccgatctcggcgcagcacgggaccaacctggacgtgctggagaagctggtcgccgagcgtctgccggaaagcgagcacttcttccccgaagaccagatcaccgaccgcagcagccgcttcctggccgccgagctggtccgcgagaagatcatgcgccagctcggcgccgagctgccctaccagatcaccgtggagatcgaggagttcaagcaggaaggtcgcatcctgcatatccatgcgctgatcctggtggagcgcgaggggcagaagaagatcatcatcggcgacaagggcgagcggatcaaaagcatcggccagaacgcgcgcaaagacatggaagtgctgttcgactccaaggtcatgctcaacctctgggtcaaggtcaagggcggctggtccgacgacgagcgtgccctgcgctcgctgggctacggcgacctctga

SEQ ID NO: 7706 - DNA, 1128 bp, Pseudomonas aeruginosa
  CDS (1)...(1128)
atggctgaagcaaaagtactgagtggcgccggcctgcgtggccaggtggccggtcagacagccctgtccaccgtcggccaggaaggcgccggcctgacctaccgtggctacgacgtccgcgacctggcggcggcggcgatcttcgaggaagtcgcctacctgctgctctacggcgaactgccgaacaagcaacagctcgacgcctacctgaagaagctccagggccagcgcgacctgccgcaggcgctgaaggaagttctcgaacggattcccaaggacgcccacccgatggacgtgatgcgcactggcgcctcggtcctcggcaccctggaaccggagctgagcttcgaccagcagcgcgacgtcgccgaccgcctgctcgccgccttcccggcgatcatgacctactggtaccgcttcacccacgaaggccagcgcatcgactgcaacagcgacgagccgaccatcggcgggcacttcctcgccctgctccacggcaagaagcccagcgagctgcacgtgaaggtgatgaacgtctcgctgatcctctacgccgagcatgagttcaacgcatccaccttcaccgcgcgggtttgcgcctcgaccctgtccgacctctactcctgcgtcaccggcgccatcggctcgctgcgcggcccgctgcacggcggcgccaacgaggcggcgatggaactgatcgaacgcttctcttcgccgcaggaagccaccgccgagctgctgaagatgctcgagcgcaaggacaagatcatgggcttcgggcatgccatctacaaggattccgacccacgcaacgaagtgatcaagggttggtcgaagcagctcgccgacgaggtcggcgacaaggtcctgttcgcggtttccgaggccatcgacaagaccatgtgggagcagaagaagctgttccccaacgccgacttctaccacgcctcggcgtatcacttcatgggcatcccgaccaagctgttcacgccgatcttcgtctgctcgcggaccagcggctggaccgcccacgtcttcgaacagcgcgccaacaaccgcatcatccgcccgagcgccgagtacaccggcgtcgaacagcgtgcgttcgtgccgctggagcaacgctga

SEQ ID NO: 7707 - DNA, 1317 bp, Pseudomonas aeruginosa
  CDS (1)...(1317)
atgtccgcgaaggataccccggccccccaggccgccgagcccggtcgcgcccagccggtcgaagtccccggcggcggccactggtggcgccgcctgctggccttcgccggccccggctacctggtcgcggtgggctacatggacccgggcaactgggccaccgacgtcgccggcggcgcgcaactgggctacctgctgctctcggtaatcctgctctccagcctgatggcgatgctgctgcaggcgctgtccgcgcgcctgggcatcgccagcggcctggacctggcccaggcctgccgcgaacgctactcgccgagcacctgccgcctgctgtggctggcctgcgagacggcgatcatcgcctgcgacctggccgaggtgatcggcaccgccatcgccctgaagctgctgttcggcctgccgctggcctggggcgccttgctctgcgtgggcgacgcgctgctggtgctggtcctgatcggacgtggccagcggccgctggaggccttcgtggtggcgttgctgacactgatcttcgcctgcttcgcggtacagttgctgctctcgcgtcccgaactcggcgaggtgctccaagggttcttgccgagcccgcgggtgctcagcgacccggctgccctgtacctggcgatcggcatcgtcggcgcgaccgtcatgccgcacaacctctacctgcattcctcgctggtgcagagccgcgcctacccgcgcagccttgccggcaagcgcaaggcgctgcgctgggcggtggccgacagcagcctggcgctgaccctggcgctgctggtcaacgcggcgatcctgatcgtcgccgccagcgtgttccaccgcaacgggcacaccgaggtggtcgatatcgagcaggcccacgcgctgctctcgccattgctcggcctggaactcgcctcgctgctgttcgccgtggcgctgctcgcgtccggcctcaactcgacggtcaccaccaccctggccgggcagatcgtcatggagggcttcctccgcctgcgcctggcgccctgggcgcggcgcctgctgacccgtggcgtcgcagtgctgccggtgctgctggtgaccctgctctacggcgaggatggcaccgcgcggctgctgatcttcagccaggtgatcctgtcgatgcagttgccgctggcagtgatcccgctgctacagttcgtttccgaccggcgcctgatgggcccgctggcgatcggtgccgggacccggtggctggcctgggcggtagcgctggcgatcgtcggcctgaacctgcaactgctggccgacttcgcgttcggctga

SEQ ID NO: 7708 - DNA, 2115 bp, Pseudomonas aeruginosa
  CDS (1)...(2115)
atgcataccttcttcatcgccccgaccggtttcggcgtcggcctcacctcgatcagcctcggcctgcttcgcgccctggaacgcgccgggctgaaggtcggcttcttcaaacccatcgcccaactgcatcccggcgacctcggcccggagcgctccagcgaactggtggcgcgcacccacggcctggatacgccgaagccgctgccgctggcccaggtcgagcgcatgctcggcgacggccaactggacgaactgctcgaagagatcatcagcctctaccagcgcgccgccgccgacaaggacgtggtgatcgtcgaaggcatggtaccgacccgtcacgccagctacgccgcgcgggtcaacttccacctggcaaagagtctcgacgccgaggtgatcctggtctccgcgccggaaaacgagacgctcaccgaactgaccgaccgtatcgagatccaggcccagctgttcggcggcccgcgcgatccgaaggtgctcggggtgatcctcaacaaggtccgcggcgaggccgacgcggccaacgccgaggacggcgtggcggacttcgcccggcgcctcaccgaacactcgccgctgctgcgcgacgacttccgcctgatcggctgcattccctggcaggacgaactcaacgccgcgcgcacccgcgacatcgccgacctgctcagcgcacgggtgatcaacgccggcgactatgagcagcgccgggtgcagaagatcgtgctatgcgcccgcgccgtgcccaacaccgtgcaactgctcaagcccggcgtgctggtggtgacccccggcgaccgcgacgacatcatcctcgccgccagcctggccgcgatgaacggcgtacccttggccggcctgctgctgtgcagcgacttcccgcccgacccgcggatcatggaactctgccgcggcgccctgcagggcggcctgccggtgctgtcggtggccaccggctcctacgacaccgcgaccaacctgaaccggatgaacaaggaaatcccggtggacgaccgcgagcgcgccgagcgggtcaccgagttcgtcgccgggcacatcgatttcgaatggctcaagcagcgctgcggcacgccgcgcgagctgcgcctgtcgccgccggcgttccgctaccaggtggtgcaacgcgcgcagaaggccggcaagcgcatcgtcctgcccgagggcagcgagccgcgcaccgtacaggcggcggcgatctgccaggcgcgcggcatcgcccgctgcgtgctgctggccaagccggaagaggtccaggcggtggcccaggcccagggcatcgtgctaccggaaggcctggagatcatcgaccctgacctggtgcggcagcgctacgtcgaaccgatggtcgagctgcgcaagggcaaggggctgaacgcgccgatggcggagcagcaactggaggacagcgtggtcctggcgaccatgatgcttgccctggacgaggtcgacggcctggtctccggcgccatccacaccaccgccagcaccatccgcccggcgctgcaactgatcaagaccgcgcccggctacaacctggtgtcgtcagtgtttttcatgttgttaccggaccaggtgctggtctacggcgattgcgcggtgaatcccgatccttcggccagtgacctggccgagatcgccgtgcagagtgccgcgtcggcgcaggctttcggcatcccggcacgggtcgcgatgatcagctactccaccggcgactccggttccggggtggatgtcgacaaggttcgcgaggccacccgcctggcgcgcgagcagcgccccgacctgttgatcgacggacccttgcagtatgatgccgccgccatcgccagcgtcggccgccagaaggcgccgaacagcccggtggccgggcaggccacggtgttcatcttccccgacctgaacaccggcaacaccacctacaaggcggtgcagcgcagcgccgattgcgtcagcgtcgggccgatgctgcaaggcctgcgcaaaccggtgaacgacctgtcgcgcggcgcgctggtggaagacatcgtctacaccatcgccctcaccgccatccaggcggacgcccaggccccggcctga

SEQ ID NO: 7709 - DNA, 939 bp, Pseudomonas aeruginosa
  CDS (1)...(939)
atgacatccatcgtcgtggcggcgctgtacaagttcgtgactctcgacgattacgtggcgctgcgtgaacccctgctgcaaaccctgctcgacaacggtgtgaaaggcaccttgctgctggccgaggaaggcatcaacggcaccgtctccggtagccgcgaaggcatcgatgcgctgttcgcctggctgcgcagcgatccccggctggccgatatcgagcacaaggagtcctactgcgacgaacagccgttctaccgcaccaaggtcaagctgaagaaggaaatcgtcaccctcggcgtgcctggcgtcgatccgaacaagcaggtcggccagtatgtcgaggcgaaggactggaatgccctgatcagcgatccggaagtcctgctgatcgatacccgcaacgactacgaggtggcgatcggcaccttcgagggcgcggtcgatccgaagaccaggtcgttccgcgagttccccgagtacatcaaggcccactacgacccggcgcggcacaagaaggtggcgatgttctgcaccggcggcatccgctgcgagaaggcttccagctacatgctcggcgccggtttcgaggaggtcttccacctcaagggcggcatcctcaagtacctcgaagaggtgccgcaggaacagagcctgtggcgcggcgactgcttcgtattcgacaaccgcgtgaccgtgcgccacgatcttagcgagggcgagtacgatcagtgccacgcctgccgcaacccggtttcgctggaggaccgccagtccgagcactacgtgcccggcatcagctgtccgcactgctgggactcgctgagcgagaagacccgcgccggcgctcgcgagcggcagaaacagatcgaactggcgcggcagcgcaaccagccgcacccgctcggtcgcgatccgcgccagtccacgctggagaactga

SEQ ID NO: 7710 - DNA, 828 bp, Pseudomonas aeruginosa
  CDS (1)...(828)
atgaaccgacagatcgtgcgcagcgcgctgttcgtcccggcgacccgcccggagcggatccccaaggcccttgccagcggcgccgaccgggtcatcgtcgacctcgaggatgcggtggaggaggggctgaaggtcgaggcgcgggccaatctccggcgtttcctcgtcgatacgccggaagcccgggtgctggtgcggatcaacgcggcggagcatcccgggcatgccgacgacctggcgctgtgccgcgaccacgccggagtgatcggcctgctcctgccgaaagtggagagcgccgcccaggtgcgccacgccgccgtggccagcggcaagccggtctggcccatcgtcgagagtgcccgcggccttgccgcgctgggcgagatcgccgccgccgcgggggtcgagcggctgtccttcggcagcctcgacctggccctggacctcgatctcaacagcggcagcaacgcagccgaacagattctcggtcacgcccgttacgcactgctcctgcaaacgcgcctggcaggcctggcgccgccgctggacggcgtctatccggcgatccagaaccgtgccggactggtcgaggcagtgcgcttcgctcgcgacatgggcttcggcgggttgctgtgcatccatccgagccaggtcgagccgatccaccagacattgatgccgagtcccgcggaactggagtgggcgcgtcgggtggcagaggccggcgcctccggtgccggcgtcttcgtggtcgacggcgagatggtcgacgcgccggtgctggggcgcgcgcgacgcctgctggagcgggccggggagggtggctga

SEQ ID NO: 7711 - DNA, 1221 bp, Pseudomonas aeruginosa
  CDS (1)...(1221)
atgtccgctccccatgcgcaggtagaacgtgccgatttcgaccggtatatggtccccaactacgcccccgccgccttcattccggtgcgaggcgagggatcgcgcgtctgggaccagagcggccgcgaactgatcgatttcgccggcggcatcgccgtgacctccctgggccacgcgcatccggcgctggtcaaggcgctcaccgagcaggcccagcgcatctggcacgtttccaacgtcttcactaacgagccggccctgcgcctggcgcgcaagctggtggacgccaccttcgccgagcgggtgttcctcgccaattccggcgccgaagccaacgaggcggccttcaagctggctcgccgctacgccaacgatgtctacggcccgcagaagtacgagatcatcgccgccagcaacagcttccacgggcgcaccctgttcaccgtcaacgtcggcggccagccgaagtattccgatggcttcgggcccaagttcgagggtatcacccacgttccctacaacgacctggaagcgctgaaggcggcgatctccgacaagacctgcgccgtggtgctggaaccgatccagggcgagggcggcgtgctgccggcgcagcaggcctacctggaaggggcgcgcaagctgtgcgacgagcacaacgcgctgctggtcttcgacgaggtccagagcggcatgggccgggtcggcgagctgttcgcctacatgcactacggcgtggtcccggacatcctctccagcgccaagagcctgggcggcggcttccctatcggtgcgatgctgaccaccggcgagatcgccaagcacctgtcggtcggcacccacggcaccacctacggcggcaacccgctggcgtcggcggtggccgaggcggcgctggacgtgatcaataccccggaagtgctggatggcgtgaaggccaagcatgagcgcttcaagtcccgcctgcagaagatcggccaggagtacggcatcttcgacgagatccgcggcatgggcctgctgatcggcgcggcgctgaccgacgagtggaagggcaaggccagggatgtgctcaacgccgccgagaaagaggcggtcatggtgctccaggccagcccggacgtggtgcgcttcgcgccgagcctggtgatcgacgacgccgagatcgacgaaggcctggagcgcttcgagcgcgccgtggccaagctggtccgcggctga

SEQ ID NO: 7712 - DNA, 2625 bp, Pseudomonas aeruginosa
  CDS (1)...(2625)
atgaaaagcgctgaaatccgtgaagccttcctccgcttcttcgaagagaagggacacacccgtgtcgcttccagttcgctgatcccggcgaacgatccgaccctgctgttcaccaacgcgggcatgaaccagttcaaggactgcttcctcggcctggaaaagcgcgcctacacccgtgcgaccaccagccagaaatgcgtgcgcgccggcggcaagcacaacgacctggaaaacgtcggctacaccgcgcggcaccacaccttcttcgaaatgctgggtaacttcagcttcggcgactatttcaagcgcgacgccatccattacgcctgggagttcctcaccggcgagaaatggctgaacctgcccaaggaaaagctctgggtcaccgtctacgccaccgacgacgaggcctacgacatctggaccaaggaagttggcgtgcccgccgagcgtatggtgcggatcggcgacaacaagggcgcgccctatgcgtccgacaacttctgggcgatgggcgataccggaccctgcggtccctgcaccgagatcttcttcgaccatgggccggagatctggggcggcccgcccggttcgccggaagaggacggcgaccgctacatcgagatctggaacaacgtgttcatgcagttcaaccgcaccgcggacggcgtcatgcacccgctgccggcgccgagcgtggacaccggcatgggcctggagcgcgtcagcgcggtactccagcacgtgcactcgaactatgagatcgacctgttccagaacctgctgaaagcctccgccgaggccatcggctgcgccaacgacgacgcgccgtcgctgaaggtggtagccgaccacatccgttcctgcagcttcctgatcgccgacggcgtgctgccgtccaacgaaggtcgcggctacgtcttgcggcggatcatccgccgcgcctgccgccacggcaacaagctgggcgccaggggcaccttcttccacaagatcgtcgcagcgctggtcgccgagatgggcgatgccttccccgagctgaagcaacagcaggcacacatcgagcgcgtgctgaagaccgaggaagaacagttcgccaagaccctggagcaaggcctgaagatcctcgaacaggacctcgccgaactgcagggcagcgtgattcccggcaacgtggtgttcaagctgtacgacacctatggcttcccggtcgacctgaccaatgacatcgcccgcgagcgcgagctgaccatcgacgaggacggcttcgagcgcgagatggaggcccagcgcgagcgcgcccgcgcttccagcgccttcggcatggactacaacagcctggtcaaggtcgacggcgagacccgcttcctcggctatcagggcgtctccggcgccgggcagatcgtcgcgctgttcagggacggccaggccgtcgagcgcctggaggagggcgaggagggcgtcgtggtcctcgaccagacgccgttctacgccgagtccggcggccaggtcggcgacagtggctacctcgaggcggctggcgtgcgcttcgacgtgcgcgataccaccaaggctggcggcgcgcacctgcaccatggcgtggtcgcccggggcaacctgagcgtcggcggcgcggtcaaggccgaggtcgacgcctcggtacgccaggccaccgcgctcaaccactccgcgacccacctgctgcatgccgcgctgcgccaggtactgggcgaccacgtacaacagaagggctcgctggtggacagccagcgcctgcgtttcgacttcagccacttcgaggcgatcaaggcggaacaactgaaggccctggaggatatcgtcaacgccgaaatccgtcgcaacaccgaggtcgagaccgaggaaaccgatatcgacaccgccaaggccaagggcgccatggcgctgttcggcgagaagtacggcgaccaggtgcgcgtactgagcatgggcggcgatttctccgtcgagctgtgcggtggcacccacgtatcccgcaccggcgacatcggcctgttcaagatcaccagcgagggtggcgtggctgctggcgtacgccgtatcgaggcggtcaccggcgcggcggcgctggcctacctgaacggtgccgaggagcagctcaaggaagccgccagcctggtcaagggcagccgcgacaacctgctggacaagctcggcgccctgctggagcgcaaccgctcgctggagaaggagctggaacagctcaaggccaaggctgccagcgcggccggcgacgacctttcggcggcggcggtggaaatcaagggcgcgaaggtactcgccgcgcgcctcgatggtctggacggcaaggcgctgctggcgctggtcgaccagttgaagaacaagctcggccgcgcagtgatcctgctcggcggcgagctggacgggaaggtcgtactggtcgcaggcgtgacccaggacctgaccggccaactgaaggccggcgagcttatgaagcaagccgcggcggcagttggtggcaaaggtggcggacgcccggatatggcccagggcggcggcaccgatgcagcgaaattggacgaggccctggccctggcccagcgcttcgtcgagcaagggctctga

SEQ ID NO: 7713 - DNA, 1929 bp, Pseudomonas aeruginosa
  CDS (1)...(1929)
atgttcgccccacccagcaccgagacactcaaccgcttctttctgttgtcgtggctggtggtgctctggcaggtgctgcgcctgcaggacgggatcgtcttcgacgacgcctggctgccgctctggagcgtcgctgccagcctgagctacgccttcctttatatagtcccggtgtacctcgcctgccgactgctcctgcatttccatgatcgccttcccgtgcgcctcagtccgtggctggcaggcgtgctggccatcgtcggcagcgcggcggtacagatactgctctacgccgaccgcaccctctacgacctgtacggattccacctcaacggtttcagcatcggcctgctggtctcgcccggcggcctctccagcctcggcagcggcgacggcaccctgctcagcgcaagcctggcggccctggccctgctctgcctgcaggtgctgctgtacagcgcctgccaggtcagccgcgaacgccttcccgcgctccctcggcgcgcctggcgctacctgttggcggccttcctctgcctggccctgggcgaacgcctggtctatgcgttcagctccctgcgcgactaccggccgatcctgctggccagcgaacgctatccgctttacctgccattgaccgtccgcagcctggcgcgaagcctgggcatccagccgacgcccacccagcgcgagctgctccagcagcagagcgacctgcactatcctctccggccgctggagatcagcgccccggcgcacccattgaacatcgtctggatcgtcgccgagtcgctccgcggggacatgctcgatccgcgctacatgcccaggctgtgggacttctccaaccgggcgatccgcctggacaaccactacagcagcggcaacctgacccagatgggcgtcttcggcatgttctacgggctgcacggcggctactgggacgccgtgctgaaggccggccagccgccggtgctcatggaggtactcaggcagcagaactaccagttccggatcaatgccgcgcaacgtttcagctatccgcccttcgaccgcagcgtgttcgtcaacctgcgcccccaagacctgcacgtgctggatagcccggagcctgcctggcagcgcgacgcccggaacaccgacgacctgctgcgcttcgtcgatcgccgactacccgaccggccgttcttcgcctgcctgttcctcgagtcgagccacgccaactacagcttccgcgacgagaccgcgaaaatccgcccctatctggtcaacttcaactacctgaccaccgatttccaggcgcagatgccgctgatcaagaaccgctacctgaatgccgtgcgcgaagtcgatacacagatcggccgcctgctgcagcacctggaaaaccagcacctgctggaaaacaccgcggtagtggtgctcggcgaccatggggaagagttcatggaacgctcgcgctggggccacaataccgagttcaatcgctaccagaccggcaccgtcgccgtgctgagcattcccggacaggcgccccgtgccgtccgcggcatcaccagccacatcgacctgcccgcaacgctcctgccgctgctgggcgtacgcaatccgccccgcgactactcgctgggacaggacctgctcgcagcggactaccatcgcgactatgcggtgagcgccgataccacgcgcatcgcctacctgggcgaaggcttcaaggtgagcttcccactgcgtggcgcggaccgtcaccacggtccggtgagcgatggcgacgaccgcccgctcgacgtggaacaacaggaagccatacgcggcccactccgtgcagcacgcctggaactgctgcaggatctcggccgcttcagcgccttgccggtaggggaagagccgtcgccgcggaacctcgcgacttcgttgacgccatga

SEQ ID NO: 7714 - DNA, 990 bp, Pseudomonas aeruginosa
  CDS (1)...(990)
atgcgcatcctgttcttcagcagccaggcctacgacagcgagagcttccaggccagcaaccaccggcacggcttcgaactgcacttccagcaggcccacctgcaggcggacacggcggtcctcgcccagggcttcgaagtagtctgcgccttcgtcaacgacgacctctcgcggccggtgctggaacgcctggcggccggcggcacgcgcctggtcgccctgcgctcggccggctacaaccacgtcgacctggccgccgccgaagcgctcggcctgccggtggtgcacgtcccggcctattcgccgcacgctgtcgccgagcacgcggtcggcctgatcctgacgctcaaccggcgcctgcaccgcgcctacaaccggacccgcgagggcgatttctcgctgcatgggctgaccggcttcgacctccacggcaaacgcgtcggagtgatcggcaccggacagatcggcgagaccttcgcccgcatcatggccggcttcggctgcgagctgctggcctacgatccttatcccaatccgcgcatccaagcactcggcggccgctacctggcgctcgacgccctgctcgccgagtccgacatcgtcagcctgcattgcccgctgaccgccgacacccgccacctcatcgacgcgcagcgcctggcgacgatgaaacccggcgcgatgctgatcaataccggccgtggcgccctggtgaacgccgcggcgctgatcgaggcgctgaagagcggacaactgggctacctcggcctcgatgtctatgaagaggaagcggatatctttttcgaggatcgctccgaccagcccctgcaggatgacgtgctggcacgcctgctgagcttccccaacgtggtggtgacggcccaccaggccttccttacccgcgaggccctggcggcgatcgccgacaccaccctggacaacatcgccgcctggcaggacgggacgccgcgcaatcgggtccgggcctga

SEQ ID NO: 7715 - DNA, 705 bp, Pseudomonas aeruginosa
  CDS (1)...(705)
atgaaacctattcagcttcccctcagtgtgcgtctgcgcgacgacgccaccttcgccaactactatcccggtgccaatgccgcggcactgggatatgtcgagcgtttgtgcgaagccgaggctggctgggcggaaagcctcatctacctctggggacacgacggcgtcggccgcagccacctgttgcaggcggcctgcttgcgtttcgagcagttcgaagagcgaaccatctacctgccgatggccgatctggtgcagtacggcccggaaatcttcgacgatctcgagcagtgcgagctggtctgcatcgacgacctggatgtgctggttggcaagcgagaatgggaagaggggctgttccacctgttcaatcgactgcgtgataccggtcggcgcctgctgctggcggcatcgaagtcgccccgggagctgcaggtcaagctgccggacctgaagtcccgcctcaccatggcgctgatcttccagttgcacggtctttccgacgaggacaagcttcgtgccctgcaactgcgggcatcccgtcgtggcctgcatctgaccgatgaagtcggtcgtttcatcctcaaccgcggttcgcgcagcatgaactctctgttcgatctgctggagcaactggatcgcgcttcgctccaggctcagcgcaagctgaccattcctttcctcaaggaaaccctcggctggtaa

SEQ ID NO: 7716 - DNA, 1716 bp, Pseudomonas aeruginosa
  CDS (1)...(1716)
atgcgtaccagtcagtatctgctttccacgctcaaagaaacccccgccgacgcggtggtaatcagccatcaactgctgcttcgcgccggcatgatccgtcgcctggcctcgggtctctacacctggctgccaatgggcctgcgggtactgcgcaaggtcgagaccatcgtccgcgaggaaatgaacgctgccggcgccctggaagtgctgatgccggcggtgcagccggccgagctgtggcaggagtcggggcgctgggagcaatacggccctgagctgctgcgcctgaaggaccgccacgagcgcgaattctgcgtaggcccgacccacgaagaagtgatcaccgacctcgcgcgcaacgagctgaacagctacaagcaactgccgatcaacttctatcagatccagaccaagttccgcgatgagatccgcccgcgcttcggcctgatgcgcggacgcgaattcatcatgaaggacgcctattccttccacctgagccaggactcgctgcagcagacctacgacgggatgtaccaggcgtacagcaagatcttctcccgcctcggcctggatttccgtcccgtgcaagccgacaacggctccatcggcggcagcggctcccatgagttccacgtgctggccaactccggcgaggacgatatcgtcttcagcgacagctccgactacgccgcgaacatcgagaaggccgaagccgtgccgcgcgagagcgcccgcggcagcgccaccgaggacatgcgcctggtcgacacgcccaacaccaagaccatcgcggccctggtggacggcttccagctaccgatcgagaaaaccatcaagaccctggtggtgcatggcgccgaagaaggcaccctggtcgccctgatcgtccgcggtgatcacgagctcaacgaaatcaaggccgccaaccagccgctggtcgccagcccgctggtattcgcttcggaggccgagatccgtgccgccatcggtgccggccccggctcgctgggcccggtcaacctgccgatcgcctgcatcgtcgaccgctccgtcgccctgatgagcgatttcgccgctggcgccaacatcgaggacaagcactacttcggcgtgaactgggagcgcgacctgccgctgcccgaggtcgccgacctgcgcaatgtcgtcgaaggcgaccccagcccggacggcaagggcaccctggtgatcaagcgcggcatcgaggtcggtcatatcttccagcttggcaccaagtacagcgaagcgatgaagctgagcgtcctgagcgaacagggcaagccggtcaacctgatcatgggctgctacggcatcggcgtatcccgcgtggtcgccgccgccatcgagcagaaccatgacgagcgcggcattctctggccaagcgcattggcgccgttccagatcgccctggtaccgctgaagtacgaaaccgagagcgtcaagcaggcgaccgacaagctctatgccgagctgaccgcagccggtttcgaagtgctgctggacgatcgcgacaagaagaccagccccggggtgaagttcgccgacatggagctgatcggcattccccaccgcatcgtgatcagcgaccgcggcctcagcgaaggcgtcctggaatacaagggccgccgcgacagcgagtcgcagaacctgccgatcggcgaactgatgtcgttcatcaccgaaaaactcagccgctga

SEQ ID NO: 7717 - DNA, 471 bp, Pseudomonas aeruginosa
  CDS (1)...(471)
atggaaatcaatatcggaatcggcgaacaggatcgcgcagccattgccgagggcctgtcgcggctactggccgacacctacaccctctacctgaaaacccacaacttccactggaacgtcaccggcccgatgttcaacacgttgcacctgatgttcgaaggccagtacaccgaactggccgttgccgtggacgacatcgccgagcgcatccgggccctgggcttcccggcgcccggcacctacgccgcctacgcccgcctgtcgtccatcaaggaggaggaaggcgttccggaagccgaggagatgatccggcaactggtccagggccaggaagccgtggtgcgcaccgcccgcagcatcttcccgctgctggacaaggtcagcgacgaacccaccgccgacctgctcacccaacgtatgcaggtgcatgaaaagaccgcctggatgttgcgcagccttcttgccagctga

SEQ ID NO: 7718 - DNA, 1776 bp, Pseudomonas aeruginosa
  CDS (1)...(1776)
atgatgcgcagccactattgcggccaactgaacgagagcctggacggccaggaagtcaccctttgcggttgggttcaccgccgccgcgaccatggtggagtgatcttcctcgatgtgcgcgatcgcgaggggctggcccaggtggtgttcgatccggaccgtgcggaaaccttcgccaaggccgaccgggtgcgcagcgagttcgtggtgaagatcaccggcaaggtgcgcctgcgccctgaaggcgcgcgcaacccgaacatggcgtctggctccatcgaggtactgggctacgaactggaagtgctgaaccaggccgagactccgccgttcccgttggatgaatattccgatgtgggcgaggaaacgcgcctgcgctaccgcttcatcgacctgcgtcgtccggagatggccgccaagctgaagctgcgtgcgcgcatcaccagcagcattcgccgctacctggacgacaacggcttcctcgacgtcgagaccccgatcctcggccggccgacgccggaaggcgcgcgcgattacctggtgccgagccgtacctacccgggccacttcttcgccctgccgcagtcgccacagctgttcaagcaactgctgatggtcgccggcttcgatcgctactaccagatcgccaagtgcttccgtgacgaggacctgcgtgccgaccgccagccggaattcacccagatcgacatcgagaccagcttcctcgacgagagcgacatcatcggcatcaccgagaagatggtgcgccagctgttcaaggaagtgctggatgtcgagttcgacgagttcccgcacatgccgttcgaagaggccatgcgccgctacggttcggacaagcccgacctgcgcatcccgctggagttggtggacgtcgccgaccagttgaaggaagtggagttcaaggtcttctccggtccggccaacgatccgaaggggcgtgtcgccgccctgcgtgtaccgggcgccgcctccatgccgcgcagccagatcgacgactacaccaagttcgtcggcatctatggtgccaagggcctggcctacatcaaggtcaacgagcgcgccaagggcgtggaaggcctgcagtcgccgatcgtgaagttcatccccgaggccaacctgaacgtgatcctcgatcgcgttggcgcggtcgacggcgacatcgtgttctttggcgccgacaaggccaagatcgtttgcgatgccctgggcgcgctgcgtatcaaggtcggccatgacctcaagctgctcacccgggagtgggcgcccatgtgggtcgtggacttcccgatgttcgaggagaacgacgacggctcgctgtccgcgctgcaccacccgttcacctcgcccaagtgcaccccggctgagcttgaggccaatccgggcgcggcactttcccgcgcctacgacatggtgctcaacggtaccgagctgggtggcggttccatccgtatccatgacaagtccatgcagcaggcggtgttccgtgtgctgggcatcgacgaggcggaacaggaagagaaattcggcttcctgctcgacgcgctcaagtacggtgcgccgccgcatggcggcctggccttcggcctggatcgcctggtcatgctgatgaccggtgcatcgtctatccgcgaagtgatcgccttcccgaagacccagagcgctggcgacgtcatgacccaggcaccgggttccgtggacggcaaggccctgcgcgagctgcacattcgcctgcgcgagcagccgaaggccgagtga

SEQ ID NO: 7719 - DNA, 522 bp, Pseudomonas aeruginosa
  CDS (1)...(522)
atgccccatagctacaggaaaatggaatcgccggtcgggacactgaccctggtagccagggacgatgcctttctggtcgcgattctttggcagcatgagcgtcccaaccgagtaccgctggacgagatgcggctctccgaggacagctccctcctggcggaaaccgaacgccagttgcgggaatatttttccggcaaacgttcccggttcgaactcccgctcgacttccaaggtaccgaatttcagaaaaaggtctggtccgccctgctcaccattccattcggcgagacccgcagctatacggaaatagccgtgcagatcggcagccccaacgcagtacgggcggttggagccgccaacggacggaacccactgtccattgttgcaccttgccatagggtgatcggagcctctggcggcctcaccggtttcgccggtgggttggccgccaagcagtggttgctgcgtttggaaacccgaggcaggacaccagacctgttgagcatgatcgaggacgagtga

SEQ ID NO: 7720 - DNA, 2802 bp, Pseudomonas aeruginosa
  CDS (1)...(2802)
atgattctggcgctgatcatcgcgctgccgttcatgggggcgttgttgcccctgcttgccgagcgtggcggccgcaccttgtgcgcggcgtccgccggcgtggcgccgctgatcggcctgatcctgttgctcgggcagcgcggcacggtgttcgccgggcagaccctgaccgccagctattcctggctgccggaaatcggcatcaacctcagcctgcgcctggacggcctcggtttcctcttcgctctgctgatcctcggcatcggcctgctggtgattctctacgcccgctactacctctccgaacaggagccgatggggcgtttcttcgctttcctgctgctgttcatgggctccatgctcggcgtggtgctcgcggaaaatctcttgctgatgatgctcttctgggagctgaccagcctgtcctcgttcctgctcatcggcttctggggcagccgttccgacgcccgcaagggtgcgaggatggccctgaccgttaccggagggggcggcctggcgctgctggccggggtgctgctgctcggccacatcgccggcagcttcgaactcaccgaggtcctcgcggctggcgagctgatccgcgcccacgccctgtatccgctggtgctgatactgatcctgctcggcgtgttcaccaagtcggcgcagtttcccttccatttctggctgccccacgcgatggcggcgccgaccccggtttccgcgtacctgcactcggcgaccatggtcaaggccggcgtattcctgctggcccggctgtatccggcgctggccggcaccgagtggttcttctacctggtcagcctgagcggcctggtgacgctgttgctgggggccggcatggcactgttccagcatgacctgaaggggctgctggcctactcgacgatcagccacctgggcctgatcaccctgctgttcggcctcgactccccgctgtcgaacgtcgccgcggtgttccacatcatcaaccacgcgaccttcaaggcctcgctgttcatggccgccgggatcatcgaccacgagaccggcagccgcgacatgcgcctgatcaacgggatgtggaagtacctgccgcataccgcggtgctggccatcgtcgcctccctggcgatggccggggtgccgctgctgaacggcttcctcagcaaggagatgttcttcggcgaaaccctcagccagaacctgctgggcagcttcaactggctggtgccggcggtggcgaccctggccggcgtgttctcggtggcctattcgctgcgtttcatccacgacgtgttcttcaacggcgagccggcccggttgccgaagttcccgccccacgagccgccgcgctacatgaaggtaccggtggagatcctggtgttcctctgcctgttggtcggcatgctgccggcctacaccgtggcgccgctgctggccgccgccgccagtgccagccttggcgggcaactgccggaatacagcctggcgatctggcacggtttcaacctgccattgctgatgagcgtggtggcgctggttggcggtgtgctggtctatgtcctgcgcaagccgctgttcaactggtacgccgggttaccggaggtggacgccaagctggtcttcgagcagcaggtgcaacgtgtggtggccctggccgcgcgcctgaccgcctggctggagaacgggtcgctgcagcgctacctggcctggctgctgggcgcggcgctggtcgtggtggcggtcgagctggcaccgctggcgaggctgaccggctcgcgcgggctgaccccgctggacggtatcaccgccctgggcatgctggtgctggccttcagcggcctggccacggcgctgttccatcgtatgcgcctggtcgcgctattgatcctcagcgtcgccggcctgctggtggccctggccttcgctcgcttctcggccccggacctggcgctgacccagttgtcggtggaagtggtgaccatggtcctgctgatgctggcgctgtatttcctgccctcgcgcactccggcggagtcctccagcctgcgcggcttgcgcgacgtggcgctggccggcggggtcggcatgctggtggcgctgctggcctacgcggtgctgacccggccctacgagagcatcgccggattcttcgtcgagaacagcgtctccgggggcggcggctacaacgtggtcaacgtcatcctggtggacttccgtggtttcgataccctcggcgagatcagcgtgctggcgatcgccggtgtcggcatctacgcgatgctcgccggtttcgccctgcacaagccgacctgcgacccgcagggtcgcaactgggcccacgccaagcacccgctgatcctggaaaccctgtcgcgggtgctgctgccgctggcgttgctgatctcggtgttcatcttcctgcgcggccacaacctgccgggcggaggtttcatcgccggcctggtgactgccatcgccctggtgctgcagtacatcgccagcggctcgcagtgggtcgagcagcgcctaccgctgaactatgcggccatggctggcgccggagtgctgatcgccgggctcaccgggctcggcagctggctgttcggctatccgttcctgacttccgcgttcggccacttcgagttgccgctgatcggcgagatcgagctggccacggcgatgctgttcgacctcggcgtgtacctcaccgtggtcggtgccgcgctgctgatcctgtcctacctcggcaagctcagcctgatgcctgaacccgtcgcacaagaggaggcgctctga

SEQ ID NO: 7721 - DNA, 876 bp, Pseudomonas aeruginosa
  CDS (1)...(876)
atgagcaacgagcgcgataccagcagaaccccgacgcccgaccccgccgagcacaacgcgttctttccctcgccctattccctgagccagtacacctcggcaaagaccgacttcgacggcgccgactacccgaccccgtacaagggcggcaagaaggtgctgatgatcggtaccgacgaacgctacatcctgatgcagaacgccagcatgttctccaccggcaaccacccggtggaaatgctcctgccgatgtaccacctggacaaggccggcttcgagttcgatgtcgccacgctctccggcaacccggtgaagctggagatgtgggcgatgcccggtgaggacgaggcggtgaagagcatctacgcgaagtacctgcccaagctgaaagcgccgcggaagctcgccgacctcctggagcaggccgtcgccgacgactcgccgtacgccgcggtgttcgttcccggcggccacggcgtgctggcgggcattccgcacagccgggaggtgaaacggctgctcaatgccttcctcgccaaggaccgctacatcatcaccctttgccacggtccggcctgcctgctggcaccggcggtcgaggagaagccggaggactacccgttcaagggctacgagatctgcgtgttccccgacgccctggacaccggcgccaacctggagatcggctacatgcccggtcccctgccctggctggtgggcgagaacctgcagaagctcggggtgaagatcctcaacaagggcatcaccggccaggtccaccgcgaccgcaagctgctcaccggcgacagcccgctggcctccaacaaccttggcaagctggccgccaagacccttctcgaagcgttcgcccgctga

SEQ ID NO: 7722 - DNA, 2892 bp, Pseudomonas aeruginosa
  CDS (1)...(2892)
atgcataccgacaccacacgcgagaacccgcaggccagcgcgccgcaggccgccgattcgtcgcaggatctggccgccaccgcgccgggccagctacgcgtgatcaagcgcaacggcaccgtagtcccctacaccgatgacaagatcaccgtcgccatcaccaaggcgttcctcgccgtggaaggcggcaccgccgccgcctcgtcgcgtatccatgacaccgtgcgccgcctgaccgagcaggtcaccgccaccttcaagcgccgcatgccgtccggcggcaccatccacatcgaagagatccaggaccaggtcgaactggccctgatgcgcgccggcgagcagaaggtcgcccgcgactacgtgatctaccgcgaagcccgcgccgccgagcgcaagaacgccggcgccgccagcgacgtcgcccagccgcacccgagcatccgcatcacccgcgccgacggcagcctgtcgccgctggacatgggccgcctgaacaccatcatcagcgaagcctgcgaaggcctggccgaggtggacggcgcgctgatcgagcgcgagaccctgaagaacctctacgacggcgtcgccgagaaggacgtcaacaccgccctggtgatgaccgcgcgcaccctggtcgagcgcgagccgaactactcctacgtcaccgcccgcctgctgatggacaccctgcgcgccgaagccctgggcttcctcggcgtggccgagagcgccacccatcacgagatggccgagctgtacgccaaggccctgccggcctacatcgagaaaggcgccgagttcgagctggtcgatgccaagctgaaggaattcgacctggagaaactgggcaaggccatcgatcacgagcgcgaccagcagttcacctacctcggcctgcagaccctgtacgaccgctacttcatccacaaggacggcatccgcttcgaactgccgcagatcttcttcatgcgcgtggccatgggcctggccatcgaggagaaggaccgcgaggcacgtgccatcgagttctacaacctgctgtcgtccttcgactacatgagttccacccccaccctgttcaacgccggcaccctgcgtccgcagctctccagctgctacctgaccaccgtgccggacgacctgtcgggcatctacggcgccatccacgacaacgccatgctgtcgaaattcgccggcggcctgggcaacgactggaccccggtgcgcgcgctgggctcctacatcaagggcaccaacggcaagtcccagggcgtcgtgcccttcctgaaagtggtcaatgacaccgcggtcgcggtcaaccagggcggcaagcgcaagggcgcggtctgcgcctacctggaaacctggcacctggacatcgaggaattcctcgagctgcgcaagaacaccggtgacgaccgtcgtcgtacccacgacatgaacaccgccaactggatccccgacctgttcatgaagcgcgtcttcgacgacggctcctggaccctcttctcgccgtccgacgtccccgacctgcacgacctctacggcaaggccttcgaggagcgctacgagtactacgaggccctggccagctacggcaagctgaagctgcacaaggtcgtccaggccaaggacctgtggcgcaagatgctctccatgctgttcgagaccggccacccatggctgaccttcaaggacccgtgcaacctgcgcagcccgcagcagcacgtgggcgtggtgcacagctcgaacctctgcaccgagatcaccctgaacaccaacaaggacgagatcgccgtctgcaacctgggctcgatcaacctggtcaaccacatcgtcgacggcaagctggacaccgccaagctggagaagaccgtcaagaccgcggtacgcatgctcgataacgtcatcgacatcaactactactcggtcccgcaggcgcagaactccaacttcaagcaccgtccggtcggcctgggcatcatgggcttccaggacgccctgtacctgcagcacatcccctacggttcggacgcggccatcgccttcgccgaccagtccatggaagccatcagctactacgcgatccaggcttcctgcgacctggccgacgagcgcggcgcctaccaaaccttccagggctcgctgtggtcgcaaggcatcctgccgatcgactcggagaagaagctgatcgaagagcgcggcgccaagtacatcgaagtcgacctgtcggaaaccctcgactgggcgccgctgcgcgagcgcgtacagaaaggcatccgcaactcgaacatcatggccatcgcgccgaccgcgaccatcgccaacatcaccggcgtctcgcagtcgatcgagccgacctaccagaacctgtacgtgaagtcgaacctctccggcgagttcaccgtgatcaacccctacctggtgcgcgacctcaaggcccgcggcctgtgggacccggtcatggtcaacgacctgaagtactacgacggttccgtgcagcagatcgagcgcatcccgcaggacctcaaggacctctacgccaccgcgttcgaagtcgagacccgctggatcgtcgaagccgccagccgtcgccagaagtggatcgaccaggcccagtcgctgaacctgtacatcgccggcgcctcgggcaagaagctcgacgtgacctaccgcatggcctggttccgcggcctgaagaccacctactacctccgtgccctggccgccaccagcaccgagaagtccaccatcaacaccggcaagctcaacgccgtgtcggccggtggcaacgacggcctgcaagccgccccggccgccgagccgaagccggcgccggtgccgcaggcgtgcagcatcgataaccccgactgcgaagcctgccagtga

SEQ ID NO: 7723 - DNA, 711 bp, Pseudomonas aeruginosa
  CDS (1)...(711)
gtggagcaagaagcctggcgcatcctgatcgtcgaggacgatcgacgcctggccgagctgacccgggaatacctggaaggcaacggcctgaaggtcgacatcgaagccaacggcgcactggcggcggcgcgtatcctcgccgaacgcccggacctggtggtgctcgacctgatgctgccgggcgaggacggcctgtccatctgccgccaggtgcgcccgcagttcgacggtccgatcctgatgctcaccgcgcgcaccgacgatatggacgaggtactcggcctggagatgggcgccgacgactacgtgtgcaagccggtgcgcccgcgtgtgctgctggcgcgcatccgtgccctgttgcggcgcagcgaggcgccggaagcgggcgccccggcggcggacagcaaacgcctggcgttcggtcgcctggtgatcgacaacgcgatgcgcgaggcctggctggacgggaccaccatcgagctgaccagcgccgaattcgacctgctctggctgctggcggcgaacgccgggcgcattctctcccgcgaggagatcttcaacgccctgcgcggcatcgagtacgacggccaggaccgctccatcgacgtgcgcatctcgcggattcgcccgaagatcggcgacgacccgatgcacccgcggctgatcaagaccgtgcgcagcaagggctacctgttcgtcggcgagggctga

SEQ ID NO: 7724 - DNA, 585 bp, Pseudomonas aeruginosa
  CDS (1)...(585)
atgagcctgcgcctggacctcctgcggcatggcgaaaccgagtccggcggcggtttccgcggcagcctcgacgacgccttgaccgcgcgtggctgggcgcagatgcgcacggcggtggaaggcggacgctgggacctgctggtcagctcgccattgcaacgttgccgcgccttcgccgaggaactggcgcagcgccaggggatcgagctggaactggaaaacgatctgcgcgaactgcatttcggcgcttgggaggggcgctcggcggccgccctgatggacggccacagcgaggcgctcggccgcttctgggccgatccctacgcctttaccccgccgggcggcgagccgctgtccgagttcgaggcgcgggtgctggccgcccagcgacgcctgcgccagcgtcatgccggccgtcgtgtgctgctggtgacccatggcggcgtcatccgtctgttgctcgctcgcgcccgtggcctgccgcgcgagcacttgctgcaggtggacgtcggtcatggcgcactgttcggcctgcgcgccggagagggcgatgatcgctggcacgaatgccgggaaggggaatag

SEQ ID NO: 7725 - DNA, 540 bp, Pseudomonas aeruginosa
  CDS (1)...(540)
atgggcctgctcgccgcgatcatgctggccgtctacctggcgaatccgttcggcaccgccagtctcgacccgcgcgcacggctcctcggcgtggcgctgtacaagatcccttcgcgctcgatggaaccgaccttgcaacagggcgacttcatcctcgccaacgccgcgcgctacgccttcgccgacccgcaggtcggcgacctggtggtgttccgcttcccgccgcagcgcagcatcgcctatgtgaagcgcatcgccgggatacccggcgatcgcgtgcggatcgatggcggccggctctacgtcaatgagcgcccggtgacggagccctacctggcgcaacaggcgctgcgccagccggaatccctgcgcatggccgagcggaccgtccccgccggccaatacttcatgctcggcgacaaccgcgacaactccaacgacagccgctactggggctacgtaccgcgcgccgacctggtcggccgggtgttcgccgtctggtatgccgaggacacccggcgcatcggttcggtgcgctga

SEQ ID NO: 7726 - DNA, 1542 bp, Pseudomonas aeruginosa
  CDS (1)...(1542)
atgaacccttcgcgtcgtgtcgccctggtcgccgccatttacctgggaaccttcatcgcctcgctcgacatcagcatcgtcaacctcgccctgccgacgctgcagtacgccctggataccgacctggccggcctgcagtgggtggtcgacgcctatgcgctgtgcctgagcgccttcatgctgtcttccggaccgctgagcgaccgctacggtcgcaagctgacctggctgctcggggtcggcctgttcagcttcggttcgctgctctgcgcgctggccacctcgctgccgctgctgctgttcggacgcgcggtccagggcatcgccggggcgctgttgatacccggcgcgctgtcgatccttacccaggctttccacgatcccggccagcgcgcccaggtgatcggcggctggacctccttcagcgcgctgtcgctgatcctcggcccgctgctcggcggcctgctggtggagcacgccggctggcagagcatcttcctgatcaacctgccgctcggcctgctggcgctcgccctgggcctgtggggcatcgaggaaaccgcgcaccccgagcacgccgccttcgatcccctggggcagctgctcagcgtggtctggctgggggcgttgacctacgccctgatcgccgcgggagagggcggctggttgtctcccacggcctggccggcgctgctcctggccggggtcggcctgcttggcttcctcttcgtcgagcggcggaccgcccgaccgctgctgcccctggggttgttccgccaggccgggttcgccgtctgcaacctggcctcgttcgtcctcgggttttccggctacgccagcctgttcttcctctccctgttcttccagcaggtgcagggtgcctcggcgcagcaggccggcttctacctggcgccgcagttcctcgccatgggcgcactgtccatgctgttcggccggttgcagcggcacgtaccgctgcgacgcctgctggtgctgggctacctggtgatcggcctggccatgctggcgctggccgcttgcggtacgggaaccgcgtatccctgggtcggcctgttgctggtggcgctcggcctgggcatgggcctggccgttcccggcaccggtctggcggtcatggcgagcgtggcccgcgagcgttccgggatggcctcggcgaccatgaataccctgcgccaggccggcatggccgtcggcatcgcgttgctgggagcgctgctgagcgggcgggcgatcgtcgtcctgggcgatcggctggaggggctggggattgccgatgcgcaacggctcgccacccaggcggtcacggcccatcgcttgcctggttccctggcggggctcgacgccgagctgccggccgcgctggccgagggcttccgtctggctatgctggtggccggagccagcgccctgctggccgccgcgctgctctggcgcctgcgcgttagcgccggcccggcggcggatacagttggcgcatctggacgaacggcaggggtacagttgcaggccgatagacactga

SEQ ID NO: 7727 - DNA, 1977 bp, Pseudomonas aeruginosa
  CDS (1)...(1977)
atgttcgggaaactgacactctcggccgtgccttaccacgagcccatcgtcatggtcacactggccgtcgtcgccctgctgggcctcggcgtggtcggtgcgatcacctactaccgcaagtggacctacctgtggaccgagtggctgacctcggtcgaccacaagaagatcggcgtgatgtacatcgtcgtcgccctggtcatgctggtccgcggcttcgccgacgcgatcatgatgcgcggccagctggccctggccgaaggcgccaaccacggctacctgccgccggagcactacgaccagatcttcaccgcgcatggcgtgatcatgatcatcttcatggccatgccgttcatgaccggcctgatgaacctggccgtgccgctgcagatcggcgcgcgcgacgtggcgttccccttcctcaactcgctgagcttctggctgctcgtggtcagcgccatgctggtcaacgtgtcgctgggcctgggcgaattcgcccgtaccggctgggtggcctatccgccgctgtcggagctggcctatagccccggggtaggggtggactactacatctgggcgctacagatatccgggatgggcacgttgctcacggggatcaacttcctggtcaccgtgttcaagatgcgtaccccgggcatgaagctgatgcagatgccgatcttcacctggacctgcaccttcgccaacatcctgatcgtcgcctcgttcccgatcctcaccgctgcgctgggcctgctgtcgctcgaccgctacctggacatgcacttcttcaccaacgagctcggcggcaacgccatgatgtacatcaacctcttctgggcctggggccatcccgaggtgtacatcctgatcctgccggccttcggtatcttctccgaggtcaccgcgaccttcgccggcaagcgcatgttcggctacaagtcgatggtctgggccagcgccgcgatcaccttcctcggcttcaccgtgtggctgcaccacttcttcaccatgggttcgggcggtgacgtcaacggcttcttcggcgtggccaccatgctgatctcgatccccaccggggtgaagctgttcaactggctgttcaccatctacaagggccgcctgcgcttcagcacgccgatcctgtggaccctgggcttcatggtgaccttcaccatcggcggcatgaccggcgtcctgctggccatcccgggcgcggacttcctgctgcacaacagcctgttcctgatcgcccacttccacaacaccatcatcggcggcgcggtattcggctacctggccggcttcgccttctggttcccgaaagcgttcggcttcaccctcgacgagaagtggggcaagcgttccttctggtgctggctggtgggcttctacatggccttcatgccgctctacatcctcggcttcatgggcatgacccgtcgcctgaaccactacgacaacccgctgtggaagccctacctggtggtcgcgttcttcggcgccgtgctgatcttctgcggcatcgcctgccaactgatccagctgttcgtctcggtccgcaaccgcaagcaactggccgacgtcaatggcgacccgtgggaaggccgcaccctggaatgggccacttcctcgccgccgccgttctacaacttcgccgagctgccgaaggtacaggacgtggatgccttccacgacatgaagaaggccggcaccgcctaccgcaagctgccggcctaccagccgatccacatgccgaagaacaccgccgcgggcttctccatcgccgtgttcgccttcgtcttcggcttcgccgccatctggcatatctggtggctcatggcggtcggcttcgtcggcatgatcggctccttcatcgtgcgcagctacaaccaggacgtcgactactacgtccagcccgaagagatcgagaagatcgaaagcgcccgtttccagcaactcgccaagcaggtctga

SEQ ID NO: 7728 - DNA, 1269 bp, Pseudomonas aeruginosa
  CDS (1)...(1269)
atgaagggtaatgcgccggtacttgcggccgtagatataagcaagggttttagagtctacagggctcctcatcaaaggatgttgcaggccatctggggtgagagaaagaaattttattcggaattctgggctctgcggaatgtgagtttccaggtttttcctggggaggttgttggagtaatcggctgcaacggctccgggaagtccaccttgctgcagatacttgcgggtaccttgcgccctacgagtggacaggtggttcgcccagaaagggtagcggcattgttggagctgggggccggtttcaacatggagtacaccggcagggaaaacataatcttcaatgccatgcttcttggattgggcgagcaggagatttctgaacgcctcgacgagataatccagtttgccgatatcggtgagttcatcgatcgtccggttagaacatattcgagcggtatgttcgtgcgtttggctttctccattgcggcatatgtcgatgccgatgtgctgatcgtggacgaggccctggcggtaggtgacgccgcgtttcagttcaaatgcctgaaccggcttgaagaactgctgctgaaaggcatcaccatcctgctggtctcccacgatatacagttgatcaagagttattgtagtcgagcgatctatctatccaaaggtagagtgatattcgatggcgactgtgaaacagccacggaactctatctgcgggacagtatagagacacagcgggcggaagtccgctcaggaagcctgatcgcttctggcgaacacgggaactcggtaattgcatatggaaatgggcagggcaggtttctatccatccgtatgggtgtacttgacgaagcccgggattacttcgattcgggcgaacgtgtctgggtcgaggtacttgtgcaatttgacctacccgtcccggagcacccaaaaatcaccctgactatccgtgaccagcgcggttacaacctctatggcataaacaatttattgctgggcaaggctctgaatgtcgagcctgacgggcgcttgagaacacgtatcagcttcgactgcgacttgcaggctggcgaatacgccttgacgtttcgtctggagaactctttgtcggagtccgtttgcgaactcatggataaaaaggtcaatgcggcgatattcagggtcttcaattcgcccaagtgcttcgatgcagtggtgaatctgcatggagcattcgagccggttccgttctgctgcgagacccgggctacccaatga

SEQ ID NO: 7729 - DNA, 1434 bp, Pseudomonas aeruginosa
  CDS (1)...(1434)
atgacagccgacaagaaagccaagatcctcgccaccctcggcccggccacccgcagccgcgacgatatccgtgccctggtggaggccggcgccaacctgctccgcctgaacttcagccacggcgactatgccgatcacgcgcagcgcttcgcctgggtgcgcgaggtggaagcggagctgaactacccgatcggcgtgctcatggacctgcagggtccgaagctgcgggtcggccgcttcgccgccggtgccgtgcaattgcagcgtgggcagaccttcaccctcgacctcagcgacgcccccggcgacgagcggcgggtcaacctgccgcatccggagatcatccatgccctggaaccgggcatgagcctgctgctggacgacggcaagatccgcctggaagtggtcaactgccacagcgacgccatcgagacccgcgtggcggtgggtggcgagctgtccgatcgcaagggcgtcaacgtgccggaagcggtgctgcaactcagcccgctgaccgacaaggaccgccgcgatctggccttcggcctggaactgggggtcgactgggtggcgctgtccttcgtgcaacgcccggaggacatcgacgaggcccgtgggctgatcggcgacaaggccttcctcatggccaagatcgagaagcccagcgcggtgagcgccatcgaggcgatcgccgagcgcgccgacgcgatcatggtggcgcgcggcgacctcggcgtagaggtgccggcggagagcgtgccaggcatccagaaacgcatcgtccaggtctgccgccagctcggcaagccggtggtggtggccacccagatgctcgagtcgatgcgcttctcccccgccccgacccgcgccgaggtgaccgacgtagccaccgcggtgggcgccggcgccgacgcggtgatgctctcggcggaaaccgcttccggacaataccctcgcgaggcggtagagatgatggcgaagatcgtccgccaggtggaggccgagccggactaccacgtccagctcgaggtcaaccgtccgcagcccgacgctaccgtctccgatgcgatcagctgcgcgatccgccgggtcagccggatcctcccggtggcggtgctggtgaactacaccgagtcgggcaactcgaccctgcgcgccgcccgcgagcggcccaaggcgccgatcctcagcctgaccccgaacctgcgtaccgcgcggcgactgaccgtggcctggggcgtgtattcggtggtcaacgagcaactggcgcacgtcgacgagatctgctcgaccgccctcgacatcgccctggcccagcgcatggcgcgccgcggcgacaccgtggtggtcaccgccggcgtaccgttcggtcgccccggctcgaccaacatgctgcgcatcgagaccgtggcgccgccgctgggagatctctga

SEQ ID NO: 7730 - DNA, 1305 bp, Pseudomonas aeruginosa
  CDS (1)...(1305)
atgacccgcaacgccaaagcctaccgcgccgccatcctgcacagcatcgccgaccccgcggaggtcggcgtcgaacgctcctacgaatacttcgaggacggcctgttgctggtggaggacggcaaggtcgctcgcctcggtgacgccgaaaccctgctcggcgagatcggcgaggtcgaggtcttcgagtaccgcgacgcgctgatcacccccggcttcatcgatacccacatccatttcccgcagaccgggatgatcgcctcctacggcgaacaactgctggactggctgaacacctataccttccccaccgagcgccaattcggcgaccaggcccatgccgaccaggtcgccgagatcttcctgcaggaactgctgcgcaacggcaccaccaccgccctggtcttcggcagcgtgcaccggcaatcggtggaatcgctgttcgaggccgcccggcgcctggacctgcgcctgatcgccggcaaggtgatgatggaccgcaacgcgccggactacctgaccgacaccgccgagagcagctaccgcgacagcaaggcgctgatcgagcgctggcacggccagggccgtctgctctacgcggtgaccccgcgcttcgccccgaccagcaccgcggaacagctggacatggcggcgcggctgctgcgcgagcatcccggcgtatacctgcacacccatctgtcggagaacctcaaggaaatcgagtgggtgaaggagctgttccccgagcgcagcggctacctggacgtctacgaccaccacggcctgctcgggccgcgctcggtgttcgcccatggcgtgcacctgtgcgacggcgaatgccagcgcctggcggagactggctcggcggtggcgttctgcccgacctccaacctgttcctcggcagcggtctgttcgacctgccgaagctggagcgctacaaggtcaaggtcggcctcggcaccgatgtcggcgccggcaccagcttctcccagctgcagtccctgaacgaggcgtacaaggtcatgcagttgcagggcgcccgcctcgatccgttcaagtcgctctacctcgccaccctcggcggcgcccgtgcgctggagctggacgaccggatcggcagcttcgccaccagcaacgaggcggacttcgtggtcctcgactaccacgccaccccgctgctctcctaccgcctgagccaggccggcagcctggccgaacggctgttcgcgctgaccatcctcggcgacgaccgcacggtgaaggaaaccttcgccgccggtcgctcggtgcatcgccgcgactga

SEQ ID NO: 7731 - DNA, 3489 bp, Pseudomonas aeruginosa
  CDS (1)...(3489)
atgcgcctgaagagcatcaagctggcggggttcaagtccttcgtcgatccgaccacggtgaacttccccagcaacatggcggcagtggtagggccgaacggctgcggcaagtcgaacatcatcgacgcggtgcgctgggtgatgggcgaaagctcggcgaagaacctgcgcggcgagtcgatgaccgatgtcatcttcaacggctcgaatacccgcaagccggtgagccaggcgagcatcgagctgatcttcgacaacgccgagaccaccctggtgggcgaatacgcccagtacgccgagatatccattcgccggcgggtctcgcgggatgggcagaacacctatttcctcaacggcaccaagtgccggcggcgcgacatcaccgacatcttcctcggcaccggcctggggccgcgcagctactcgatcatcgaacagggcatgatctccaagctgatcgaggcgcgtccggaagacctgcgcaacttcatcgaggaagccgcgggcatttccaagtacaaggagcgccgccgcgaaaccgaaagccgcatccgtcggacccaggaaaacctggcacgcctcaccgacctgcgcgaagagctggggcggcaactggaacgcctgcaccggcaggcccagtcggcggaaaaataccaggaacacaaggccgaggagcgccagctcaaggcccagctgggtgccgtgcgctggcgcgacctgaacgagcaggtcggtcagcgcgagcgggtcatcggcgaccaggagatcgccttcgaggccctggtggccgagcagcgtggtgccgatgccggcatcgaacggctgcgcgacggccatcacgagttgtccgaacgcttcaaccaggtgcaggcacgcttctattcggtcggcggcgacatcgcccgggtcgagcagagcatccagcatggccagcagcgccagcgccagttgcaggacgacttgcgcgaagccgaacggacccgccaggaaaccgaatcgcacctcgggcatgaccgtaccttgctcgcgaccctggccgaggaaatggccatgctcgcaccggaacaggaactcagcgcggccgccgcggaagaagcgggcatcgccctggaacaggccgagcagggcatgcaggcctggcagcagcagtgggatgccttcaaccagcagagcgccgaaccccgccgccaggccgaggtgcagcagtcgcgcatccagcacctggagcagagcctggagcgcctgcaggatcgcgagcggcgcctgcaggaggagcgtggccagttggcggccgaccccgaggacgcggcgatcctcgaactcaacgaacaggtggcgatcgccgaactggccctggaagaactgcaattgcaggagcagggccaagccgagcgactcgaacaattgcgccaggaattgcagcagctggccgccgaacagcaccaggcgcagggcgagttgcagcgcctgaacgggcgcatcgcttcgctggaggccctgcagcaggccgctctcgatcccggacagggcgccttggagtggttgcgcgagcagggcctggaacaacgtccgcgcctcgccgaaggcttgcgtgtcgagccgggttgggagctggcggtggagaccgtgctcggcgcggatctgcaggcggtcttgctggacggcttcgacgggctcgccctggccggcttcggcaagggcgagctgcgcctgctcagccccgctcgcggagccgcgacggcggccggttcgctgctggacaaggtccgcgccgacgccgacctgagtccctggttggcccgggtgaaaccggtggagaccctggaacaggcgctcgcccagcgcggcgccctggacgacggcgagagcctgatcagtcgcgatggctactgggtcggccggcacttcctgcgggtccggcgcagcgacgaggcccagggcggcatgctcgcccgcgcccaggaactggaggcgttgcaggagcggcgggaggccctggaaacccgtgtcgccgaaggcgaggagcgtctggctgcggcccgcgacgagcagcgcgagctggaaggcgcgcgggagcaggtgcggcgccaggtccaggaggaggggcgccggcacggcgagctgaaggcgcagttgtccgcgcagcaggccaaggtcgagcaactggtactgcgtcgccgccgtctcgacgaagaagtggcggaactggccgagcagcgcgcgctggaacaggagcaactgagcgaggcgcgcctgaccctgcaggaagcgctggatagcatggcgctggacaccgagcgccgggaatccctgctggcggagcgtgacgccctgcgcgaacggctcgaccggattcgccaggatgcccgcacccacaaggaccatgcgcaccagttggcggtgcgggtcggctcgctgaaggcgcagcacaattccacccagcaggccctggagcgcctcgaccagcagtcggcgcgcctcaacgagcgttgcgaacagctcaacctcaatctggaggagggggcggcaccgctggaagagctgcgcatgaagctcgaggagttgctggagcggcggatggccgtcgaggacgaactcaagcaggcgcggctggccctggaagacgccgatcgcgaactgcgcgaggtggagaagcgccgcggccaggccgagcagcaatcgcaactgctgcgtggccagctggagcagcagcgcctggagtggcaggggctggtggtgcggcgcaaagccttgcaggagcagctcgccgaagacggctacgacctgcatacggtactggccaacctgcccctggatgccagcgaacgcgattgggaggagcgtctcgagagtctcgcggcgcgcatccagcgtctggggccgatcaacctggcggcgatcgaggagtaccagcagcagtccgagcgcaagcgctacctggactcgcagaacgacgacctggccgaagcgctggagacgctggaaaacgtcatccgcaagatcgaccgggaaacccgcaatcgtttcaaggaaaccttcgaccagatcaatgctggccttcaggcattgttcccgaaggtattcggcggcggtacggcatatctggaacttaccggcgaagatctactcgataccggtgtggcgatcatggcgcgcccgccgggcaagaagaacagcaccatccacttgttgtccggcggggaaaaggcgctgaccgcgctggcgctggtattcgccatcttccagttgaacccggcgccgttctgcatgctcgacgaagtcgatgcgccattggacgatgccaacgtcggacgttatgcgcgattggtgaaggagatgtcggaaaaggtgcagttcatctatatcacccacaacaagatcgccatggaaatggccgatcagttgatgggcgtgaccatgcatgagccgggctgttcacggcttgttgcagttgacgtggaagaggcggtcgcattggctgaagcctga

SEQ ID NO: 7732 - DNA, 2385 bp, Pseudomonas aeruginosa
  CDS (1)...(2385)
atgaccgacacccaggctgccgccgaacgcatcgcgcaactgcgaaccgaactggacacccacaattaccgttactacgtgctcgacgaaccgagcattcccgacgccgaatacgatcgcctgttccgcgagttgcaggcgctggaggccgagtacccgcaactgctgacgcccgactcgccgacccagcgggtcagcggcacgccggcctcggcgttcggcgaagtgcgccatgagatccccatgctcagcctcggcaacgccttcgaggagcaggacctgctggacttcgaccgccgcgtacgcgaaggactggccgacctgttgcctggcggcgacctgctcggcggtggcgcggaggtcgagtacagttgcgagccgaagctggacggcctggccgtcagcctgctctacgaacgcggccaactggtgcgcggcgccacccgtggcgatggcagcaccggcgaggacatcaccagcaacgtacgcaccattcgcaacgtaccgctgaagctgcacggcgaaggctggccggagatcctcgaagtgcgcggcgaggtgttcatgtccaaggccggtttcgaggcgctcaacgccaaggccgtggaaaccggcggcaaaaccttcgccaacccgcgcaacgcggcggccggcagcctgcgccagctggattcaaagatcaccgccagtcgcccgctggaattctgtgcctacggcttcggccaggtcagcgggacgctgccggacacccaggtgggcatcctcgaggcgttccgcggctggggtatccccatcagtcgcgagctgcgcctggtcaagggcgcccaggcctgccgcgactactacgacgacatcggtcgccgacgcgatgcgctggcctacgagatcgacggcgtggtgttcaaggtcaaccgcatcgccttccagcgcgaactgggcttccgcgcgcgcgagccgcgttgggcgatcgcccacaagttccccgcgcgcgaggagttgaccgagctgctgggtgtcgagttccaggtcggccgcaccggcgccgtgaccccggtggcacgcctcaagccggtgcaggtggccggcgtcacggtgtccaatgcgaccctgcacaacatggatgaagtcgcccgcctgggcctgcgcatcggtgatacggtggtgatccgccgtgctggcgatgtgattccgcaggtcatgcaggtggtgctcgagcgccgcccggcggatgcgcaggctatcgaggtgcccgagcattgcccggtctgcggctcggccgtggagcggacccagttggtcaagcgcagcaagggcaaggagtcgatcagcgagggcgccatctatcgctgcgtcggccgcctctcctgtcaggcgcagttgaagcaggcgatcatccatttcgtatcgcgccgggcaatggatatcgacggtcttggcgacaagatcgtcgagcaactggtggatcgcgggctggtcgcctcgccggcggatctctataccctgacctatgaacaggtgttcgagctggaagggttcgccgagctgtccaccaacaacctgctgacggctatcgccgatagccgcaagccttcgctggcgcgcttcatcttcgctctggggattcccgacgtcggcgaggaaaccgccaagctgctggcgcgttcgctgggttcgctcgagcggatcggcaaggcgctcccggaagtgttgacctacctgccggacgtcggcgccgaggtagcctacgagatccacaacttcttcgccgacgagcacaaccgccaggtgatcgcccagttgcgcgatgccgaacatggcgtgcagttgcaggaagagggcgaggtcgccgcggagttcgccgcctgtgcctcgctggccggtttcatcgacaagctgaacattcccttcatcgccgccaccggcgcggaaaagctggctagccgcttcggttcgctcgacggcatcatccgtgccgactggctcgatctgcgccaggtggagcgtctgcccgagcgagcggcgaaaagcctgcgcgatttcttcgacgagccggccaacgtgcagcgtgccctggccatcgaggcgcagttgcgtgagttcggcatgcattggcagagcgagcgcaaggcggtcgaaggcctgcctctggccgggcagacctgggtgctgaccggcaccctggaggcgatgagccgggacgtggccaaggacaagctggaagggctcggcgccaaggtggccggctcggtgtcggccaagacccactgcgtggtcgccgggcccggcgccggctcgaagctggccaaggccaacgagctgggcgtgaaggtgctcgacgaagacggcctgctgaaactgttcgacgagcacggcgtcgcccgctga

SEQ ID NO: 7733 - DNA, 2046 bp, Pseudomonas aeruginosa
  CDS (1)...(2046)
atgagttatcaagttcttgcgcgtaaatggcgtccccgttccttccgtgaaatggtcggccagacccatgtgctcaaggctctgatcaacgccctggacaaccagcggctgcaccatgcctacctgttcaccggtacccgcggggtcggcaagaccaccatcgcgcggatcctggccaagtgcctgaactgcgagaccggggtcagctccacgccgtgcggcgaatgctcggtctgtcgcgaaatcgacgaaggccgcttcgtcgacctgatcgaagtggacgccgcgagccggaccaaggtcgaggatacccgcgagctgctcgacaacgtgcagtactcgccgacccgcggacgctacaaggtctacctgatcgacgaagtgcacatgctctcgtcgcacagtttcaatgcgctgctcaagaccctcgaggagccgccgccgcacgtcaagttcctgctggccaccaccgacccgcagaagttgccggtgaccatcctctcgcgctgtctgcagttctccctgaagaacatgccgccggagcgggtggtcgagcacctgacccacgtgctcggagccgagaacgtgcccttcgaggatgacgccctgtggttgctcgggcgcgccgccgacggctcgatgcgtgacgccatgagcctgaccgaccaggccatcgccttcggcgagggcaaggtgctggccgcagacgtgcgggcgatgctcggtaccctcgatcacggccaggtctatggcgtgctccaggccttgctggagggcgatgcgcgcgccctgctcgaagcggtgcgccacctggccgagcagggcccggactggggcggcgtgcttgccgaaatactcaacgtgctgcaccgcgtcgcgatcgcccaggccctgccggaagcgatcgacaatggccagggcgaccgcgagcgggtgctggccctggcccaggcgttgccggcggaagacgtacagttctattaccagatgggcctgatcggccgccgcgacctgccgctggcgcccgatccgcgtagcggcttcgagatggtgttgctgcggatgctcgcgttccgcccggcggacgccgacggcgtgccgaggacgccgctaaaggacctggggatcagcaaggccacgactgatcccgccaactcccccgtggccggcgcggcctcgcctgcgccggtcgctaccgttgctcccgcgcctgtcgtggctgcgcccgtcgaagccccggctgccccgccggcagcgccatccgcgccgccggcggcggtcgaggcgcgcgtcacggaagcggttgtcgaagagcccgccgccgcagcagaggtcgtcgacttgccctgggaagagccggcgccgagcctcgctgccgagcccgagcccgagcccgagcccgagccgctagccgtggaggctccctcggtccctccggcagtggcggtcgaggcggtggtggaaaccgttctggaagccctgccggctgcgttgccggtagcacctgacgagcaggacgagcaggacgacgagccaccgcccgcggacgactattacgaagtcgatatggataccctggcctacctggatgccacgcccgagcctgacgtggtcgtggtggaggagccgctgccggcggcgaagccggccaccggcctggccgcggagtggctggagctgttcccgcggctcggcctcggcggcctgaccgccagcatcggtgccaactgtacgctggtagctgccgacgacgaccactggcatctgcatctcgatccgggccagagcgcgctgttcaacgccacccagcagcggcggctgaacgatgcgctgaaccagcacctggggcgcaccctcaaactggaggtgaccctgcagaagcctgagcaggagaccccggcccaggcagcggcacgccggcgtgccgagcgccagcgggcggccgaggcatcgatcgatgccgacccgttggtccggcagttgcgcgagcagttcgccgcggtggtccgtgacggtaccatcgaacctttggaagccaaggcctga

SEQ ID NO: 7734 - DNA, 327 bp, Pseudomonas aeruginosa
  CDS (1)...(327)
atgatgaaaggtggcatggccggcctgatgaagcaggcgcagcagatgcaggaaaagatgcagaagatgcaggaagaactggccaacgccgaagtgaccgggcaatccggcgccggtctggtcagtgtggtgatgaccgggcgccacgacgtcaagcgcgtcagcctggacgacagcctgatgcaggaagacaaggaaatcctcgaagacctgatcgcggccgcggtcaacgatgcggtgcgcaagatcgagcagaacaaccaggaaaagatgtccggcttcacctcgggcatgcaactgccgcccggcttcaagatgcccttctga

SEQ ID NO: 7735 - DNA, 597 bp, Pseudomonas aeruginosa
  CDS (1)...(597)
atgagtttcagcccgctgatccgccaactgatcgagtccctgcgcattcttcccggtgtcgggcagaagtcggcccagcgcatggcgctgatgctgctggagcgcgatcgcagcggcggcctgaagctggcccaggcgttgaccgccgcgatggaaggggtcggtcattgccggcagtgccgtaccctcagcgaggaggagttgtgcccgcagtgcgccgacccgcgacgcgacgactcgctgctctgcgtggtggaaggcccgctggacgtattcgcggtggagcagaccggctaccgcggccgctatttcgtgctcaagggacacctgtcgccgctcgacggcctggggccggaggcgatcggcattcccgaactggaagcgcggatcagggacggagccttcagcgaggtgatcctcgccaccaaccccaccgtcgaaggcgaggccaccgcccactatatcgcccagctactggccggccgcggcctgaccttgtcgcgtatcgcccatggcgtgccgctgggcggcgagctggagctggtcgatggcggcaccttggcccacgccctggccggacggcggccgatctcctga

SEQ ID NO: 7736 - DNA, 888 bp, Pseudomonas aeruginosa
  CDS (1)...(888)
atgaagtcgttcgaaaacaaagtcgccgccatcaccggcgcaggctcgggcatcggtcgcgccctggccgtggagctgggcaggcagggttgtcacctggccctggccgacgtcaatgccgcagctctcgaggaaacccgccaattgctcgccagcagcggggtacgcgtctccaccgcggtcgtcgacgtggccgaccgcgagcaggtgcaggcctgggccgacaaggcggccagcgaacatggccgggtgaacctgattttcaacaacgcgggcgtcgcccacgcaggtaccgtggaaggcagcgactactcggaatacgagtggatcatgaacatcaacttctggggcgtggtgaacggcaccaaggcgttccttccgcacctgaaggcctccggcaacggccacgtggtcaatgtctccagcgtcttcgggctgttcgcccagcccggcatgagcgcctacaacgccaccaagtacgcggtgcgcggcttcaccgagtcgttgcgccaggaactggacatggaggactccggcgtctccgccagttgcgtgcatcccggcgggatcaagaccaacatcgccaagaccgcgcgaatgaacgagagcatggccaaggtcaccggccaggctccggacaaggctcgcgagcaattcaacgaccagttgctgcggaccaccccggagaaggccgcccaggtcatcctgcgcggcgtgcagcgcgacagccggcgcatcctgatcggcaccgacgcccacgcgatcgacgtgatgctgcgcctggcaccagtgctctaccagcgcctggtcaccgccagcatgcgcctggcagcgcgcttcgcgccgcgcccgaagagcccccagggcgcccgcgaagccagcgagtga

SEQ ID NO: 7737 - DNA, 2832 bp, Pseudomonas aeruginosa
  CDS (1)...(2832)
atgcacgaaagcgtaatgcagcggatgtggaacagtgcccatctatccggtggtaacgctgcctacgtcgaagagctctacgagctctacctgcacgaccctaacgctgtgccagaagagtggcgcacgtatttccagaagcttcccgccgatggcaatcccgcccccgacgtctcgcactccacagtgcgcgatcatttcgtcctgctggccaagaaccagcgccgtgcccagccggtttccgccggtagcgtgagcagcgagcacgagaagaagcaggtcgaagtccttcgtctcattcacgcttaccgtctccgcggccaccaggcttccaccctcgacccgctcggcctgtggcagcgtcccgcgcctgccgacctgtcgatcgaccactacggtctgacgggtgccgacctggacaccactttccgcaccggtgagctttacatcggcaaggaagaggcgaccctgcgtgaaatcgtcgacagcctgaagagcacctactgcggtaccttcggcgccgagttcatgcacatcgtcgattccgagcagcgcaagtggttcctccagcgtctggaaagcgtgcgtggtcgtcccggcttctccgccgaggcgcgtgcgcacctgctcgagcgcctgaccgcggccgaaggcctggagaagtacctgggcaccaagtacccgggcaccaagcgtttcggcctggaaggcggcgaaagcctgatcccgatggtcgacgagatcatccagcgctgcggttcctacggcgccaaggaaatcgtcatcggcatggcccaccgcggtcgcctgaacgtcctggtcaacaccctgggcaagaacccgcgcgacctgttcgacgagttcgaaggcaagaagatcgtcgagctgggctccggtgacgtgaagtaccaccagggcttctcctcgaacgtgatgaccagcggtggcgaagtccacctggcgctggcgttcaacccgtcccacctggaaatcgtttccccggtggtcgagggttccgttcgtgctcgccaggaccgccgcaaggacagctccggcgacaaggtggtaccgatttccatccacggcgatgccgccttcgcggggcagggcgtggtcatggaaaccttccagatgtcgcagacccgcgcctacaagaccggtggcaccatccacctggtgatcaacaaccaggtcggtttcaccaccagccgccaggacgatgcgcgttccaccgagtacgccaccgacgtggcgaagatgattcaggcgccgatcttccacgtcaacggcgacgatcccgaagccgtgctgttcgtcacccaactggccgtcgactaccgcatgcagttcaagcgtgacgtggtcatcgacctggtctgctaccgtcgccgcggccacaacgaggcggacgagccgagcggcacccagccgctgatgtaccagcagatcgccaagcagcgtactacccgcgagctgtacgccgatgccctggtgaatgccggcgtgctcagcgccgagcaggttcagtcgaagatcgacgactaccgcgacgcccttgacaacggcctgcacgtggtgaagagcctggtcaaggaacccaacaaggaactgttcgtcgactggcgtccgtacctgggtcatgcctggaccgcgcgtcacgacacccgcttcgacctgaagaccctgcaggaactgtccagcaagatgctggaagtgccggaaggcttcgtggttcagcgccaggtttcgaagatctacgaagatcgccagaagatggcggccggtggcctgccgatcaactggggcttcgccgagaccctggcctacgcgaccctgctgttcgaaggccatccggtacggatgaccggccaggacgtcggccgtggcaccttctcgcaccgtcacgcggtgctgcacaaccagaaggatgactcggtctacgtaccgctggccaatctgttcgacggccagccgcgcctggatatctacgattccttcctttcggaagaggccgtgctggcgttcgaatacggtttcgccaccaccacgccgaactcgctggtgatctgggaagcccagttcggcgacttcgccaacggcgcccaggtggtcatcgaccagttcatcaccagtggcgaaagcaaatggggccgactctgcggcctgaccatgctgctgccgcacggctatgaggggcagggcccggagcactcctccgcgcgcctggagcgctacctgcagctctgtgccgagcagaacatccaggtctgcgtgccgaccaccccggctcaggtctaccacatgctccgccgtcaggtgatccgcccgctgcgcaagccgctggtggtgatgacgccgaagtccctgctgcgtcacaagctcgccatctcgaccctggaagatctggccaacggttccttccagactgtgatcccggaaatcgacagcctggatccgaagaaggtcgaccgcgtcgtgctgtgcagcggcaaggtgtactacgacctgctggagaagcgtcgcgcggaaggccgcgaagataccgcgatcgtccgtatcgagcagctgtatccgttcccggaagacgacctggcggaagttctggctccgtacaagaacctcaagcacatcgtctggtgccaggaagagccgatgaaccagggcgcctggttctgcagccagcatcacatgcgtcgtgtcatcgccgcgcacaagaagggcctcaatctcgagtacgccggccgcgaaggctccgctgctccggcttgcggctacgcctcgatgcacgccgagcagcaggaaaaactgctgcaagacgcctttactgtttaa

SEQ ID NO: 7738 - DNA, 1437 bp, Pseudomonas aeruginosa
  CDS (1)...(1437)
atgagccagaaattcgacgtggtagtgattggtgccggccccggcggttacgttgccgccatccgcgctgcccagctgggcctgaagaccgcctgcatcgagaagtacatcggcaaggaaggcaaggtggcgctcggcggtacctgcctgaacgttggctgcatcccgtccaaggcgctgctggacagctcctacaagtaccatgaggccaaagaggccttcaaagtccatggtatcgaagccaagggcgtcaccatcgacgttccggcgatggttgcgcgcaaggccaacatcgtcaagaacctgaccggcggcatcgctaccctgttcaaggccaacggcgtgacctccttcgaaggccacggcaagctgctggccaacaagcaggtggaagtgaccggcctggacggcaagacccaggtcctggaagccgagaacgtgatcatcgcttccggctcccgcccggtggagatcccgccggccccgctgaccgacgacatcatcgtcgactccaccggcgccctggaattccaggccgtgccgaagaagctgggtgtgatcggcgccggcgtcatcggcctggagctgggttcggtatgggcccgcctgggtgccgaggtgaccgtgctggaagccctggacaagttcctcccggctgccgacgagcagatcgccaaggaagccctgaaggtcctgaccaagcaaggcctgaacattcgcctgggcgcccgcgtgaccgcttcggaagtgaagaagaagcaggtcaccgtgaccttcaccgatgccaacggcgagcagaaggaaaccttcgacaagctgatcgtcgcggtcggccgtcgcccggtgaccaccgacctgctggccgccgacagcggcgtgaccctggacgagcgtggcttcatctacgtcgacgaccactgcaagaccagcgttccgggcgtcttcgccatcggtgacgtggttcgcggcgcgatgctcgcgcacaaggcctcggaagagggcgtgatggtcgccgagcgcatcgccggccacaaggcgcagatgaactacgacctgattccgtcggtcatctacacccacccggaaatcgcctgggtcggcaagaccgagcagaccctcaaggccgagggcgtcgaagtcaacgtcggcaccttcccgttcgccgccagcggtcgcgcgatggctgccaatgacaccaccggcctggtcaaggtcatcgccgatgcgaagaccgaccgcgtcctgggcgtccacgtgatcggcccgagcgccgccgagctggtacagcaaggcgcgatcggcatggaattcggcaccagcgccgaagacctgggcatgatggtcttctctcacccgacgctgtccgaagccctgcacgaagctgccctggcagtgaatggccatgccatccacatcgccaaccgcaagaagcgctga

SEQ ID NO: 7739 - DNA, 888 bp, Pseudomonas aeruginosa
  CDS (1)...(888)
atgagcgtcctgatcaacaaagacaccaaagtcatctgccaaggcttcaccggtagccagggtaccttccactccgaacaggccatcgcctatggcaccaagatggtcggcggcgtgacccccggcaagggcggcaccacccacctcggcctgccggtgttcaacaccgtcaaggaagccgtggaagccaccggcgccgaagcctcggtcatctacgttccggctccgttctgcaaggactcgatcctggaagcggcattcggcggcatcaagctgatcgtctgcatcaccgaaggcatcccgaccctcgacatgctggacgccaaggtcaagtgcgacgagctgggcgtacgcctgatcggcccgaactgcccgggcgtgatcactcccggcgagtgcaagatcggcatcatgccgggtcacatccacctgccgggcaaggtaggcatcgtgtcgcgttccggcaccctgacctacgaagccgtgaagcagaccaccgacgccggcttcggccagtccacctgcgtgggcatcggcggcgacccgatcccgggctccaacttcatcgacatcctgaagctgttccaggaagatccgcagaccgaagccatcgtcatgatcggcgagatcggtggttccgccgaagaagaagccgcggccttcatcaaggctaacgtgaccaagccggtggtgtcctacatcgctggtgtgactgcccctccgggcaagcgcatgggccacgccggcgccatcatctccggcggcaagggcaccgcggacgagaagttcgccgccctgcaggacgccggtgtgaagaccgtgcgttccctggccgacatcggcaaggccctggccgagctgaccggttgggaagtgaagaaggcctga

SEQ ID NO: 7740 - DNA, 1314 bp, Pseudomonas aeruginosa
  CDS (1)...(1314)
atgactcatttgaaagggttcgacctgctcgcccttggcttcatgacgttcgcgctttttctcggcgcgggtaacatcatctttcctcccagtgccggcatggcggcgggcgaacacgtatggagcgcggctttcggcttcctccttaccggtgtcggcctgccgttgctgacggtggtcgccctggcccgggtcggaggcggtattggccgcctgacccagccgatcgggcggcgcgcgggagtggcgttcgccatcgccgtctatcttgccatcggcccgctgttcgccaccccgcgtacagccgtggtgtccttcgagatgggcgtcgcgcccttcaccggggacggcggcgtgccgttgctcatctataccgtcgcttacttctccgtggttctgttcctggtgctgaacccgggtcgccttgtcgaccgggtcggaaaggtcatcacgccggtgctgctgtcggccctgctggtccttggcggcgcggcgatcttcgcgccggcgggagagatcggcagcagttccggcgagtaccagagcgcgcccctggtgcagggcttcctgcagggctacctgaccatggataccctcggtgcgctggtcttcggtatcgtcatcgccaccgccattcgcgaccgcggcatcagcgacagccggctggtcacgcgctattccatgatcgccggggtcatcgccgccaccggcctgtccctggtctacctggcgctgttctatcttggcgccaccagccagggcatcgccggcgacgcccagaatggcgtacagatcctcaccgcctatgtgcagcagacctttggcgtttccggcagcctgttgctggcggtggtcatcaccctggcctgcctgaccacggcggtagggctgatcacggcgtgcggcgagttcttcagcgacctgctgccggtttcgtacaagacggtggtgatcgtgttctcgctgttcagcctgctggtcgccaaccagggactgacccagttgatcagcctttcggtaccggttctggtgggactctatccgctcgccatcgtgctgatcgccctgagcctgttcgaccggctctgggtgtcggccccgcgggtgttcgtgccggtgatgatcgtcgcgctgctcttcggcatcgtcgacgggctgggggcggccaagctgaacgggtgggtgccggacgtcttcgccaagcttccgctcgccgatcagagccttggctggctgctgccggtatccattgcgctggtcctggcagtcgtttgcgatcggctgctgggcaagccgcgcgaagcggtcgcctga

SEQ ID NO: 7741 - DNA, 1023 bp, Pseudomonas aeruginosa
  CDS (1)...(1023)
atgacagagcagcaaccgattgccgtgctcggcggcggcagtttcggcaccgccatcgccaacctgctggccgagaacggccaggcggtccgccagtggatgcgcgacccggaacaggccgaggcgatccgcacacgacgcgagaacccgcgctacctgaaaggggtcaaggtgcatcccggagtcgacccggtcaccgacctggagcgcaccctggccgattgccaactgatcttcgtcgccttgccctccagcgccctgcgcaaggtgctgcaaccacaccaggcggcattgacggacaagctgctggtgagcctgaccaagggcatcgaggcgcacaccttcaagctgatgagtgagatcctcgaggaaatcgccccgcaagcccgcatcggggtgatttccggcccgaacctggcgcgcgagatcgcagagcacgagctgaccgccacggtggtcgccagcgaggacgacgagctgtgcgcccgcgtccaggcggccctgcacggccgcaccttccgcgtctacgccagccgcgaccgcttcggcgtggaactcggcggtgcgctgaagaacgtctacgcgatcatggccggcctggccgcggcgatggacatgggcgagaacacccgcagcatgctgatcacccgcgcgctggcggaaatgacccggttcgccgtcaagctcggtgccaacccgatgacctttctcggcctcgccggcgtcggcgacctgatcgtcacctgttcctcgccgaagagccgcaactaccaggtcggccacgccctcggcgaggggctcagcctggaggaggcggtatcgcgcatgggcgagaccgcggagggtgtgaacactctcaaggtactcaaggaaaagtccgacgagatgcaggtgtacatgccgctggtcgccggtctccatgcgatcctcttcgaaggccgcaccctggcgcaggtcatccagttgctgatgcgcggcgagccgaagaccgacgtcgatttcattcccaccaccggcttctga

SEQ ID NO: 7742 - DNA, 2073 bp, Pseudomonas aeruginosa
  CDS (1)...(2073)
atgaacgctcagacccaggcgtccaagaacgccttgcacaaatcgctcgaacgtcgccacaacgcgtccaccagcctcgccgccttgtggcggccggcgctgctgcaagccttcgtcaagctcgacccgcgccagttgctgcgctcgccggtgatgctggtggtcgaactgaccgccgtgctcaccaccttgctgtgcttcgtccccgaccaggcggtgccgacctcggtggcgctgcagatcgccctctggctgtggttcaccgtgctcttcgcgaatttcgccgaagcgctcgccgagggacgtggcaaggcccgcgcggacagtctcaaggccggcagccagggcctctccgccaataagcggcgcgccgacggcagtttcgagagcgtcgttgccagcagcctgcgcaagggcgatgtggtacgggtccaggccggcgagatgattcccggcgacggcgaagtcatcgaaggcgtggcggcggtcaacgaggccgccatcaccggcgaatcggcgccggtgatccgcgagtccggcggcgatcgctcggcggtgaccggcaacacccaggtggtgtccgactggctgctggtacggatcggcgccaacccgggcgagtcgaccctggaccggatgatcgccctggtggaaggcgccaagcggcagaagacccccaacgaagtggcgctggacatcctgctgatcggcctgaccctgatcttcctgctggtagtggtgaccctcaagccgttcgccctgttcgccggcggcaacctgccgctggtgttcctggtggcgctgctggtgacgctgatcccgaccaccatcggcggcctgctctcggccatcggcatcgccggcatggaccgcctggtgcgcctgaacgtgatcgccaagtccggtcgcgcggtggaggcggccggcgacgtccacgtgctgctgctcgacaagaccggcaccatcaccttcggcaaccgccgctgcagcgcgctgtacgccgcgccgggggtgagcggcaaggaactggccgagggcgcgttgctggcctcgctggccgacgacaccccggaaggcaagtcgatcgtcgaatacctgcgcatcctgcatccgatcgaggagccgcgccgcgaggaactgacgccgatcgccttcagcgcggaaacccgcctgtccggggtcgactggaacggccaggtgtaccgcaagggggcggtggatgcggcgctgcgcttcatcgacctgccgcgggagaagatgcccgaggtgctttcgcgggaggtggacaagatcgcccagagcggcggcaccccgctgctggtggtagccaacggccggctgctcggcgccattcacctgaaggacgtggtcaagccgggcattcgcgagcgcttcgccgaactgcgccggctgggcatccgcaccgtgatggtgaccggcgacaacccgctgaccgccgctgccatcgccgccgaggctggggtcgacgacgtgatcgccgaggctaccccggagaagaaattggcgcggattcgccaggagcagggcgaaggtcgcctggtggcgatgtgcggcgacggtgccaacgacgccccggcgctggcccaggccgacgtcggcatggccatgaacgacggcacccaggccgcccgcgaggcggccaacctggtcgacctggacagcgacccgaccaagctgctcgacgtggtccaggtgggcaaggagttgctggtcacccgcggcgcgctgaccaccttctccatcgccaacgacgtggccaagtacttcgccatcctgccggcgctgttcgtcggcatctacccgcagctcgacgtgctcaacgtgatgcgcctgcaaagcccgcagagcgcgatcctgtcggccatcgtgttcaacgcgctgatcatcgtcgcgttgatcccactggccttgcgcggcgtgcgggtgcaggcggcggacgcttcgcaactgctgcagcgcaacctgctgatctatggcgtcggcggcctggtggcgccgttcctcgggatcaaggcgatcgacctgctgctgaccgccgtcggcctggcatga

SEQ ID NO: 7743 - DNA, 552 bp, Pseudomonas aeruginosa
  CDS (1)...(552)
atgttcaagcaactccgtccggcactggcgtcactgctggtgctgagcctggtcaccggcgtggcctatccgctgctggtcaccggtatcgcccaactggcgttccccgagcaggccaatggcagcctgctgcgcgacgccgagggcaaggtgctcggctcgcggctgatcgcgcagaagttcgacggcgaggagtggttccattcgcggccttcggcgggcgactacgccaccgtttccagtgccgcgagcaacctggcgccgagcaacccggcactggccgagcgcatcgccagggacgccgcccaggagcgtatcgccgaccaggggccggtgccgctggcgctggtcactacctccggtagcggactcgatccgcagctgccgccgcaggccgcgcgttaccaggcgctgcgggtggccacggcgcgcgggctgccgctgcggctggtggaagacctggtggaaagccacaccgagcggccgctggtggggccggcggtggtcaacgtgctggcgctgaacatggcgctggcggggttgaagcgctag

SEQ ID NO: 7744 - DNA, 609 bp, Pseudomonas aeruginosa
  CDS (1)...(609)
atgcaactggacttcaccaccatcgctcccgccgaggcctatcgctggttggcttccaccgtcaccccgcgaccgattgcctgggtctcgaccctgtccgccgagggcgccagcaacctggccccgttcagcttcttccaggtgatcagcgacgagccgccgaccctgatggtcaacgtcagcctgcgcgacgacggcagcctcaaggacaccctgcgcaacgtccaggccaccgggcagttggtgatccacctggtcggcgccgcccaggccgaaaccatgaacgccacctccgcctggctgccccatggtgtgagcgagatcgagacggtcggcatccctaccgtgtccagcgtacgcgtggcgccgccgcggatcgccgcggcggcggtggccttcgagtgcgaggtggcggagatcaagccgtatccggcggagaaccccaattgccacctgatcttcgcccgcgtgctgctggcccatgtcgacgatgccgtgctggccgacgagcgccatgtggatagcgcccggctcgacctggtcggtcgcctgggcggcagccactacagccatacccgcgacacgttcagcatgatccggcccaggtag

SEQ ID NO: 7745 - DNA, 762 bp, Pseudomonas aeruginosa
  CDS (1)...(762)
atgagcaaacttctttccggccaggtcgcactggtcactggcggtgcggcgggcatcggccgcgctaccgcgctggccttcgccgccgccggggtcaaggtggtggtcgccgacctggacagcgccggcggcgagggcacggtcgaggcgatccgccaggcgggaggcgaagccctcttcattcgctgcgacgtcacccgcgacgccgaggtcaaggcgctggtagagggttgcgcagcggcctacggccgtctcgactatgccttcaacaacgccggtatcgagatcgagcagggcaagctggccgacggcaacgaagccgagttcgacgccatcatggctgtcaacgtgaagggcgtctggttgtgcatgaagcaccagatcccgctgatgctggcccagggcggtggcgcgatcgtcaacaccgcctcggtcgccgggctcggcgcggcgccgaagatgagcatctacgctgcttccaagcacgcggtgatcggcctgaccaaatcggcggcgatcgagtacgcgaagaagggcatccgcgtcaacgccgtgtgtccggcggtgatcgacaccgacatgttccgccgcgcctacgaggccgatccgcgcaaggccgagttcgccgccgcgatgcatccgctgggtcgggtcgggcgggtcgaggaaatcgccgccgcggtgctctatctgtgctgcgacaacgcaggcttcaccaccggtatcgccttgccggtggacggcggggcgacggcgatctga

SEQ ID NO: 7746 - DNA, 477 bp, Pseudomonas aeruginosa
  CDS (1)...(477)
atgcctgacctgaaaaaccacgccgtccagcagcaggccatgatggaagccttcttcttcgcgtaccaggccttcaccaccaagcctgacgagatgctcgcccgccgcggcctgggacgtgtgcaccaccgcgtgctgttcttcatcgcccgctatccgggcctcagcgtgaaggaactgctggccctgctcggcgtgaccaagcaggcgctgaacatcccgctgcgccagttgctggagatgaacctgatcggcagcgccaccgccgacgacgacaagcgcaaacgcctcctcggcctcaccgccgagggcgtgcggttggaaaaggcgctgcgtcgcgagcagtcgcggctgctccaacgctgcttcgaggaagccggcggcgaagcggtctccggctggctggcggtcaatcgcaccctggctcgggcgcatgcaggcagccgcggcgaagcggcgacggaggccgccgactga

SEQ ID NO: 7747 - DNA, 558 bp, Pseudomonas aeruginosa
  CDS (1)...(558)
atgcaagacgacgacttttccctgttcaagagcgagatgcgcggcgtcaagcgcatctcggtcgatcgagccgataccggcaaacctcgcaacgaccgccagcaactcaagcagcgccagctcaatgccagcgtgcgcaacgacgaaatccgcgtcgatggcctgtccgaccagttcgtcatcgacgtcggccccgaggacgagctgtcctgggcccgcgacggcgtccaggaaagccagttgcgcaagctcaagcagggcctggtgcccttcgacggtagcctcgacctgcacggcatgagcgtggagaaggcccggcagacgctatgggacttccttgccgaggccacccgcctggaaatccgctgcgtgcgcgtgacccatggcaaggccgcgcgcaaggacggacgcagcccgctggtgaaaagccacgtcaatacctggttgcgccagcacccgcaggtgctcggtttcacctcctgcctgccacgccacggcggcaccggctcggtctacgtgatgctgcgcaggaccatgctcgaaggccgcgacgagtag

SEQ ID NO: 7748 - DNA, 1092 bp, Pseudomonas aeruginosa
  CDS (1)...(1092)
atgtccggcaacacctacggcaagctcttcaccgtcaccaccgcaggcgaaagccacggcccggcgctggtcgccatcgtcgatgggtgccccccggggctggaactgtccgcccgggacctgcaacgcgacctcgaccggcgcaagcccggcaccagccggcacaccacccagcgccaggaagccgacgaggtggagattctttccggggtgttcgagggcaagaccaccggcacgccgatcggcctgctgatccgcaacaccgaccagaagtccaaggactactcggcgatcaaggacctgttccgcccggcccatgccgactacacctaccaccacaagtacggcgtgcgcgactaccgcggcggcggccgttcctcggcgcgcgagaccgccatgcgcgtggccgccggggctatcgccaagaaatacctggcgggcctgggcatccaggtgcgcggctacatgagccagctcgggccgatcgagattccgttcaggagctgggacagcgtcgagcagaatgccttcttcagccccgacccggacaaggtgccggagctggaggcctacatggaccaattgcgccgcgaccaggattcggtcggggcgaagatcaccgtggttgccgaaggcgtgccgccgggcctgggcgagccgatcttcgaccgcctggacgccgaactggcgcatgcgctgatgagcatcaacgcggtgaagggcgtggagatcggcgccggcttcgccagcatcgcccagcgcggcaccgagcaccgcgacgaactgaccccgcaaggcttcctgtcgaacaatgccggcggcatcctcggcgggatctcctccggccagccgatcgtcgcccacctggcgctgaagccgacctccagcatcaccactcccgggcgctcgatcgataccgccggcgagccggtggacatgatcaccaagggccgtcacgacccgtgcgtcggcatccgcgccacgccgatcgccgaggcgatgatggccatcgtcctgctcgaccaattgctgcgccagcgtgggcagaacgccgacgtgcgcgtcgacacgccggtcctgccgcagctgtga

SEQ ID NO: 7749 - DNA, 972 bp, Pseudomonas aeruginosa
  CDS (1)...(972)
atgcagcatgtccgtcttggcaacagcggcctgaaagtctcccgactctgcctggggtgcatgacctatggcgatccggcgtggcgtccgtgggtgctggacgaggaacgggcgcgtccgttcattcgcgaggcgctggaagccgggatcgacttcttcgacagtgccgatatctattccaccggcgagagcgagcggatcctcgggcgtgcgctcagggacttcgcgcagcgcgaggacctggtaatcgccaccaaggcgttctttcccatgagcgacaggcccaacgcctgcggcttgtcgcgcaagcacctgcttgccagcgtggatgcctcgctgcggcggttgggtacggactacctggatctcttcgtgatccatcgcttcgatccggacaccccgatcgaggaaacctgcgaaaccctcgacagcctggtgcgtgtcggcaaggtccgttacctcggcgcctcgtcgatgccggcctggcgcttcatgaagatgctcgccttccagcgccaccacggcctggcgcaattcatctcgatgcagagccagtacaacctgatcgttcgcgaggacgaggaggacctcgtgccgctgtgccgggaagaggggatcgcgttgacgccctggtcgccgctggcgcgtgggctgctggccggagcgcgaagcgccggcacgctgcggacccggacggacgaacaggccccgcgctggtacggcggcagggaggaggtcgagtcgaccctcggcgcgttggagaagctcgccgctgcccgcgggcttccaccggcgcaactcgccctggcctggctgcttggccggaacggtgtcgcggcgccgatcgtcggcctgtccaggccgcatcacctcgaggatgccctcgcggcgctgacgctggacctcgccgaagaggagtgcgccacgctggaggcgccgctcacggcgcgcgcccggaccccgcgctggtag

SEQ ID NO: 7750 - DNA, 2727 bp, Pseudomonas aeruginosa
  CDS (1)...(2727)
atgtcgacagattccccgctgcgcaccaccgcttcgacctgctgctactgcggcgtgggttgtggcgtcctgatcgaacacgacggcgaacgcatcctcggcgtgcaaggcgatccgcggcacccggccaacttcggcagactctgcagcaaaggcgccagcctgcacctgaccggcgacctccaggcccgcgcgctgtacccccaactgcgcctcggcaagcaactggcgcgggctcgcagcgactgggagagtgccctggaacatgccgccgggcgtttcgccgagaccattcgcgaacacgggccggacagcgtggccttctatatatccggccagttgctgaccgaggactactacgccttcaacaagctggcgcgggccctggtcggcaccaacaacatcgacagcaattcgcgcctgtgcatgtcctcggcggtggtcggctacaagcgcagcctgggcgccgacgcaccgccgtgcagctacgaagacctcgactgcgccgattgcgtgctgatcgccggcagcaacatggccttcgcccacccggtcctgttccgtcgcctggaggccgccaaggccgctcggccggagatgcgcatcgtcgtgatcgacccgcggcgcaccgacacctgcgagctggccgacctgcacctggcgctgctgcccggcaccgacgtcgcactgttccacggcatcctgcatatcctgctctgggaggactggatcgaccgttcgttcatcgccgagcataccgagggtttcgccgacctgaaggaactggtgcgcgactacaccccggccgccgtcgccgacatctgcggcatcgaccgcgccgacctgcagcgctgcgccgaatggatcggccgttcgccgcgcttcctttcgctctggtgcatggggctcaaccagtccagcgccggcagcgccaagaacagcgcgctgatcaacctgcacctggccaccggcaagatcggccgcgccggatgcgggccgttttccctcaccggccagccgaacgccatgggcggtcgcgagaccggcagcctggccaacctgctgcccggccaccgcgaagccgccgatcccggccatcgcgccgaggtggcgcactactggggtgtggaacagttgcccacgtcccccggtctcagcgccatcgagctgttcgatgcggtccacgacggtcggatcaaggcgctctggatcgcctgtaccaaccccgcgcaatcgctgccggaccagcgcaagatccacgaggcccttgcccgctgtcccttcgtggtggtccaggaagccttcgccggcacggaaacctgccaatacgccgaccttttgcttccagccgcatcctggggagaaaaggaaggctccgtgaccaattcggaacggcggatcagtcatgtccgtcgggccgttccgccccccggtgaagcgcgccaggactggaacatcgtctgcgacttcgcgcgccgcctggaagggcacctgcggcccgctaaacccggcctgttcgcctttgccgacagccgcagcctgttcgacgaatacaagctgctcaccgccgggcgcgacctcgatctttccggcctcagctacgcactgctcgaccgcctggggccgcagcaatggccatttcccactggcgcggagcaaggcaccgcacggctctatgcagacggccgcttccctaccgcctcgggacgcgcgcaactggtcgccgaaccctaccgcgccgcccaggaaaaacgcgacgcgcgctacccgctgaccctcaataccggacgcttgcgcgaccagtggcacggcatgagccggaccggcacctgcgcacgcctgttcggccatgaagaggaggccctggtgcacctgcatcccgaggaactgcgccgccgccaactgctggacgggcagctcgtgcgcctgaagagccggcgtggcgccctggtcctgccggtgagcgcagacgactcggtgcgccccggccaggccttcctgccgatgcactggggcgatcgcttcctcaagggcctgggctgcaatgtcctgaccctgccggcgttcgaccccctgtcgaaacaacccgaactcaagcacgccggggttcaggtcgagtccgtcgaactgccctggcgcctgttcgcgctggtggaaaccgatatccaggcgcgtttcgaggccctccgtgcgctgtgcgaagtcttcgaccacgccagcttcagtctcgccggacgcgagcgccccgccctgctggtcagcgccgcacaccatgaggcacctggcgcagacctgctggagcggatagatcgccaactcgaattgctcgacgggccgatcctcgcctacgacgacccacggcgggccatcggcaagcgcgtgcgcctcgaagacgggcgcatcgtcgccgtccggctcgccggcgaaaccctcgcccgtgactggttgaaagagctctggcttaccggccgggccgatagcgagctacgccgctggctgctcgccccactcggcgcggcaccgggacgacccagccagggtgcgggcggcaagaccctgtgcagttgccagaacgtcagccagcaaacggtgctcggcggcatcgcccgcggattggacctggacggattgaagcgcgagttcggctgcggcaccggctgcggctcctgcgtaccggaaatcaagagactgctggcggccccccggcccatggcagcgaatgcctga

SEQ ID NO: 7751 - DNA, 327 bp, Pseudomonas aeruginosa
  CDS (1)...(327)
atgaactggctggatatctgctccctcgatgaaatcaacccgctgggctcgcgcgtggtcgccggcccgaaaggcgacatcgccatcttccgcgccgccgacgaccaggtcttcgccctcgatgaccgctgcccgcacaagggcggcccgctgtcccagggcctgatctacggcaagcgagtggcctgtccgttgcacaactggcagattgaactggagagcggcgaagccgtggccccggaccagggctgcgcccatcgccacccggtgcgggtggagaacggacgggtgctgctcggcctggacagcgtggcgctgtgcgcctga

SEQ ID NO: 7752 - DNA, 2451 bp, Pseudomonas aeruginosa
  CDS (1)...(2451)
atgaagaagatcaagctggtgatggtcggcaacggcatggccggggtccgtaccctggaagaactgctcaagctcaactcggacttctacgacatcacggtgttcggcgccgagccccatcccaactacaaccgcatcctgctgtccccggtgctggccggcgagcagaccttcgaggaaatcgtcctcaacgacctcaactggtatgcggaaaacggcatcaagctcctcctcgaccgcaaggtggtgcagatcgaccggcttcgccgcagggtggtcgccgcggacggcagcgaggccgagtacgaccgcctgctgctggccaccggctcgctccccttcatcctgccgatacccggcaatcgcctgcagggcgtgatcggctaccgcgacatcgccgacacccaggccatgatcgactgcgcccggacccacagccacgcggtggtgatcggcggcggcctgctcggcctggaggcggccaacggcctcaagcaacgcggcatggacgtgaccgtcgtgcacctctccgactggctgctggaacgccaactggaccgcaccgccggcaaactcctgcaaggcgcgctggaagcccgcggcatccgcttccgcctgaacacccagacccaggaactgatggacaacggcagcggccgggtctgtgccgtgcagttcaacgacggcgacgtgattcccgccgacctggtggtaatggccgccggcatccgccccaataccgagctggccgaaagcgcgggcatcccctgcaaccgcggcatcctggtcaacgacaccctgcagacctacgacccacgcatctatgcggtcggcgaatgcgccaaccaccgtggcatcgcctacggcctggttgcgccgctgttcgagcaggccaaggtctgcgccaaccacctggctcatctcggctacgcccgctaccagggctcggtgacctcgaccaagctcaaggtgaccggtatcgacctgttctccgccggcgacttcatcggcggcgaaggcagcgagaccatcaccctttccgaccccatcggcggcgtctacaagaagctggtgatcaaggacgatgtactggtcggcgcctgtctctacggcgacaccgccgacggcggctggtacttccggcagatccgcgagaaccacaacgtcgcgcagatccgcgaccacctgatgttcggcgagaacgccctcggcgatgtcggccaccagggccagaacagcgccgcgagcatgcccgacacggccgaagtatgtggctgcaacggcgtctgcaagggcaccatcgtcaaggccatacaagaacacggcctgttcagcgtcgacgaagtcaagaaacacaccaaggccgccagctcctgcggctcctgcgcgggattggtggaacagatcctgatcagcaccgtcggcggcgccgccgacgtcaagccgaagagcgagaaggccatctgcggctgcagcgacctcaaccacgggcagatccgcaaggccattcgcgaacaccggctgaccagtctcgacgccgccatgcgcttcatggactggaagaccccgaacggctgtgccacctgccgcccggccctgaactactacctgatctcgacctggccgggagaagccaaggacgatccgcagtcgcgcctgatcaacgaacgcgcccacgccaacatccagaaggacggcacctactcggtggtaccgcggatgtggggcggcgtgaccaacgccgccgagttgcggcgcatcgccgacgtcgccgacaagtaccaggtgccgatggtcaaggtcaccggcggccagcgcatcgacctgctgggggtgaagaaggacgacctgccggccatctggaaagacctcgacatgccctccggacatgcctacggcaaatccatccgcaccgtgaagacctgtgtcggcagcgaattctgccgcttcggcacgcagaactcgacgcagctgggcatcgatctggaacacgacctgttcaacatgtggtcgccgcacaaggtcaagctggcggtctccggctgcccgcgcaattgcgccgaggccgggatcaaggacgtcggcatcatcggcgtggactccggctgggagatgtacatcggcggcaacggcgggatcaagaccgaggtcgcggagttcttcgtcaagctcaagaccgccgaagaggtgcgcgaatacaacggcgccttcctccagctctaccgcgaggaagccttctacctggagcgcacggtgcattatctgcagcgggtcggcatggagcacatccgcaaggcggtggtcgaggacgcggaaaaccgcaaggcgctcaacgaccgcctgcaattcgccctgtccttcgagcaggacccatggaagcagcgcatcgaacagccgcaattgaagaaggagttcgaacggatttcgctcaagcaactggaaaacgtctga

SEQ ID NO: 7753 - DNA, 273 bp, Pseudomonas aeruginosa
  CDS (1)...(273)
gtgaacaagtcggaactgatcgatgcaattgccgcatctgctgatatcccgaaagctgttgccggtcgcgcactggacgcagtgatcgagtccgtcactggcgccctgaaggctggtgactccgtcgtgctggttggtttcggcaccttcgctgtcaaagagcgcgctgctcgcaccggtcgcaacccgcaaactggcaagccgatcaagatcgccgctgccaagatcccgggcttcaaagccggtaaagccctgaaggatgctgtcaactaa

SEQ ID NO: 7754 - DNA, 798 bp, Pseudomonas aeruginosa
  CDS (1)...(798)
atgggatttctcacaggaaaacgcgccctgatcgtcggagtcgccagcaagctctccatcgcttccggcatcgccgccgccatgcaccgggaaggcgccgaactggccttcacctaccagaacgacaagctcaggggccgggtggaggagttcgccagtggctggggctcgcggccggagctgtgcttcccctgtgacgtggccgacgacagccagatcgaagcggtgttcgccgccctgggcaagcactgggacggcctggacatcatcgtccactccgtcggattcgctccaggcgatcagctcgacggcgacttcaccgcggtgaccacccgcgagggcttccgcatcgcccacgacatcagcgcctacagcttcatcgccctggccaaggccggacgggaaatgatgaagggccgcaacggcagcctgctgaccctctcctacctgggcgccgaacggaccatgccgaactacaacgtaatgggcatggccaaggccagcctggaggccggggtccgctacctggccggcagcctgggcgcggaaggcacccgggtcaatgcggtttccgccgggccgatccgaacgctcgccgcctccgggatcaagagtttccgcaaaatgctggccgccaacgagcggcagacgccgctgcggcgcaacgtcaccatcgaggaagtcggcaatgccggcgccttcctctgttcggacctggccagcggtatcagtggcgagatcctctacgtcgatggcggcttcaacactaccgccatgggcccgctggacgacgactga

SEQ ID NO: 7755 - DNA, 1533 bp, Pseudomonas aeruginosa
  CDS (1)...(1533)
atgtctagcgacgcattgccgctgctgagcatccgcggggtcggcaagacctacgcgcagccggtgctggcggagatcgacctgcaactgttcggcggcgaggtgctggccctgaccggcgagaacggcgccggcaagagcaccctgtcgaagatcgtcggcggcctggagcgtcccggcgccggcagcctggaactcctcggccggccctacgcccccgctagccgccgcgaggccgaggcgctgggcgtgcgcatggtgatgcaggaactgaacctgctgccgaccctgtcggtggcggagaacctgttcctccacgacctgccccggcgcgccggctggatcgaccgtcggcgcctgcgcgcggcggcccgcgaggcgatggcccaggtcggcctggaggcgatcgatcccgacacgctggtcggcgacctcggcatcggccaccagcagatggtcgagatcgcccgcaacctgatcggcgactgccgcttgctgatcctcgacgaacccacggcgatgcttaccgcgcgcgaagtggacatgctcttcgagcaggtcgagcggctgcgcgaacgcggcgtggcgatcgtctacatctcccatcgcctggaagagctggcgcggatttcgcagcgcatcgcggtgttgcgcgatggccgcctggtctgcgtcgagccgatcgagcgctacgacgccgaccaactggtgaccctgatggtcggccgcgacctgggcgagcgcttcgacctgggcccacggcagaccggtgcgccgctgctgcgggtggagcggctgagccggcgcggcaaggtgcatgaggtgtcgttcgaggtgcgcgcgggggagatcttcggcatttccggactgatcggctccgggcgcaccgaattgttgcgcctgatctacggcgccgaccgcgccgacggtgggcaggtcctgctcggcgatccgccgcagcgcctgagcctgcgttcgccggccgactcggtgcgccagggggtggcgctgatcaccgaggaccgcaagggcgagggcctgctgctggaccagtcgatcagcgccaacctcgccctgggcaacctgccggcgctggcgcgccacggggtgatcgaccggcgccgcgaggaagccctggcgcggcgccaggtggaggcgctgcgggtgcgctgcgcggacaccgcgcaggcggtgggcgaactgtccggcggcaaccagcagaaggtggtgatcggccgctggctggaacgcgactgccaggtgctgctgttcgacgagccgacccgtggcatcgacgtcggcgccaagttcgacatctatgccttgctcgccgaactgacccgccggggcaaggcgctggtggtggtgtccagcgacctgcgcgagctgatgctgatctgcgatcgcatcggcgtgctctcggcgggacgtatggtggacaccttcgagcgcgacgcctggacccaggacgcgctgctggcggcggccttcgccggttacaagaaacgcgacgcgctgctggcgacgtcgtga

SEQ ID NO: 7756 - DNA, 999 bp, Pseudomonas aeruginosa
  CDS (1)...(999)
atgagcgacccgacgtcttccgctaccgccgccgcagcgccaaccctgcgacgcggcaactatttcggcctgggcacctacctcggcctggccggcgcgctgctggcgatgatcgcgctgttctcggcgctgagcagccacttcctcagctatggcaccttcctcgccatcgccaaccagatccccgacctggtggtgctggcggtgggcatgaccttcattctgatcgtcggcggcatcgatctctcggtaggttcggtgctggccctggcggcctcggcggtaagcctggcgacgctcggctggggctggggcgtgctgccggcggcgatgctcgggatggcctgcgcgaccctggccggctgcgtcaccggttcgatcacggtggcctggcggattccctcgttcatcgtgtccctcggggtgctggagatggcccgtgggctggcctaccagatgaccgactcgcgcacggcctatatcggcgacgcctatgcctggctgtccaatccgctggcgttcggcatttcgccggccttcgtgatcgccctgctggtgatgttcgccgcccaggcggtgctcacccgcacggtgttcggccgctacctgatcggcatcggcaccaacgaagaagcggtgcgattggccggtgtgaacccgaaaccctataagattgcagtattcgccctgatggggctgctcgccgggttggccgcgctgttccagatctcgcgtctggaagcggccgatcccaacgccggggtcggcctggaactccaggtcatcgccgcggtggtgatcggcggcaccagcctgatgggcgggcgaggttcggtggtcagcaccttcttcggcgtgctgatcatttccgtattggcggcggggctggcgcagatcggtgcgtcggagccgaccaaacgaatcattaccggggcggtgatcgtggtagcggtggtgctggatacctatcgcagccatcgcgcccgcagacagggctga

SEQ ID NO: 7757 - DNA, 927 bp, Pseudomonas aeruginosa
  CDS (1)...(927)
atgcaagcgaaagtactggtggtgggcagcctgaacatggacctggtagtgcgcgcgccgcgcctgccacggggcggcgagaccctcgccgggcagtccttcatcaccgttcccggcggcaagggagccaaccaggcggtcgccgcggcgcgtctcggcgcggaggtggcgatgatcggctgccttggcgacgatgcctacggcgaccagttgtaccgtgcgctacaggccgagggcatcgactgccagggcgtcgagcgggtggccggggagtccagcggagtggcgctgatcgtggtcgacgacagcagccagaacgccatcgtcatcgtcgccggcggcaacggccacctgtcgccggccgtgctggcgcgccacgagcacttgctggagcaggcgcaggtggtagtctgccaactggaaagcccgctggagacggttggccatgtgctgcgccgggcccatgcgctgggcaagacggtgatcctcaacccggcgccggccacccgcgacgtgccggcggagtggctgccgctggtggactacctggtccccaacgagaccgaaagcgaactgctctgccgcctgccggtggactccctggagagcgccgggcgtgccgccgagcgcctgcgcgaaatgggcgccggcagggtgatcgtcaccctcggcgcccagggcgccctgctggtaggcgaggggcgggtcgagcatttcccggtggcgcgggtcaaggcgctggataccacggcggccggcgacaccttcgtcggcggcttcgccgcggcccttgcgcgcggcctcgacgaggcggcggcgatccgcttcggccaggccgccgcggcgatctcggtgacccgcctcggcgcgcagacctcgatcccctcgcgcgaggaagtcgagcgggcgctcgttggcgaggcttga

SEQ ID NO: 7758 - DNA, 1566 bp, Pseudomonas aeruginosa
  CDS (1)...(1566)
atgcagttcggcgccaagccgctgttcgagaacgtttccgtcaagttcggcaacggcaaccgctacggcctgatcggcgccaacggttgcggcaagtcgaccttcatgaagatcctcggtaacgacctggagccgagcgccggccaggtcatgctggaacccaacgtgcgcctgggcaagctgcgccaggaccagttcgcctacgaggacttcagcgtcatcgatacggtgatcatgggccacgaggaactctgggcggtgaaggccgaacgcgaccgcatctactccctgccggaaatgagcgaggcagatggcatggcggtggccgagctggaagtccagttcgccgagttcgacggctacaccgccgagtcccgcgccggcgagctgctgctcggcctgggcatcccgctggagcagcacttcggcccgatgagcgccgtcgctcccggctggaagctgcgcgtactgctggcccaggcgctgttctcggacccggacgtgctgctgctcgacgaaccgaccaaccacctggacatcaacaccatccgctggctggaaggcgtgctcaccgcgcgcaacagcaccatgatcatcatttcccacgatcgccacttcctgaacagcgtctgcacccacatggccgacctggactacggcgagctgcgcctgttcccgggcaactacgacgagtacatgaccgccgccgaacaggcccgcgagcgcctgctgtcggacaacgccaagaagaaggcgcagatcgccgagctgcaatccttcgtcagccgcttctcggccaacgcctccaaggccaagcaggccaccagccgcgcccggcagatcgacaagatccagctggaggaggtcaagccgtccagccgggtcagcccgttcatccgcttcgagcaatacaagaagctgcaccgccaggcggtgaccgtggaaaacatcagcaagggctatgacggcaagccgctgttcaagggcctgagcctgcaggtcgaggccggcgagcgcgtcgccatcatcggccccaacggcatcggcaagaccaccctgttgcgctgcctggtcggcgacctgccggtggacggcggcgaggtgaaatggaccgacagcgccgacgtcggctatttcgcccaagaccatgccgacgacttcgccgacgacatgagcctgttcgactggatggcccagtggacccagggcggcgaacaactggtgcgcggcaccctcggccgcatgctgttctccaacgacgagatcaagaagtcggtgaaagtgatctccggcggcgagcagggccgcatgctgttcggccggctgatcctcaagcgccccaacgtgctggtgatggacgagccgaccaaccacctggacatggagtccatcgaggcgctgaacctggcgctggacaactatccgggcacgctgatcttcgtcagccacgaccgcgaattcgtttcctcactggctacccgcatcatcgagctgggcgagaacggcgtgaccgacttcagcggcagctatgacgactacctgcgcagccagggcgtgatcgtctga

SEQ ID NO: 7759 - DNA, 1182 bp, Pseudomonas aeruginosa
  CDS (1)...(1182)
atgcaagacgtcgtcatcgtcgccgctacccgtaccgccgtcggcagcttccagggctcgctggccggcattcccgcccccgagctgggcgccgcggtaatccgccgcctgctcgaacagaccggtctcgatgccggccaggtcgacgaagtgatcctcggccaggtgctcaccgccgggtccgggcagaacccggcgcgccaggcggcgatcaaggccggcctgccggtcggcgtgccggccatgaccctgaacaaggtctgcggctccggcctcaaggccctgcacctgggcgcccaggcgatccgctgcggcgacgccgaggtgatcgtcgccggcggccaggagaacatgagcctggcgccctacgtcatgcccggcgcccgcaccggcctgcgcatgggccatgcgaagctggtcgacagcatgatcgaggacggcctgtgggacgccttcaacgactaccacatgggcatcaccgccgagaacctggcggagaagtacggcctgacccgcgaggagcaggacgccttcgccgccgcttcgcagcagaaggccatcgccgccatcgagggcgggcgcttccgcgacgagatcacgccgatccaggtcccgcagcgcaagggcgagccgctgggcttcgataccgacgagcagccgcgcgccggcaccaccgtcgaggccctggccaagctcaagccggccttcaggaaggacggcagcgtcaccgccggcaacgcctccagcctcaacgacggcgccgccgcggtattgctgatgagcgcggccaaggccaaggccctgggcctgccggtgctggcgcggatcgccagctacgccagcgccggggtcgacccggcgatcatgggcatcggcccggtctccgccacccgtcgcgcgctcgacaaggccggctggagcctggagcaactggacctgatcgaggccaacgaggccttcgccgcgcagtccctggcggtgggccgggaactgggctgggatgccgccagggtcaacgtcaacggcggcgccatcgcccttggccacccgatcggcgcgtccggctgccgggtgctggtgaccctgctgcacgagatgatccgtcgcgacgcgaagaagggcctcgccaccctgtgcatcggcggcgggcagggcgtcgccctgaccctggcccgcgactga

SEQ ID NO: 7760 - DNA, 1611 bp, Pseudomonas aeruginosa
  CDS (1)...(1611)
atgaaccgggaactgttgcgagtggaaaacctgagcgtcgcctatggcgacacgcaggtcgtgaaggggatcgacttcagcctgcgcgccggcgagaccctggccctggtcggcgagtccggctccggcaagtcgcagaccgcccacgccctgctgcgcctgctgccgggcgcggcgcgcctgggcggcagcgtgcgcctggacggcgaggaactgctcgccctgtcgccgcaggcattgctggcgattcgtgggcagcgcatcggcatggtgttccaggagccgatgacctcgctcaatccattgcagcgcatcggccgccaggtcggcgagggcctgcgcctgcatcgccgcctgcgtggcgccgcgctgcgcgggcgggtactggaactgctcgaactggccggcctcgagcagccgcgacgcctgctcgaggcctatccgcaccagctctccggcggccagcgacagcgagtgatgctggccatggcgctggcttgcgagccgcaactgctgatcgccgacgaaccgaccacggctctcgacgtcaccgtgcagaaacgcctcctggagctgctgcaaagcttgcagcgacggctgggcatggcgatcctgctgatcagccacgacctcaacctggtgcgccgggtcgccgatcgggtctgcgtgatgcgcgatggccagatcgtcgaggagaacgcctgcgagacgctgttccgctcgccccggcatccctacacgcgcctgctgatcgaggccgagccgggtgggctggcggagccggtggcgtgccgcgagacctgcctggaggtgcgcgcgctgagcctcgactaccccgcgcccggcggctggctgcgccggcgcgcgggactgcgcgcggtgcacgaggtcagcctgcggctgcgccgtggcagcaccctggggatcgtcggcgaaagcggttcgggcaagtcctccctcggccaggcgctgctgcgcctgttgccggccgaagggcagatcctgttccagggcgagcgcctcgaccgtctgcacggcaagcgcctgttgccattgcgccggcagttccaggcggtgttccaggacccctacggcagcctcaacccgcgccttagcgtggaacagatcgtcggcgaaggcctgcgtatccatggcatcggcgatgccggcgaacgccgcgcgcgggtgctggaggcactgcgcgaggtcggtctcgacgagccttgcctggaacgctatccccacgagttttccggcggccagcgccagcgcatcgccatcgcccgcacgctggtgctgaagccggcgctgatcctgctcgacgaaccgacctcggcgctcgaccgcagcgtgcagtgccaggtggtcgagctgctgcgtcggttgcagcgtcgccacgggctgagctacctgttcatcagccacgacctcgccgtggtacgcgccctggcccacgacatcctggtgctcaaggacggccgggtggtggagcagggcagcgccgctgcgctgttcagccagccgcgccacccctatacccgcgagttgctcggagcgatacccgcgctgcgcctggaagagcatctgcgggtggccgggctgggaatctga

SEQ ID NO: 7761 - DNA, 2109 bp, Pseudomonas aeruginosa
  CDS (1)...(2109)
atggctcgcaccactcccatcgagctttatcgcaacatcggcatcgtcgcccacgtcgacgccggcaagaccacgacgaccgagcggatcctcttctacaccggcgtcaaccacaagatgggcgaggtccatgacggcgcggcgaccatggactggatggtccaggagcaggagcgcggcatcaccatcacctcggcggcgaccacggccttctggcagggctcgaccaagcagttcccgcaccgctatcgcttcaacatcatcgacacccccggccacgtcgacttcaccatcgaggtggagcgctcgctgcgcgtgctcgatggcgcggtggtggtgttcagcggcgccgacggagtcgagccgcagtccgagacggtctggcgccaggccaacaagtaccatgtgccgcgcctggcctacgtcaacaaaatggatcgccagggcgccgatttcctccgcgtggtcgcgcagatcaagcaacgcctgggccatgtcccggtgccgatccaactggcgatcggctcggaggaaaacttcagcgggcagatcgacctggtgaagatgaaggccatctactggaacgatgccgaccagggcaccagctaccgcgaggaggagatcccggcggagctgcgggcgctggccgaggagtggcgggcgcacatggtcgaggccgctgccgaggccaacgacgaactgatgaacaagtatctggaaggcgaggaactgagcatcgaggagatcaaggccgggctgcgccagcggaccctggccaaccagatcgtaccggcggtgctcggctcctcgttcaagaacaagggcgtgccgctggtgctcgacgcggtgatcgactatctcccggctccgtcggaaatcccggcgatcaggggcaccgacccggacgacgaagagaagcacgacgagcgccatgcggacgacgacgagcctttctcggcgctggcgttcaagatcgccaccgaccccttcgtcggcaccctgaccttcgcccgcgtgtattccggggtgctgacttccggcgacgcggtgcttaactcggtgaaaggcaagaaggagcgggtcgggcggatggtgcagatgcacgccaaccagcgcgacgagatcaaggaagtgcgcgccggcgacatcgccgcgctgatcggcatgaaggacgtgaccaccggcgacaccctgtgcgccatcgacaagccgatcatcctcgaacgcatggacttccccgatccggtgatctcggtggcggtggaaccgaagaccaaggccgaccaggagaagatgggcatcgccctgagcaagctggcccaggaagacccgtcgttccgcgtgaagaccgacgaggagaccgcgcaaaccatcatttccgggatgggcgagttgcacctggacatcatcgtcgaccgcatgcgccgcgagttcggcgtcgaagccaatatcggcaagccgcaggtggcctatcgcgagaccatccgcaacacctgcgagatcgagggcaagttcgtccgccagtccggcggccgcggccagttcggccattgctggatccgcttcgctccggccgacgaggggcaggaaggcctggagttccacaacgaggtggtcggcggggtgattccccgcgaattcatcccggcgatccagaagggcatcgaggaccagatgcagaacggcgtgctcgccggctacccgctgatcggcctgaaggcgacggtgtacgacggctcctaccatgacgtcgactccagcgagatggcgttcaagatcgccgcctcgatggccaccaagcaactctcgcagaagggcggagcggtgctcctggagccggtgatgaaggtcgaggtggtgaccccggaggactacatgggcgacgtgatgggcgacctcaaccgccggcgtggcctgatccagggcatggaggataccccggcgggcaaggtgatccgtgccgaggtcccgctgggcgaaatgttcggctatgccaccgacgtgcgctcgatgtcccaggggcgcgcgagctactcgatggagttcgttcgctatgccgaggtaccggccagcgtggccgaggggatcgtcgccaggcagggccgctga

SEQ ID NO: 7762 - DNA, 744 bp, Pseudomonas aeruginosa
  CDS (1)...(744)
atgaacaacctgttgttgaactgcgatatcggcgagagcttcggtgcctggcgcatgggcctggacgccgaggtgatgccgctgatcgattgcgccaacatcgcctgcggcttccacgccggcgatcccggcaccatgcgccgcaccgtggccctggcggtggagcatggcgtgcgcatcggcgcgcaccccggctaccccgacctggtcggcttcggccggcgctcgctggcctgctcggcgcaggaagtggaagacctgctgctctaccagatcggcgccctcgacggactctgccgcgcccagggcacgcgggtacgctacgtcaagccgcatggcgccctgtaccaggacatgatgcgcgacccggcgatcctcgccgccgtgctgcgcgcactggcggcctacgaccgcaccctgccgctgatgctgatgagcacccgcgacaacaccgcggcgcgcgcgctgggcgaggcccacggcatcgagctgtggttcgaggcgttcgccgaccgcgcctacgacggcgccggctacctggtctcgcgcagccagcccggcgcggtacaccacgacgccgagacggtgctcgcccaggccctcctgctggcccgtggcgcggcgctgcgagccagcgacggcagcgccctggcgctggaggcgcagaccctctgcgtacacggcgacaaccccgcctcgctggctgcggtgcggcgcatccgcgacgccctggaggcggcatga

SEQ ID NO: 7763 - DNA, 861 bp, Pseudomonas aeruginosa
  CDS (1)...(861)
atgagcgaacagcgacagaccctgccggcgcagcaccaggaccaacgtcccggccacgaaagccagatgcagccgaagccggagttcgtttccgccgattaccgtccggcggccaagctggagggtaaggtggccctggtcaccggcggcgacagtggtatcggccgcgcggtggcggtggctttcgcccgcgagaaggcggatgtggtgctggtctacctggatgagaacgaagacgcggcgaagacccgcgagatcatcgagtcgctcggccgccagtgcctggcgttcgccggcgacgtcgccgacgccggcttctgccgccaggttgtggacacgctaaggcagaaatgggggcgcctcgacgtgctggtcaacaacgccggcgagcagcatccgcaggcgcgcctggaggacatcagcgaagagcagtgggagaagaccttccgcaccaacatcttcggcatgttccagttgaccaaggcggccctgccgctgatgggcaagggcggggcgatcatcaacaccacctcgatcaccgcctacaagggcaacccccagctgatcgactattcctcgaccaagggcgcgatcacctcgttcacccggtcgctgtcgatgaacctggtcaaccgcggcatccgcgtcaacgccgtggccccgggcccgatctggacgccgctgatcccgtccaccttcagcgccgagaaggtcgcccacttcggcgcggatacgccgatgggccggcccggccagccggaagagctggccgccagctacgtctacctggcctgtaacgactcgtcctacgtcagcggccaggtgctgcacgtcaacggcggtacggtagtcaacggctga

SEQ ID NO: 7764 - DNA, 3303 bp, Pseudomonas aeruginosa
  CDS (1)...(3303)
atggccagacgcgagaaaccggtctttctcaacgacccgcaatggtacaaggacgcggtgatctaccaggtccacgtgaaatccttctacgacgccaacaacgatggcatcggcgacttcgccgggctgatcgagaagctcgactacatcgccgacctcggcgtgaacactctctggctgctgccgttctacccgtcgccacgccgcgacgacggctacgacatcgcccagtaccgtggcgtgcacagcgactacggcagcctcgccgacgcccgccggttcatcgccgaggcccatcgacgcggtctgcgggtgattaccgagctggtgatcaaccatacctccgaccagcatccctggttcatccgtgcccgccacgcgaagaagggatcgcgcgcccgcgactactacgtctggtcggacagcgacgagaaataccagggtacgcggatcatcttcatcgacaccgagcagtccaactggacctgggacccggtagcccaacagtactactggcaccgcttctattcccaccagccggacctgaacttcgacaacccgcaggtcctgcgcgaggtgctcggggtgatgcgctactggctggacatgggcgtcgacggcctgcgcctggacgcgattccctacctgatcgaacgcgacggcaccagcagcgagaacctgccggagacccaccaggtgctcaagcgcatccgcgccgagctggacgcgcactatcccgaccgcatgctgctggccgaggccaatcagtggccggaagacacccggccgtacttcggcggcgaggatggcggcgagggcgacgaatgccacatggccttccacttcccgctgatgccgcgcatgtacatggccatcgcccaggaggatcgctatccgatcaccgacatcctgcgccagaccccggacatcccggccaattgccaatgggcgatcttcctgcgcaaccacgacgagctgaccctggagatggtcaccgacgacgagcgcgactatctctggaaccactatgccgccgaccgccgcgcgcgcctcaacctgggcatccgccggcgcctggcgccgctggtggagcgtgaccggcggcgcatcgagctgctgcacagcctgctgttgtcgatgccgggcacgccgaccctgtactacggcgacgagatcggcatgggcgacaacatctacctcggcgaccgcgacggcgtgcggaccccgatgcagtggtcggtggaccgcaacggcggcttctcccgcgccgacccggcgaagctggtgctgccgccgattctcgacccgctgtacggctaccagacgatcaacgtcgaggcgcaggcgcgcgacccgcattcgctgctcaactggatgcgccgcctgctcgccgtgcgcagccagcagaaggccttcggccgcggcagcctgaagatgctcgcgccgagcaaccgacggatcctcgcctacctgcgcgaatacgccgagggcgaacggcaggacagcatcctctgcgtggccaacctgtcgcgcgcggcccaggcggtggaactggacctcgccagccatgccggcaaggtgccggtggagatgatcggcggcatgtcgttcccgccgatcggcgagctgacctacctgctgaccctgccgccctacggcttctactggttctacctggccgacgcgacgcagatgccgagctggcacgtggccgccgacgagcgcctgccggaactgccgaccctggtggtcaagcagcgcctcggcgagctgctgcagggcgcatcgcggaacatcctggaaggcgagacgctgccggcctacctgccgaagcgccgctggttcgccggcgagaaaggccagccacggctctgctacatcgttccgctggacgaggcggagccgcgctgtgcattgtgcgaagtggagatcgacgggctgcgctaccagttgccgctgggcttcctcgacgccgaccagcgcggcgacagcctgcctcagttgctggccctggcgcgcctgcggcgcggtcgcaaggtcggcctgctgaccgacgccgccagcctgccgctgttcgcccgcaaggtcctcgcgcaactccgcgccgaggcggtgatcgcccacggcgacggcgagatccagttcatcccggcggcgggactggcggaaatggacgacatcgccgacgaagacgtcctgccgttctcggtggagcagtccaacagctcgatccgcttcggcgagcgcatggtcctcaaggtgctgcgcaagatccttccggggctgcacccggaaatcgaggtcggcggctacctgacccgccacggctaccccggcatcgccccgttgctcggcgaggtacggcgggtcggcgcggatggcgagccgcacacgctgatgatcctgcagggctacctgaacaaccagggcgacgcctggaactggaccctggacaacctggagcgagccgtgcgcgacgagatatccgcggccagcgaggcgctcgaagggcaatacgacagcctcgccgaactgcgcggcttcgccgccaacctcggcgcccggctcggcgagatgcacagcgtactggccggcgagtcggacgatccggccttcggcagccgcgagagcgacgaagccagcgtccaggcctgggcgctgcgcatcgccgaacagttgcgcgaagccggcaaacgcctgagcgagccgccacggccgttgcagggcgaggcggcggaacaggcgcggcgcctgctggaacgcctgccggcgctgctcgaacgcctgccgctgctggcccggcaggcagccggcgggctgctgatcagggttcacggcgacctgcacctgggccaggtgctgatggtccagggcgacgcacgcttcatcgacttcgagggcgagccggcgcgcagcctggaagagcgccgccagcgtcacagtccgatgaaggacgtcggcggcatgctgcgctcgttcgactacgcggcggcgatggtcctgcgcaacgcgcagagcaccgatagctcggaacaggccgacagcgcccggcgcaaggtcgccatgcgctatcgcagcgaagcccgcgatgccttcctggccggctatcgggccgccgcggcgggtctcatgcacgcctggcacggtcgcgaaggcgaaggggcggcgctggccctggcctgcctggaaaaggccgcctacgaactgctctacgaagccgactaccgccccgactggctggaagtgcctctcgccggtctggccgaactcaccgaacacctcctgaagggcaagaaccgatga

SEQ ID NO: 7765 - DNA, 717 bp, Pseudomonas aeruginosa
  CDS (1)...(717)
atgttcggcgaacttctcgccccgcagtacctgcgctggttgctcgacggcttcctgctgaccctcggtcttgccctgctcagttgcctgctcgccaccctgatcggcgcccccctggccatcgcccggctgtcgcgccggcgcctgctgtcctggccggcgcgcgcctacctggcgctgttccgcaataccccgctgctggtgcagctgttcttctggtacttcggcgttcccgcgctgctgccggaggcgctggtgagctggctgaacacgccgcacgagacgcccttgctcgactggccgtccttcgagttcctcgccggtgcctgggggctgaccctctatacctcggctttcgtcgccgaggagttccgcgccggcatcgcctcggtacgccccgagcagcgcgccgccggcctcgccctggggctgacccagcgccaggtatggcgcgtggtggtgctgccgcaggccctgcgcacggctctgccgccgctgctcgggcagtacatgaatgcgctgaagaactcctcgctggcgatggccatcggcctggccgagctgtcctacgcttcgcgccaggtggaaaccgagaccttcaagaccttccaggccttcggcatcgccacccttctctacatcggcgccatcgccctgatcgaagccttcggccaggcgttgcagcagacccgccgctaccgccagggaggtgcgtga

SEQ ID NO: 7766 - DNA, 1437 bp, Pseudomonas aeruginosa
  CDS (1)...(1437)
atgcattcgaagtcggtagatagcctgtcgctgacacgggctggattcatcgagtacttcctggtcgcgaccaaactggtacacgcgctcaccgccatcgccccggcgctgttcctgctgtactaccccggcctggttcccgtggagctgcgcagcaacatgctcgggctgctgctgttcttcggcgcgctcacggtgattatgttccaggcactggacgtctactccgacgatatcttcagcaaccgcctgcgcttccgcatcatgttcttcgcctgggcctcggcgttctgcctgctgttgttcatgtaccagggcctgggcctgtttccctacctcagcagcaagctggtgatcttctggttcaccggcagcctgctgctgttcggcgtgcagcgcctgctggtgctgcgcctgtaccgggcctggatgaaacgcggcatgtacctgcaacggacggtgatcctcggcttcaccgagagcggcatgcacctggccgaatacctggtacgcaaccacgacatccgctccggcatcatcggcttcatcgacgaccgctccgagcgggtcccggagaactacaactcgctgccgctgctgggcaacaccaaggacctggagaagctgatccgccaggaacaggtcgaccaggtgctggtcgccctgccctggttcgccgaggggcgcatcggcgccatcgtccaccgcctgcggcaattgccggtgaacgtcctgctggtgccggacatggctgccttccggcatgcccacaaccgcatcgtcgacgtttccggaatccccatgttcaacgcgtccgagctgccgctgcgcggctggtcgccgctgatcaagcgctgtgaggacctggtcctggcgagcatcgcgctggtcctcttcgccccgctgatggccctggtggccctggcgatcaggctcgactccaaggggccggtgctgttccggcagaaacgctacggctacaacaaccggctgatctgggtcttcaagttccgctcgatgtacacggaaaggaccgacgccaacgccgaacgccagaccacccgcgacgacgaccgcatcacccgggtcggccgcttcatccgcaagaccagcatcgacgagctgccgcagctgttcaacgtgctcgccggcagcatgtcgatggtcggcccgcgcccccacgccaccgcgaccaaggccgccggcattcccttcgaggaggcggtcagcgaatacagctcgcgccaccgggtcaagcccggcatcaccggctgggcgcagatcaacggctaccgcggtgagaccgacaccctgcacaagatcaagaaacgcgtggaatacgacctcgaatacatcgccaagtggtcggtgtggttcgacctctacatcctgttccgtacggtgccagccgtactcctgaccaaggaagtctactga

SEQ ID NO: 7767 - DNA, 1053 bp, Pseudomonas aeruginosa
  CDS (1)...(1053)
atgaatgccatgaacccgcaacacgagaacgcccagacggtcaccagcatgaccatgatccaggcgctgcgctcggcgatggacatcatgctcgagcgcgacgacgacgtggtggtattcggccaggacgtcggctacttcggcggcgtgttccgctgcaccgaaggcctgcagaagaaatacggcacctcgcgggtgttcgatgcgccgatctccgagagcggcatcatcggcgccgcggtcggcatgggtgcctacggcctgcgcccggtggtggagatccagttcgccgactacgtctacccggcctccgaccagttgatctccgaggcggcgcgcctgcgctatcgctcggccggcgacttcatcgtgccgatgaccgtacgcatgccctgtggcggcggcatctacggcgggcaaacgcacagccagagcccggaggcgatgttcacccaggtctgcggcctgcgcacggtgatgccgtccaacccctacgacgccaagggcctgctgatcgcctgcatcgagaacgacgacccggtgatcttcctcgagcccaagcgcctctacaacggcccgttcgatggccaccacgaccgcccggtgacgccctggtccaagcatccggccagccaggtgccggacggctactacaaggtgccgctggacaaggcggcgatcgtccgccccggcgcggcgctgaccgtgctgacctacggcaccatggtctacgtggcccaggccgcggccgacgagaccggcctggacgccgagatcatcgacctgcgcagcctctggccgctggacctggaaaccatcgtcgcctcggtgaagaagaccggccgctgcgtcatcgcccacgaggcgacccgcacctgcgggttcggcgccgagctgatgtcgctggtgcaggagcactgcttccaccacctggaggcgccgatcgagcgcgtcaccggttgggacaccccctacccgcatgcccaggagtgggcgtatttccccggccccgcgcgcgtcggcgcggcattcaagcgtgtgatggaggtctga

SEQ ID NO: 7768 - DNA, 1287 bp, Pseudomonas aeruginosa
  CDS (1)...(1287)
atgggtacccatgtgatcaagatgccggacatcggggaaggcatcgccgaggtcgaactggtggagtggcatgtccaggtcggcgactcggtcaatgaagaccaggtcctcgccgaggtgatgaccgacaaggccacggtggagattccctcgccggtggccggacgcatcctcgccctcggcggccagccgggccaggtgatggcggtgggcggcgaactgatccgcctggaggtggaaggcgccggcaacctcgccgagagtccggccgcggcgacgccggccgcgcccgtcgccgccaccccggagaaaccgaaggaagccccggtcgcggcgccgaaagccgccgccgaagcgccgcgcgccttgcgcgacagcgaggcgccacggcagcggcgccagcccggcgaacgcccgctggcctcccccgcggtgcgccagcgcgcccgcgacctgggcatcgagttgcagttcgtgcagggcagcggtcccgccggacgcgtcctccacgaggacctcgatgcctacctgacccaggatggcagcgtcgcgcgcagcggcggcgccgcgcaggggtatgccgagcgacacgacgaacaggcggtgccggtgatcggcctgcgtcgcaagatcgcccagaagatgcaggacgccaagcgacgcatcccgcatttcagctatgtcgaggaaatcgacgtcaccgatctggaagccctgcgcgcccatctcaaccagaaatggggtggccagcgcggcaagctgaccctgctgccgttcctggtccgcgccatggtcgtggcgctgcgcgacttcccgcagttgaacgcgcgctacgacgacgaggccgaggtggtcacccgctacggcgcggtgcacgtcggcatcgccacccagagcgacaacggcctgatggtgccggtgctgcgccacgccgaatcgcgcgacctctggggcaacgccagcgaagtggcgcgcctggccgaagccgcacgcagcggcaaggcgcaacgccaggagctgtccggctcgaccatcaccctgagcagcctcggcgtgctcggcgggatcgtcagcacaccggtgatcaaccatccggaggtggccatcgtcggcgtcaaccgcatcgtcgagcgaccgatggtggtcggcggcaacatcgtcgtgcgcaagatgatgaacctctcctcctccttcgaccaccgggtggtcgacgggatggacgcggcggccttcatccaggccgtgcgcggcctgctcgaacatcccgccaccctgttcctggagtaa

SEQ ID NO: 7769 - DNA, 1395 bp, Pseudomonas aeruginosa
  CDS (1)...(1395)
atgagccagatcctgaagacttccctgctgatcgtcggcggcggtcccggcggctacgtcgcggcgatccgtgccgggcaactgggcattcccaccgtactggtggagggcgccgccctcggcggcacctgcctgaacgtcggctgcatcccgtcgaaggcgctgatccacgccgccgaggaatacctcaaggcccgccactatgccagccggtcggcgctgggcatccaggtacaggcgccgagcatcgacatcgcccgcaccgtggaatggaaggacgccatcgtcgaccgcctcaccagcggcgtcgccgcgctgctgaagaaacacggggtcgatgtcgtccagggctgggcgaggatcctcgacggcaaaagcgtggcggtcgaactcgccggcggcggcagccagcgcatcgagtgcgagcacctgctgctggccgccggctcgcagagcgtcgagctaccgatcctgccgctgggcggcaaggtgatctcctccaccgaggcgctggcgcccggcagcctgcccaagcgcctggtggtggtcggcggcggctacatcggcctggagctgggtaccgcctaccgcaagctcggcgtcgaggtggcggtggtggaagcgcaaccacgcatcctgccgggctacgacgaagaactgaccaagccggtggcccaggccttgcgcaggctgggcgtcgagctgtacctcgggcacagcctgctgggcccgagcgagaacggcgtgcgggtccgcgacggcgccggcgaggagcgcgagatcgccgccgaccaggtactggtggcggtcggccgcaagccgcgcagcgaaggctggaacctggaaagcctgggcctggacatgaacggccgggcggtgaaggtcgacgaccagtgccgcacctcgatgcgcaatgtctgggccataggcgatctcgccggcgagccgatgctcgcgcaccgggccatggcccagggcgagatggtcgccgagctgatcgccggcaagcgtcgccagttcgccccggtggcgatccccgcggtgtgcttcaccgatccggaagtggtggtcgccgggttgtccccggagcaggcgaaggatgccggcctggactgcctggtggcgagcttcccgttcgccgccaacggtcgcgccatgaccctggaggccaacgaaggcttcgtccgcgtggtggcgcgtcgcgacaaccacctggtcgtcggctggcaggcggtgggcaaggcggtctcggaactgtccacggccttcgcccagtcgctggagatgggcgcccgcctggaagacatcgccggcaccatccacgcccatccgaccctcggcgaagcggtccaggaagccgccctgcgcgcgctgggacacgccctgcacatctga

SEQ ID NO: 7770 - DNA, 1698 bp, Pseudomonas aeruginosa
  CDS (1)...(1698)
atgagcagtcaacgccgaaactaccgcttcatccttgtcgtcaccctgttcgtcctcgcctccctggccgtctccggacggttggtctatctccaggtccacgaccacgaattcctcgccgaccagggcgacctccgctcgatccgcgacctgccgatcccggtcacccgcggcatgatcaccgaccgcaacggcgagccgctggcggtatccaccgaagtcgcgtcgatctggtgcaaccccagggaaatggccgcccacctcgacgaggtgccgcgcctggccggcgccctgcaccgccccgcggcggcgctgctggcccagctccaggccaacccgaacaagcgcttcctctacctcgagcgcggcctgtcgccgatcgaggccagcgaggtgatggccctgggcataacgggggtacaccagatcaaggaatacaagcgtttctaccccagttccgagctgaccgcgcagttgatcggcctggtcaacatcgacggccgcggccaggaaggcaccgaactgggcttcaacgactggctgagcggcaaggacggggtacgcgaggtggcgatcaacccgcgcggctcgctggtcaacagcatcaaggtgctgaagacgcccaaggccagccaggacgtggccctgagcatcgacctgcgactacagttcatcgcctacaaggcgctggaaaaggccgtgctcaagttcggcgcgcactccggctcggcggtcctggtgaacccgaagagcgggcagatcctggcgatggccaacttcccctcctacaacccgaacaaccgcgccagcttcgccccggccttcatgcgcaaccgcaccctcaccgataccttcgagccgggctcggtgatcaagccgttcagcatgtcggcggcgctggcctccggcaagttcgacgagaacagtcaagtcagcgtggcaccgggctggatgaccatcgacgggcacaccatccacgacgtcgcccggcgcgacgtactgaccatgaccggggtgctgatcaactcctcgaacatcggcatgagcaaggtcgccctgcagatcggacccaagccgatcctcgaacagctcggccgggtcggtttcggcgcgccgctgtcgctgggcttccccggcgagaacccgggctacctgccgttccacgagaaatggtcgaacatcgccaccgccagcatgtcgttcggctacagcctggcggtgaacaccgccgagctggcccaggcctactcggtgttcgccaacgacggcaagctggtgccgctcagcctgctccgcgacaacccgcagaaccaggtgcgacaggcgatggacccgcagatcgcacggcgcatccgggcgatgctgcaaaccgtggtggaagacccgaagggcgtggtccgcgcccgcgtgccgggctaccacgtggcgggcaagagcggcaccgcgcgcaaggcctcgggccggggctacgcggacaagtcctaccgttcgctgttcgtcggcatggcgccggcgtccgacccgcaactggtgctggcggtgatgatcgattcgccgaccaggatcggctacttcggcggcctggtctcggcgcccaccttcagcgacatcatggccggatcgctacgcgccctggcgatcccgccggacaacctgcaggacagcccggccgtcgccgaccgccagcaccacggctga

SEQ ID NO: 7771 - DNA, 750 bp, Pseudomonas aeruginosa
  CDS (1)...(750)
atgggcaaactgctcccgctttctcccgtgccgctgtacagccagctcaaggagctgctgcgcgggcgcatcctcgacggcgtctacccgccgctcagccgcatgccctcggagaacgagctgggcaaggccttcgacgtcagccgcatcaccgtgcgccaggcgctcggcgacctgcagaaggaagggctgatcttcaagatccacggcaagggcaccttcgtcgcccggccgaaggcgttccagaacgtcagcaccctgcaaggcctgggcgagtccatgacgcagatgggctacgaggtcatcaaccgcctgcacggcctgcgctacgtgccggccggcgcgcgggtggccgagcgcctgcgggtggaagagggcagccctgtgtgcgagatcaagcgggtgcggctggtcaaccgcgagccggtttcgctggaagtcacctacctgccgcaggcgctcggcgagcgcctggagaaggccgacctggtgacccgcgacatcttcctgatcctcgagaacgattgcggcattcccctcggccatgccgacctggccatcgacgcggtgctcgccgatgccgacctgacccgcgccctggcggtcgaggagggcgcgccgatcatgcgtatcgagcgcctgacccatgccgccgacggcgcgccgctggacttcgaatacctctactaccgcggcgacgctttccagtatcgcctgcgcatcgatcggcagaagggagagcgggcatga

SEQ ID NO: 7772 - DNA, 1992 bp, Pseudomonas aeruginosa
  CDS (1)...(1992)
atggaaaacgccacgcaacccgtccccctgatcgaactgcgcgacatccgcaagcgctacggcggcaatggcaccccggaagtcgaggtactcaagggcgtatcgctgtcgatccacgccggcgagttcgtcgccatcgtcggcgcctccggctccggcaagtcgaccctgatgaacatcctcggctgcctcgaccggcccagctccggcagctaccacttcgccggccacgacgtcgccgaactggacagcgacgagcaggcctggctgcgccgcgaggcattcggcttcgtgttccagggctatcacctgatcccctccgcctcggcccaggaaaacgtcgagatgccggcgatctacgccggcatcccggcgagcgagcggcacacccgcgcgcgggccctgctcgaacgcctgggcctggccgagcgcaccgccaaccgtccgcaccagttgtccggcggccagcagcagcgggtgtcgatcgcccgcgcgctgatgaacggcggccatatcatcctcgccgacgaacccaccggcgccctcgacagccacagcggcgcggaagtcatggcgctgctcgacgagctggccagccagggccacgtggtgatcctgatcacccacgaccgcgacgtcgccgcccgcgccaagcgcatcatcgaggtgcgcgacggcgagatcgtcagcgacagcgccaacgacgagcgcccggcgcacccgagcgccggcgtcgagcgccacctgcaggccgacgatctcagccagcgcctcgccgagggcagcagcgaaccctcgggggcctggcgcgccgaactgctggaggcggtgcgcgccgcctggcgggtgatgtggatcaatcggttccgcaccgcgctgaccctgctcgggatcatcatcggcgtcgcctcggtggtggtcatgctcgccgtcggcgagggcagcaagcgccaggtgatggcgcagatgggcgcgttcggctcgaacatcatctatctcagcggctactcgccgaacccgcgcgcgccgatgggcatcgtcagcagcgacgacgtcgccgccatcgccaccctgccccaggtgaagaaggtcatgccggtgaacggcggcgagctggtggtgcgctacgggaacatcgactaccacgcctacgtcggcggcaacaacaccgacttcccggaaatcctcaactggccggtggccgagggcagctacttcaccgagcgcgacgaagacgccgccaccacggtcgcggtgatcggctacaaggtgcgcaagaagctgttcggcagcgccaacccgatcggccgctacatcctcatcgagaacgtgccgttccaggtcatcggcgtgctcgccgagaaaggctccagctccggcgacaaggatgccgacaaccgcatcgccatcccctactccgctgccagcatccgcctgttcggcacgcgcaaccccgagtacgtgatcatcgccgccgccgacgcccagcgcgtgcaccaggccgaacgcgccatcgaccagttgatgctgcgcctgcaccgcggccagcgcgactacgagctgaccaacaacgcggcgatgatccaggccgaggcgaagacccagaacaccctgtcgctgatgctcggctcgatcgccgcgatctccctgctggtaggcgggatcggcgtgatgaacatcatgctcatgaccgtgcgcgaacgcacccgcgagatcggcatccgcatggccactggcgcccgccagggcgatatcctccgccagttcctcaccgaggcggcgatgctctcggtggtcggcggcctggccgggatcgccctggccctgtgcatcggcggcgtgctgctgctcggccaggtcgcggtggccttttccctgtcggccatcgtcggcgccttcagttgcgcgctggtcaccggcctggtgttcggcttcatgccggcgcgcaaggccgcccagctggacccggtggccgccctggccagccaatga

SEQ ID NO: 7773 - DNA, 7347 bp, Pseudomonas aeruginosa
  CDS (1)...(7347)
gtgcaagcactcatagagaaggtgggctccctttccccccaggaaaggaaggcattggctgtcctgctcaagcagcaaggtgtcaatctcttcgagatcgcgccagtgttcaagcgccaggacggcgagcccctgcggctctcctatgcccaggagcgacagtggtttctctggcaactggagccggaaagcgcggcctaccatatcccgagtgtcttgcgtctacgtgggcggctggacctggatgccctgcaacgcagcttcgacagcctggttgcgcggcacgagaccctacgcacccgttttcgcctcgacggcgacgaggcgcgccaggagatcgccgcatccatggcattgccgttggatatcgtcgcgttggggccgctcgaggagggcgccctcgctcggcaggtcgagacgacgatcgcgcggccgttcgacctggagcgtgggccgctgctgcgggtgagcctgttgcggctggccgaggacgaccatgtgctggtgctggtccagcatcacatcgtgtccgacggttggtcgatgcaggtgatggtcgaggaactggtccagctctatgccgcctatagtcgagggctcgaggtagcgctgccggctttgccgatccagtacgcggactacgccctgtggcagcgcagctggatggaggccggggaaaaggagcgccagttggcgtactggaccggcctgctgggcggcgagcagccggtgctggagttgccgttcgaccggccgcgcccggttcggcaaagccatcgtggtgcccagttcatcctggaactggatattgatctgtcccaggcgctcaggcgcgtggcccagcaggagggggctactgccttcgccctgttgctggcttcgttccaggcgctgctgtatcgctacagcgggcaggcggatatccgtgtcggcgtgccgatcgccaatcgcaaccgcgtggagaccgagcggctgatcggcttcttcgtcaacacccaggtgctcaaggccgacctggacggtcggatgggcttcgacgagctgctggcccaggcccgccaacgcgcgctggaggcccaggcgcaccaggacctgccgttcgagcaactggtggaggccttgcagccggagcgcagtcttagccacaacccgctgttccaggtgctgttcaactaccagagcgaagcccgtggcaacggccaggcattccgcttcgacgagttacagatggaaagcgtgcagttcgacagccggacggcgcagttcgacttgacgttggacctgacggacgaagagcagcgtttttgcgccgttttcgactacgccaccgacctgttcgacgcctccaccgtggaacgcctggccggccattggcgcaacctgttgcgcggcatcgtcgccaacccacgacagcggctcggcgagttgccgctgctggatgcgccggagcgccggcagaccctctccgaatggaacccggcccagcgcgagtgcgcggtgcagggcaccttgcagcagcgtttcgaggaacaggcgcggcaacggccacaggcggttgcgctgatcctcgacgaacaacggttgagctacggcgaactgaatgcgcgggccaatcgcctggcgcactgcctgatcgcccgtggcgttggcgcggacgtgccggtcgggctggcgctggagcgttcgctggacatgctggtcggcttgctggcgatcctcaaggccggcggcgcctacctgccgttggacccggcggcgccagaggagcgcctggcgcatatcctcgacgacagtggggtacggctgctgctgacccaggggcatctgctcgagcgcctgccacggcaggcgggggtggaggtgctggccatcgacggactggtgctggacggctacgccgagagcgatccgctcccgacgctatcggcggacaacctggcctacgtgatctatacctcgggctcgaccggcaagcccaagggcacattgctcacccaccgcaacgcgctgcgcctgttcagcgccaccgaggcctggttcggcttcgacgagcgggacgtgtggacattgttccattcctacgccttcgatttctcggtctgggaaatcttcggcgcgctgctctatggcgggtgcctggtgattgtgccgcaatgggtgagccgttcgccggaagacttctaccgtctgctgtgccgcgaaggcgtgacggtgctcaaccagacgccgtcggcgttcaagcaactgatggcggtggcctgttccgccgacatggcgacgcagcagccggcgctgcgctacgtgatcttcggtggcgaggcgctggatctgcagagcctgcggccgtggttccagcgcttcggcgatcgccagccgcaactggtgaacatgtacggcatcaccgagaccacggtgcacgtaacctaccgtccggtgagcgaggccgacctggaaggtggcctggtcagtccgattggcgggaccatcccggacctgtcctggtacatcctcgaccgtgacctgaacccggtgccgcgcggcgcggtgggcgagctgtacatcggtcgcgccgggctggcgcgcggctacctgaggcggcccgggttgagtgccacccgcttcgtgccgaacccgttccccggcggcgccggcgagcggctgtaccgtaccggcgacctggcacggttccaggcggatggcaatatcgagtacatcgggcgtatcgaccaccaggtgaaggttcgcggcttccgtatcgaactgggcgagatcgaagcggcgctcgccggtctggccggggtacgcgatgccgtggtgctggcccatgacggagtcggcggcacgcaactggtgggatacgtggtggcggactcggcggaggatgccgagcgtctgcgggagtcgctgcgggagtcgctgaagcggcacctgccggactacatggtgccggcgcacctgatgctgctggagcggatgccgctgacggtcaatggcaagctcgaccggcaggcgttgccgcaaccggatgcgagcctgtcgcaacaggcctatcgagcgcccggtagcgagctggagcagcgcatcgcagcgatctggtcggagatcctgggagtggaacgggtcggcctggacgacaacttcttcgaactgggcggtcattcgttgctggctacccgggtgatttctcgggttcgccaggagcagcagttggacgcaagcctgaaggcgttgttcgagcggccggttctggaagcgttcgcccagggattggaacgcacgacggatgcggtctcgacgataccgcttgccgatcggcagcaaccgttggcactgtccttcgctcaggagcgtcagtggttcctctggcaactggagccggaaagcgcggcctaccatattccgagtgccttgcgcctacgcgggcggctggacgtggatgccttgcaacgcagcttcgacagcctggtcgcgcggcatgaaaccttgcgtacccgcttccggctggagggagggcgttcgtaccagcaggtacaacctgcggttagcgtttccatcgagcgggaacagttcggtgaagaaggcctgatcgaacggatacaggccatcgttgtgcagccattcgacctggaacgggggccgctgctgcgggtgaacctgttgcaactggccgaggacgaccatgtactggtgctggtccagcaccacatcgtgtccgatggttggtcgatgcaggtgatggtcgaggaactggtccagctctatgccgcctatagccaagggctcgacgtggtgttgccagccctgccgatccagtacgcggactacgccctgtggcagcgcagctggatggaggcgggggaaaaggagcgccagttggcgtactggaccggcctgctgggcggcgagcagccggtgctggagttgccgttcgatcggccgcgtccggcccggcagagccatcgtggcgcgcagttgggtttcgagctatcgcgggaactggtcgaggccgtgagagccttggcccagcgtgaaggcgccagtagtttcatgctgttgctggcctcgttccaggcgctgttgtatcgctacagcgggcaggcggatatccgtgtcggtgtgccgatcgccaatcgcaaccgcgtggagaccgagcggctgatcggcttcttcgtcaacacccaggtgctcaaggccgacctggacggtcggatgggcttcgacgagctgctggcccaggcccgccaacgcgcgctggaggcccaggcgcaccaggacctgccgttcgagcaactggtggaagccttgcagccggagcgcaatgccagccacaacccactgttccaggtgctgttcaaccatcagagcgagatacgctcggtgacgcccgaggttcagttggaggacctgcgtctggaaggcctggcctgggacggccagactgcgcagttcgacctgacgctggatattcaggaagacgaaaacggcatctgggcctccttcgactatgccaccgatctgttcgacgcctccaccgtggaacgcctggccggccattggcgcaacctgttgcgcggcatcgtcgccaacccacgacagcggctcggcgagttgccgctgctggatgcgccggagcgccggcagaccctctccgaatggaacccggcccagcgcgagtgcgcggtgcagggcaccttgcagcagcgtttcgaggagcaggcgcggcaacggccacaggcggttgcgctgatcctcgacgaacaacggttgagctacggcgaactgaatgcgcgggccaatcgcctggcgcactgcctgatcgctcgcggcgttggcgcggacgtgccggtcgggctggcgctggagcgttcgctggacatgctggtcggcttgctggcgatcctcaaggccggcggcgcctacctgccgttggacccggcggcgccagaggagcgcctggcgcatatcctcgacgacagtggggtacggctgctgctgacccaggggcatctgctcgagcgcctgccgcggcaggcgggggtggaggtgctggccatcgacggactggtgctggacggctacgccgagagcgatccgctcccgacgctatcggcggacaacctggcctacgtgatctatacctcgggctcgaccggcaagcccaagggcacgttgctcacccaccgcaacgcgctgcgcctgttcagcgccaccgaggcctggttcggcttcgacgagcgggacgtgtggacgttgttccattcctacgccttcgatttctcggtctgggaaatcttcggcgcgctgctctatggcgggcgcctggtgatcgtgccgcaatgggtgagccgttcgccggaagacttctaccgtctgctgtgccgcgaaggcgtgacggtgctcaaccagacgccgtcggcgttcaagcaactgatggcggtggcctgttccgccgacatggcgacgcagcagccggcgctgcgctacgtgatcttcggtggcgaggcgctggatctgcagagcctgcggccgtggttccagcgctttggcgatcgccagccgcaactggtgaacatgtacggcatcaccgagaccacggtacacgtaacctaccgtccggtgagcgaagccgacctgaagggtggcctggtcagtccgatcggcgggaccatcccggacctgtcctggtacatcctcgaccgtgacctgaacccggtgccgcgcggcgcggtgggcgagctgtacatcggtcgcgccggtctggcgcgcggctacctgaggcggcccgggttgagtgccacccgcttcgtgccgaacccgttccccggcggtgccggcgagcggctgtaccgtaccggcgacctggcacggttccaggcggatggcaatatcgagtacatcgggcgtatcgaccaccaggtgaaggttcgcggcttccgtatcgaactgggtgagatcgaagcggcgctcgccggtctggccggggtacgcgatgccgtggtgctggcccatgacggggtcggcggcacgcaactggtgggatacgtggtggcggactcggcggaggatgccgagcgtctgcgggagtcgctgcgggagtcgctgaagcggcacctgccggactacatggtgccggcgcacctgatgctgctggagcggatgccgctgacggtcaatggcaagctcgaccggcaggcgttgccgcaaccggatgcgagcttgtcgcagcaggcctatcgagcgcccggtagcgagctggagcagcgcatcgcagcgatctgggcggagatcctgggagtggaacgggtcggcctggacgacaacttcttcgaactgggcggtcactcattgttgctgctgatgctcaaggagcggatcggcgatacctgccaggctacgctgagcatcagccaactgatgacccatgccagcgtcgcggaacaggcggcatgcatcgaggggcaggcgcgtgagtcgttgctggtgccgctcaacggcaggcgcgaaggttcgccgctgttcatgttccatccgagtttcggctctgtgcactgttacaagaccctcgccatggcgctgcgggatcgtcatccggtcaagggtgttgtctgccgtgccctgctgggcgctggtcgcgaggtgccggagtgggacgatatggttgcggaatacgccgagcaattgctgcaggagcaccccgaaggggttttcaacctggcgggatggtcgctcggcggcaacctggcgatggatgtcgcggcccggctggagcagcgtgggcggcaggtggctttcgtcggctggatcgatgcaccggcaccggtcagggtcgaagcgttctggaacgagatcgggccgacgccggaggcagtcccgaacctatccgtgggcgagatgcgggtggaactgctcggtgtcatgtttccggagcgggccgagcatatcgaacgggcctggtcatcgatctgctccgccacgacggacgatgagcagcgctggacgaggatgagcgactgggcggaagcggagatcggcgccgagttcgcgacactgcgcagcgaaatcgcacagagcaacgaactggaagtgtcctgggagttgaaacagatcctcgacgagcgcctgaaagcgatggattacccgcgtctgacggcgaaggtcagcctctggtgggccgcgcgcagcaccaatgccatccagcggagcgcggtggagcgctcgatggccgaggcgatcggggctgagcgtgtcgaaccggtgcgggtgctggatacccggcacgacaagatcatcgaccaccctgagtttgtgcagagcttccgggccgccctggagcgtgccgggcgctga

SEQ ID NO: 7774 - DNA, 1002 bp, Pseudomonas aeruginosa
  CDS (1)...(1002)
atgacaacgcttgctgatattcccctgtccatgctcgacctggtgccggtgcgcaccggcggcagcgtggccgaagccctgcacaactccctggacctggcgcgccatgtggagcgcctgggcttcaaccgtttctggctggccgagcaccacaacatggatggcatcgccagctccgccaccgcgctgctgatcggccatatcgccggcggcacctcgcggatccgcgtcggctcgggtggggtgatgctgccgaaccatgcgccgctggtggtggcggaaaacttcggcaccctggagacgctctacccgggccgcatcgacctcggccttggccgcgcccccggcgccgaccaggcgaccatgcgcgccttgcgtcgcgaccgcctgggcaacggcgacgacttccccgagcaggtcgccgagctggaaatgctgctcggcccgcgccgttcccagcagagcctgctggcggtgccgggcgagggtacccaggtgccgatctggctactcggttcgagcctgttcagcgcccacctggcggcgcagaaaggcttgccctatgccttcgcttcgcattttgcaccgcgttacctgcacgaggcgctgcgcatctaccgcagcaacttccagccctcggcggtactcgacaaaccctacgcgatgatcggcgtgccgctgatcgccgcacctaccgacgaagaggccgagttcctcgccactaccgccttccagcgcgtgctggcgctgatccgcggcgagagcctgaaacagaagccgccggtggaaagtatggcgccgttgtggctgccccacgagcaggatgcggtcggcagcttcttcggcctggcggtgatcggcggtccggagaaggttcgcgcgcgtctggagatcctcctggagcagaccggcgccgacgagcttatcttcaccagcgacttctacgagcacgcccatcggctgcgctcttgcgaaatcgtcgcggagctgaaaggggcgtga

SEQ ID NO: 7775 - DNA, 996 bp, Pseudomonas aeruginosa
  CDS (1)...(996)
atgaaaacccgtcaactcggccacaacggcccttccgtctccgccatcggcctcggctgcatgggcatgaccgacttctacaccaccggcggcgaccgccaggaggccatcgccaccctgcatcgcgccgtggaactcgggctgaacttcttcgataccgccgacatgtacggcccgcacagtaacgaggaactgctcggcgaggccctgcgcggcaaacgcgagcaggtgttcctggccagcaagttcggcatcgtccgcgaccctgccaatccccgggcgcgcggcgtcgacggcagcccggcgtacatccgccgcgccatcgaaggcagcctgaagcgcctcggtaccgaccgcctggacctgtactatcagcaccgcatggacccgcaggtacccatcgaggacagcgtcggcgccctcgccgacctggtgaaggccggcaagatccgccacatcggtctcagcgaagcctcggcggaaaccctcgagcgtgcccaccgggtgcacccgatcagcgcgttgcagagcgagtactcgctgtggacccgcgatccggaggacaccggggtgctcgccgcctgccgtcgcctgggcatcgccttcgtcccctacagcccgctgggccgaggtttccttaccggcaccctgaagcgcccggaagacttcgccgccgacgactaccgtcgtttcagcccgcgcttccagggcgagaacttcgcgaagaacctgaagctggtggacaaggtcggcgaactggccgcagccaagggcgtgaaaccctcgcaactggcgctggcctgggtgctggcgcagggcgatgacctgatcccgattcccggcaccaagcagcggcgctacctggaggagaacgtcgccgcgacggaattgcgcctgagcgcggcggaactggccgagctggatgcgatcttccccgccgaggcggtcgccggcagtcgctatagcgaggaaggcatgcgcctggtcaatctctga

SEQ ID NO: 7776 - DNA, 936 bp, Pseudomonas aeruginosa
  CDS (1)...(936)
atgaacgaacagacctggatgctcttcggcgggatcggcgcgctgctgctgctcgcctcgctggtcggcttcgtcctcaagtggcgcgccggtcccggcccgaacgcggtgatcgacaacctgaacgcgcggatcaacgcctggtgggcgatggtcctggtgatcggtttcgccttctggcttggccaggcggcggtgatcctgctgttctatggcgtgtcgttctacgccctgcgcgagttcatcaccctcaccccgacccggcgcagcgactacccggcgctggtggcggcgttctacttcgtgctgccgatgcagtacctgctgatctacatcgactggtacagcatgttctcgatcttcatcccggtgtacgtgttcctgctgttgccgatcctcgcctcgctgggcggcgacaccaagcacttcctcgagcgcgcctcgaaagtgcagtggggcctgatgctggcggtgttctgtatctccttcgtgccggcgctgctgaccctcgacatccccggcttcgaggggcgcaacctgctgctgatcgcctacctggtgatcgtcgtgcagctctccgacgtgatgcagtacatctgcggcaagctgttcggcaagcgcaagatcgctcccaacctgtcgccgtcgaagaccgtcgaaggcttcgtcggcggcatcgccctggccaccgccatcggcgcctcgctgtggtggatcaccccgttcaacctctggcaggcggcgttgatcgcgctgctgatcaacctgctgggcttcttcggcggcctggtgatgtcggcgatcaagcgcgaccgtggggtcaaggactgggggcacatgatcgaaggtcacggtggcatgctcgaccgcctggactcggtgtgcttcgccgcgccgatcttcttccacgtggtgcgctactggtggacgccctga

SEQ ID NO: 7777 - DNA, 1398 bp, Pseudomonas aeruginosa
  CDS (1)...(1398)
atggatttcctgccgctgttccactccttgcaagggcgcctcgcgctggtggtcggcggcggcgaagtcgccctgcgcaaggcgcgcctgctggccgacgccggcgcgcgcctgcgcgtggtcgcgccgcagatccacatcgaactgcggcatctggtggagcagggcggcggcgagctgctcgaacgcgactaccaggacggcgaccagcccggctgcgccctgatcatcgccgccaccgacgacgaaccgctgaacgccgaggtgtcgcgagcggccaatgcgcgcgggataccggtcaacgtggtggacgcgccggccctgtgcagcgtgatcttcccggccatcgtcgaccgttcgccgctggtggtggcggtctccagcggcggcgatgcgcccgtgctggcgcggctgatccgggccaagctggaaacctggattccctcgacctacgggcaactggccggactcgccagccgcttccgccaccgggtcaaggaattgctacccgacctgcagcagcgccgggtgttctgggaaaacctgttccagggcgagatcgccgagcgtgtcctggccggccgtccggcggaagccgagcgtctcctggaggagcacctggccggcggcctcgcgcacatagccacgggcgaggtatatctggtcggggccgggccgggggatccggacctgctgacgttccgtgccctgcgcctgatgcagcaggccgacgtggtgctctacgatcgcctggtggcgccgtcgatcctcgaattatgccgccgcgatgccgaacgcctgtacgtcggcaagcgccgcgccgaacatgcggtgccgcaggatcggatcaaccgcctgctggtggagctggccagccagggcaagcgcgtgctgcgcctgaagggtggcgacccgttcatcttcggccgcggcggtgaggaaatcgacgaactggctgcccacggcatacctttccaggtcgtgccgggaatcaccgcggccagcggctgcgcggcctacgccgggattccactgactcatcgcgatcatgcgcaatcggttcgtttcgtcaccggtcatctgaaggacggcaccaccgacctgccgtggcaggacctggtagcgcctggccagaccctggtgttctacatgggcctggtgggattgccggtgatctgcgagcaactggtcgcccacggtcgctccgcacagaccccggcggcgctgatccagcaggggaccaccgcccagcagcgggtattcaccggaaccctggaaaacctgccgcaactggtggctgagcacgaagtgcatgcgccgaccctggtgatcgtcggcgaagtcgtgcaactgcgcgacaagctggcctggttcgaaggcgcccgcgaggacgcctga

SEQ ID NO: 7778 - DNA, 2436 bp, Pseudomonas aeruginosa
  CDS (1)...(2436)
gtgcgcaggaaaaatagcgatttgaaggattcgaccaccgcgagccatgccgccgcatggcgtcagcaactgcattcccgcctgaaggaaggggtcctgatcgcgctgggcgcgctctgcctctacttgtggatggctctgctcacctatgactcggccgatccgagctggagtcactcgagccaggttgaccaggtgcagaatgccgccggtcggctcggtgcggtatccgccgatatcctgttcatgacgctcggctacttcgcctacctctttccgctgttgctgggcatcaagacctggcaggtattccgccgccgcaacctgccgtgggaatggaacacctggctgttttcctggcgcctggtcgggctgatcttcctgatcctggccggctcggcactggcctacatccatttccacgccagcggccacatgccggccagcgcctcggccggcggcgccatcggccagagcctgggccgcgtcgcggtggatgcgctgaacgtgcagggcagcacgctggtgttcttcgccctgttcctcttcggcctgacggtgttcgccgacctctcctggttcaaggtgatggatgtcaccggcaagatcaccctggacttcttcgaactgatccagaacgccttcaatcgctggatgggcgcgcgcgccgagcgcaagcaactggtcgcgcaactgcgcgaggtcgacgagcgcgtcgccgaggtggtggcgccgagcgtgccggaccgccgcgaacagtccaaggccaaggagcgcctgctggaacgcgaagaggccctggccaagcacatgagcgagcgggagaagcgcccgccgccgaagatcgatccgccaccgtcgccgaaggccccggagccgagcaagcgcgtgctgaaagagaagcaggcgccgctgttcgtcgatacggcggtggagggcaccctgccgccgctgtcgctgctcgacccggcggaagtgaagcagaagagctactcgcccgagtcgctggaggcgatgtcgcgcctgctggagatcaagctgaaggagttcggcgtcgaggtcagcgtggactcggtgcatccgggccccgtgatcacccgtttcgagatccagcccgcggcgggggtcaaggtcagccgcatttccaacctggccaaggacctggcgcgctcgctggcggtgatcagcgtgcgggtggtggaagtgattcccggcaagaccactgtcggcatcgagattcccaacgaagaccggcagatggtgcgcttctccgaagtgctgtcgtcgccggagtacgacgagcacaagtccaccgtgccgctggccctgggccacgacatcggcggtcggccgatcatcaccgacctggcgaagatgccgcacctgctggtggccggtaccaccggctccggtaagtcggtgggggtcaacgccatgctcctgtcgatcctgttcaagtccacgccgagtgaggcgcgactgatcatgatcgacccgaagatgctcgaactgtcgatctacgaagggatcccgcacctgctctgcccggtggtcaccgacatgaaggaagccgccaacgccctgcgctggagcgtggcggagatggagcggcgctaccgcctgatggcggccatgggcgtgcgcaacctggctggcttcaaccgcaaggtgaaggacgccgaggaggccggcacgccgctgaccgacccgctgttccgtcgcgaaagcccggacgacgagccgccgcagctgagcaccctgccgaccatcgtggtggtggtcgacgaattcgccgacatgatgatgatcgtcggcaagaaggtcgaggagcttatcgcccgtatcgcgcagaaggcgcgggcggccggtatccacctgatcctggcgacccagcggccgtcggtggacgtgatcaccggcctgatcaaggccaacattccgacccggatcgccttccaggtctccagcaagatcgactcgcgcaccatcctcgaccaggggggcgccgaacaactgctcggccacggcgacatgctctacctgccgccgggcacaggcctgccgattcgcgtacacggcgccttcgtttccgacgacgaggtgcaccgggtggtcgaggcctggaagctgcgcggcgcgcccgactacatcgaggacatcctcgctggcgtcgacgaaggcggcggcggtggcggttccttcgatggcggcgacggctccggcgaaggcagcgaggacgacccgctctacgacgaggcggtacgtttcgtcaccgagagtcgccgggcatcgatctccgccgtgcaacgcaagctgaagatcggctacaaccgcgccgcgcggatgatcgaggcgatggagatggccggcgtggtcaccccgatgaataccaacggctcccgcgaagtcatcgcgccggcgccggttcgtgattga

SEQ ID NO: 7779 - DNA, 219 bp, Pseudomonas aeruginosa
  CDS (1)...(219)
atgtcgaaagaagacagcttcgaaatggaaggtactgtcgtcgacaccctgcccaacaccatgttccgtgtggagttggaaaatgggcacgtcgtcaccgcgcacatctccggcaaaatgcgcaagaactacatccgcatcctcaccggcgacaaggtccgcgtggaactgacgccctacgacctgagcaagggccgcatcacctaccgcgcccgctga

SEQ ID NO: 7780 - DNA, 1257 bp, Pseudomonas aeruginosa
  CDS (1)...(1257)
atgggataccaaaagatccaggtgccggcgaccggtgacaaaatcactgtgaatgccgacatgtccttgagcgtaccgaagaacccgatcatcccgttcatcgagggtgatggcatcggcgtcgatatcagcccggtcatgatcaaggttgtcgacgctgcagtggaaaaagcatacaagggcgagcgcaagatcgcctggatggaagtctacgccggcgagaaggccacccaggtctatgaccaggacacctggctgccccaggaaaccctggacgccgtacgcgactacgtggtttccatcaagggcccgctgaccaccccggtcggtggcggcatccgctccctgaacgtggccctgcgccagcaactcgatctctacgtctgccagcgcccggtacgctggttcgaaggcgtgcccagcccggtgaagaagcccggcgacgtggacatggtgatcttccgcgagaactccgaggacatctatgccggcgtcgagtggaaggccggttcgccggaagcggagaaggtcatcaagttcctcaccgaggaaatgggcgtcaagaagatccgcttcaccgagaactgcggcatcggcatcaagccggtttcccaggaaggcaccaagcgcctggtgcgcaaggccctgcaatacgccgtcgacaacgaccgcagttcggtgaccctggtgcacaagggcaacatcatgaagttcaccgagggtgccttcaaggattggggctacgaagtcgcgcgcgatgaattcggcgccgagctgctggacggcggtccgtggatgcagttcaagaatccgaagaccggcaagaacgtcgtggtcaaggacgtgatcgccgacgccatgttgcagcagatcctgctgcgccccgccgagtacgacgtgatcgccaccctgaacctgaacggcgactatctctccgacgccctggcggccgaggtcggcggcatcggcatcgcgcccggcgccaacctgtccgattcggtggccatgttcgaggcgacccacggcaccgcgccgaagtacgccggccaggacaaggtcaacccgggttcgctgatcctctccgcggagatgatgctgcgccacatgggttggaccgaggcggccgacctgatcatcaagggcaccaacggggcgatcgccgccaagaccgtgacctatgacttcgaacgcctgatggacggcgcgaccctgctgtcctgctcggagttcggcgacgcgatgattgccaagatgtag

SEQ ID NO: 7781 - DNA, 1128 bp, Pseudomonas aeruginosa
  CDS (1)...(1128)
atgtctgaatccgcccccaccccacgccgcgagcgcgtgatcgtcggcatgtccggcggcgtcgactcgtccgtctccgccctgctcctgttgcagcagggctatcaggtcgaaggcctgttcatgaagaactgggacgaggacgacggcaccgaatactgtaccgcccgcgaggacctggccgacgcccaggccgtctgcgaccggatcggcatcaagctgcacacggcgaacttcgccgcggaatactgggataacgtgttcgagcacttccttgccgagtacaaggccggccgtacgccgaacccggacatcctctgcaaccgcgaaatcaagttcaaggcgttcctcgactacgcgctgatgctcggcgcggacctgatcgccaccggccactatgtgcggcgccgcgaccgcgacgggcgcaccgagctgctcaagggcctggacccgaacaaggaccagagctacttcctgcacgcggtgggcggcgagcagatcgcccgcagcctgttccccgtcggcgaactggagaagccggaagtccgcgccatcgccgagaagcatggcctcgccacggcgaagaagaaggactccacgggcatctgcttcattggcgagcgacgcttcaccgatttcctcaagcagtacctgccggcccagccgggcgacatcgagaccaccgaaggcaaggtcatcggtcgccacagcggcctgatgtaccacaccatcggccagcgccagggcctcggcatcggcggtctcaaggaagccggcgacgatccctggtacgtgctcggcaaggacctgcaacgcaacgtgctgctggtcggccagggcaacgaccacccgctgctgttctcccgcgccctgctggcctcgcgaatctactgggtcaacccggtcgaactggagcggccgcgccgcctgcgggccaaggtgcgctaccggcagagcgaccaggactgcgtcctggagaaaaccgccgaaggctaccgcgcggtgttcgacgaaccgcagcgcgcagtgaccccggggcaatcggtggtgttctacgacggcgacgtctgcctcggcggcggcgtgatcgaaacggcggaagcctgggatttcggaggacgcccgtga

SEQ ID NO: 7782 - DNA, 975 bp, Pseudomonas aeruginosa
  CDS (1)...(975)
atgagccgcatcttcgcagacaacgcgcagtccatcggcaacacgccgctggtccagatcaaccgcatcgccccgcgcggcgtcaccatcctggccaagatcgaagggcgcaaccccggctattcggtgaagtgccggatcggcgcgaacatgatctgggatgccgaagccagcggcagactgaagtccggcatgaccctggtcgagccgacctccggcaacaccggcatcggcctcgccttcgtcgccgccgcacgcggctacaaactgatcctgaccatgccggcgtcgatgagcctggagcgacgcaaggtgctcaaggcgctgggcgcggagctggtcctgaccgaaccggcgaagggcatgaagggtgcgatccagaaggccgaggaactggtcgcgggggatcccgggaagtacttcatgccgcagcagttcgacaacccggccaacccggcgatccatgagaagaccaccggcccggagatctggaacgataccgagggcgcggtggacgtgctggtctccggggtcggcaccggcggcaccctcaccggcgtctcgcgctacatcaagaacacccggggcaagccgatcctcgccgtggcggtggagccggtgacctcgccggtgatcagccagaccctcgccggcgaggaggtcaagcccgccccgcacaagatccagggcatcggcgccggcttcgtgccgaagaacctcgacctgtcgctggtcgaccgggtcgagaagatcggcgacgacgaagcgaagaacatggcgctgcgcctgatgcaggaagaaggcatcctctgcggcatctcctccggcgcggcgatggccgccgcggtgcgcctggccgaggagccgaacatgcagggcaagaccatcgtggtgatcctccccgattccggcgagcgctatctttcgagcatgctcttcgacggcctgttcagcgaacaggaactgacccagtaa

SEQ ID NO: 7783 - DNA, 2379 bp, Pseudomonas aeruginosa
  CDS (1)...(2379)
atgaaattcagtgaaaagtggctgcggagctgggcaaatccgcaggtttcccatgacgagctggtcgctcgcctgtccatggtcggcctcgaggttgacgccgacctgccggtcgccggcgccttcagcggcgtggtggtcggcgaggtgctctcgaccgaacagcatccggacgccgacaagctgcgcgtctgccaggtcagcaacggcagcgagaccttccaggtcgtctgcggtgcgcccaacgtgcgcgcgggcctgaagattccgttcgccatgatcggcgccgaactgccggacgacttcaagatcaagaaagccaagctgcgcggcgtcgagtccttcggcatgctctgctcggccaaggaattgcagatcagcgaagagaacgccggtctgctcgagctgccggctgacgcgccggtcggccaggacgtccgcacctacctggagctggccgactacaccatcgaggtcggcctgaccccgaaccgcggtgactgcctgtcgctcgccggcctggcccgcgaagtcagcgccatctacgacgttccgctggcgccggtggcggtggacgcggtcgccgcgcagcacgacgagacccgtccggtcgaactcgccgcgccggctgcctgcccgcgctacctcggccgggtgatccgcaacgtcgacctgagccggccgaccccgttgtggatggtcgagcgcctgcgccgttccgacatccgcagcatcgacccggtggtcgacgtcaccaactacgtgatgatcgaactgggccagccgatgcatgccttcgaccttgccgagatcaacggcggcgtgcgcgtgcgcatggccgaggacggcgagaaactggtcctgctcgacggtcaggaaatcaccctgcgcgccgacaccctggtgatcgccgaccaccagcgcgccctggccatcgccggggtgatgggcggcgagcacagcggcgtcagcgacagcacccgcgacctgttcctcgaagccgcgttcttcgacaccatcgccctggccggcaaggcccgctcctatggcctgcacaccgactcctcgcatcgcttcgagcgcggcgtcgacagccagttggcgcgcaaggccatggagcgcgcgacgcgcctgatcctcgacatcgtcggcggtgaaccagggccgatcgtcgagcaggtcagcgaagcgcacctaccgaaggtcgcgccgatcaccctgcgcgccgagcgcgtgacccagatgctcggcatgccgctggacgccgccgagatcgtgcgcctgctgcaagccctggaactaacggtggtagccgacggggaagggcagtggtcggtcggcgtaccgagccatcgcttcgacatttccctggaagtcgacctgatcgaggaactggcccgtctctacggatacaatcgcctgccggtgcgctacccgcaggcgcgcctggcgccgaacaacaagccggaagcgcgcgccgcgctgccgctgctgcggcgcctgctggtcgcccgcggctaccaggaagcgatcaccttcagcttcatcgatccggccctgttcgaactgttcgatccgggcacccagccgctgaccctggccaacccgatctccgccgacatggcggcgatgcgttccagcctctggccgggcctggtcaaggcgctgcagcacaacctcaaccgccagcagtcgcgggtccgcctgtttgaaagtggcctgcgcttcgtcggtcaactggaaggcctgaagcaggaagccatgctcgccggcgccatctgcggcaagcgcctgccggaaggctgggccaatggtcgtgacggcgtggacttcttcgacgccaaggccgatgtcgaggcagtgctggccagtgctggtgccctcggcgacttcagcttcgtgcccggcgagcacccggcgctgcacccggggcagaccgcacgcatcgagcgggaagggcggctggtcggctacctgggtgcgctacatccggaattggcgaagaaactcgacctcgagcagccggtgttcctcttcgagctgctgctggccgaagtggtcgacggccacctgccgaagttccgcgagctgtcgcgcttccccgaagtgcgccgcgacctggcgctgctggtggatcaggacgtgccggcacaagacatcctgacacaaatccgtgcggcggccggcgaatggctgacggacctcaggctgtttgatgtgtatcacggtaaaggcattgatccgcatagaaaaagccttgccgtcggcttgacctggcagcatccatcgcgcactcttaatgacgatgaagtcaatagcacgacgcagaacatcgtcacgtcgttggaagaaaggttcaatgccacgttaaggaaatag

SEQ ID NO: 7784 - DNA, 1017 bp, Pseudomonas aeruginosa
  CDS (1)...(1017)
atggaaaacctggatgcgctggtctctcaagcattggaggctgtgcgacacaccgaagacgtcaatgccctggagcagatccgggttcactacctcggcaagaaaggcgaactgacccaggtgatgaagaccctgggcgacctgccggccgaagagcggccgaaggttggcgcgctgatcaacgtggccaaggaaaaggtccaggatgtgctgaacgcgcgtaagaccgagctggaaggggccgcgctggccgcccggctggccgcggagcgcatcgatgtcaccctgcccggtcgtggccagctgagcggcggcctgcatccggtcacccgcacgctggagcgcatcgagcagtgcttcagccgcatcggctatgaagtcgccgaaggcccggaagtcgaagacgactaccacaacttcgaagcgctcaacattccgggccaccacccggcgcgtgccatgcacgacactttctatttcaatgcgaacatgctgctgcgtacccacacctcaccggtgcaggtgcggaccatggagtcccagcagccgccgatccgcattgtctgcccggggcgcgtctaccgctgcgactccgacctgacccactcgccgatgttccaccaggtggaaggcctgttggtggacgagggtgtcagcttcgccgacctcaagggcaccatcgaggaattcctccgcgccttcttcgagaagcagcttgaagtgcgcttccgtccgtccttcttccccttcaccgagccctcggccgaagtggacattcagtgcgtgatctgcagcggcaacggctgccgcgtgtgcaagcagaccggctggctggaagtcatgggttgcggcatggtgcacccgaacgtgctgcgcatgtccaacatcgatcccgagaaattccagggcttcgccttcggcatgggcgccgagcgcctggccatgctgcgctacggggtgaacgacctgcgtctgttcttcgataacgatctgcgcttcctcggacaattccgctag

SEQ ID NO: 7785 - DNA, 357 bp, Pseudomonas aeruginosa
  CDS (1)...(357)
atggctcgtgttaagcgtggcgttatcgcccgtcgtcgtcacaagaaaattctgaagctcgccaagggctactacggtgcacgctcgcgcgtgttccgcgttgccaagcaggcggtgatcaaggctggccaatacgcctaccgtgaccgtcgtcagcgcaagcgtcagttccgcgcactgtggatcgcccgtatcaacgctggtgctcgtcagaacggtctgtcctacagccgtctgatcgctggcctgaaaaaggcggccatcgagatcgaccgtaaggtcctggccgatctggcagtgaacgaaaaagcggcgtttaccgcgattgtcgagaaagcgaaggcaagcttggcttaa

SEQ ID NO: 7786 - DNA, 552 bp, Pseudomonas aeruginosa
  CDS (1)...(552)
atcattattaagcgtgaaatgagacaggataagcgagctcaaccgaaacccccgatcaacgagaacatctcggctcgtgaggtacggttgattggagctgatggccagcaggttggtgttgtttcgatcgatgaggcgatccgcctagccgaagaggcgaagctggacctggttgagatttcggccgacgcggtgcctcctgtctgccgcatcatggactacggcaagcacctgttcgagaagaagaagcaggctgcggtcgccaagaagaaccagaagcaggcgcaggtcaaagaaatcaagtttcgtccagggacggaagaaggggattaccaggtaaaactacgcaacctggtacgtttccttagtgaaggggacaaggccaaggtatccctgcgattccgcggccgtgagatggctcaccaggagctggggatggagctgttgaagcgggtcgaagccgacctcgtggagtacggcaccgtcgagcagcatcctaagctggaaggacgccagctgatgatggtcatcgctcccaagaagaaaaagtaa

SEQ ID NO: 7787 - DNA, 1923 bp, Pseudomonas aeruginosa
  CDS (1)...(1923)
atgcccatcattactcttcccgacggcagtcaacgttccttcgatcacccggtctccgtggccgaggtggcccaatccatcggcgcgggcctggccaaggcgaccctcgccggcaaggtcgacggccgcctggtcgacgcctgcgacaccatcgatcgcgacgcgaccctgcagatcatcacgcccaaggacgaggaaggactggagatcatccgccactcctgcgcccacctggtcggccatgcggtcaagcagctctatccgaccgcgaagatggtcatcggcccggtgatcgaggaaggcttctactacgacattttcttcgagcgccccttcacccccgaggacatggcggcgatccagcagcgcatgcgcgagctgatcgacaaggactacgacgtgatcaagaagatgaccccgcgcgccgaggtcatcgagctgttcaagtcccgtggcgaagactacaagctgcgcctgatcgacgacatgccggacgagaaggccatgggcctgtacttccatgaggagtacgtggacatgtgccgcggcccgcatgtgccgaacacccgcttcctcaaggcgttccaactgaccaagatttccggcgcctactggcgcggcgactcgaagaacgagcagttgcaacgcatctacggcaccgcctgggccgacaagaagcaactggcggcctacatccagcgcatcgaagaggccgagaagcgcgaccatcgccgcatcggcaagcagctcgacctgttccacctgcaggaagaagcgccgggcatggtgttctggcacccgaatggctggagcgtctaccaggtgctcgagcagtacatgcgcaaggtccagcgcgaccatggctatgtcgaagtgcgtaccccgcaggtggtcgaccgcatcctctgggagcgttcgggccactggtcgaactacgccgagaacatgttcaccacctcctcggaaagtcgcgactacgcggtcaagccgatgaactgcccgtgccacgtgcagatcttcaaccagggcctgaagtcctaccgcgacctgccgctgcgcctcgccgagttcggcgcctgccaccgcaacgagccgtccggcgcgctgcacgggatcatgcgcgtacgcggctttacccaggacgacgcgcatatcttctgcaccgaagagcaggtgaagaaggaagcggccgatttcatcaagctgaccttgcaggtctaccgcgacttcggtttcaccgacatcgccatgaagctgtcgacccgtccggccaagcgcgtcggttccgacgagctgtgggatcgcgccgaaggcgcgctggccgatgcgctgaacgaatccggcctggcctgggaataccagccgggcgagggcgcgttctacgggccgaagatcgagttcaccctgaaggactgcctcggccgtaactggcagtgcggcaccctgcagtacgacccgaacctgccggagcgcctggacgccagctatatcgccgaggacaacaaccgtaagcgtccggtgatgctgcaccgtgcgatcctcgggtccttcgagcgcttcatcggcatgctcatcgagcactacgccggagccttcccggcctggctggcgccgacccaggcagtggtgatgaacatcaccgacaagcaggccgatttcgccgccgaggtggtgcggatcctcggggaaagcggattccgtgccaagtccgacttgagaaacgagaagatcggctttaaaatccgcgagcatactttgctcaaggttccctatctcttggttattggagatcgggaagttgaatcgaaggccgtcgcggtgcgtacgcgcgaaggggaagacctgggctccatgcccgtcacccagttcgctgagctgttggcacaggcggtttcccggcgtggtcgccaagactcggagtaa

SEQ ID NO: 7788 - DNA, 1704 bp, Pseudomonas aeruginosa
  CDS (1)...(1704)
atgggtctttgcggatgtatacgaggcaaacccatgactcaggaaaccgtcggcttcgccgcgctcggtattcaccccaatgtgctcgcggcaatcgtcgccgtaggctacgaagagccttcgcctatccaggctcaatcgattccgctgatcctcgaaggccacgacatgatcggccaggcgcagaccggtaccggcaagaccgccgcgttcgccctgccgctgctgtcgcgcatcgacccgagccgccgcgagccgcagatgctggtgctggtgccgacccgcgagctggccctgcaggtcgccaccgcctgcgaaacctattccaagcaattgccgggcgtcggcgtggtcgccgtctacggcggcgcgcccatggggccgcagctgaaggccctgcgccagggcgcacagatcctcgtcgctacccccggccgcctgtgcgaccacctgcgccgcgacgagaagctgctggccaccgtccaacgcctggtgctcgacgaagccgacgagatgctcaagctcggcttcatggacgacctggaagtgatcttcgaggcgcttcccgaatcgcgccagaccgtgctcttctcggcgaccctgccggcgtccatccgtggcatcgccgagcgccacctgaagcagcccaagcacgtcaagatcgccgccaagacccagaccgtggcgcgcatcgagcaggtccacctgatggtccatgccgaccagaaggccggttcgatccagcgtctgctggaagtcgagcagttcgacgcgctgatcgccttcgtccgcaccaagcaggccaccctcgactacgccgaattgctcgagcgccagggctaccgcgccgccgcgctcaacggcgacatgccgcaggcccagcgcgagcgggtcatcgagtcgctgaaggacggttcgctggacatcgtcatcgccaccgacgttgccgcccggggcctggacgtaccgcgcatcacccacgtgctgaacatcgacatgccgtacgaccccgagtcctacgtgcaccgcatcggccgtaccggccgtgccggccgggaagggcgcgcgctgttgctggtgactccgcgcgagcggcgcatgctgcaggtgatcgagcgggtcaccgggcagaaggtcggcgaagtccgcctgccggatgccgagaccgtgctggaggcccgcctggcgcgcctggccgcgagcctgacgcccttgctcgacagcgccgtcgagcagcgcggcgcggtgcgcgacgagctgtgccgtcgcctcggctgcgatgccgagaccctggccgccgcattgctggcacgcctgaccgccggcaaggcgctggacctggagtcggtgcgccgcgaacagccgctgaccccatcggcaccgcgcgagcgtgccgaccgtggcgaacgcggcgagcgtccggagcgcagcggcgagcgtcgtccgatggcgccgccgagcgaaggccgtgcccgctgccgcactgccctcggcgcgcgcgacggggttgcggcgaagaacctgctgggcgcgatcctcaacgagggcggcctgtcccgcgaggacatcggtcgcatccagattcgcgataccttcagcctgatcgagctgcccgaggccaatctcgagcgcctgctgaccaagctcaaggacacccgcgtcgccggcaaggccctgcgcctgcgccgctatcgcgaggactga

SEQ ID NO: 7789 - DNA, 1032 bp, Pseudomonas aeruginosa
  CDS (1)...(1032)
atgaccctgttccgcagccctcgcgcctattgcctgttgctgggcagcctggtcatgttgctcggcctgtcctgcgtggtcgccctcggcttcggtccggcgcgactggacagcggcctggtcggccgcatcgtcctccagcgcctgttcggcgtggcggcggagcccggtgcctggagcgccggccaggagcacatcgtctggctgatccgcgccccacgggtactgctcggcgcctgcgtcggcgccggcctggcgctggtgggagcggcgctgcaggcggtcacgcgcaatccgctggccgatccgcacctgctcggcgccacctccggcgcgaccctcggcgcggtgttggtggtgctctacatcggcgaggtgatcggcctgctgaccctgccgctggcggccttcctcggcgccctcggcagcatgctgctggtgctcggcgtggccagtcgcggcggccgcctgggcagcgaccggctgttgctggcgggggtcgcggtgtcgttcgtgctcctggcgctggccaacctgctgctgttcctcggcgaccaccgcgccgcctcctctgtgctgttctggatgctcggcggcctcggcctggcgcgctggtcgttgatctggctgccggcgctgtgcgtggccggcggcctgctggtactgctcgggctgggccgtgcgctgaacgcgctgatggccggcgaacagaccgccgtgaccctcggcctggacgcccgtcgcgtacgcctgtgggtcttcatctgctgctcgctgctgaccggcgtgctggtctcggtgagcggcgccatcggcttcgtcggtctcatgctgccgcacgccgcgcgcctgctggtgggtgccgagcaccgccgactgctgccggtgtgcgccctgctcggcgcgctgttcctggtctggatggatgtcgccgcgcgtaccctgatcgccccccaggacctgcccatcggcatcgccaccgcggccatcggcgggctgttcttcattctcctgctgcgtcgccgcagctga

SEQ ID NO: 7790 - DNA, 768 bp, Pseudomonas aeruginosa
  CDS (1)...(768)
atgtacagcctgcaggtcgaagacatccacaagcgctacggcagccatgaggtgctcaggggcgtttcgctcagggccggcaagggagacgtgatcagcatcatcggctcctccggctcgggcaagagcaccttcctgcgctgcgtcaacttcctggaaaagccctgtgccgggcacatccgcgtcggcgacgaggaactgcgcacccgtcccggcgccctgggcgagctgcgcgccgccgatccccggcagttgcagaggatccgcagccggctggcgatggtcttccagcatttcaacctgtggagccacctgacggtgctggagaacgtggtcgagtgcccggtcaacgtcctgagaatgaaccgcgacgacgccgtggcccgcgcgcgccactacctggccaaggtcggcctggcggagaaggtcgaacggcagtatccctgcgaactctccggcggccagcaacagcgcgtggcgatcgcccgcgccctggccatggagccgcaggtgatgctgttcgacgaaccgacctcggcgctcgatccggaactggtcggcgaagtgctgaaagtcatgcagcagttggccgaggaaggtcgcaccatggtcctggtcacccacgagatggcgttcgcccgccaggtttccagccatgtgatcttcctccaccagggcgtgatcgaagaggaagggacgccggaccaggtgttcggcgcgccgcgcagcgaacgcctgcgccagttcctcgccggcaacctgaaatga

SEQ ID NO: 7791 - DNA, 777 bp, Pseudomonas aeruginosa
  CDS (1)...(777)
atgctggtcgattcccactgccacctcgatcgcctcgacctggccgcccatggcggctcgctcgatgcggcgctggatgccgcgcgagcgcgtggcgtcggtcaattcctctgcatcggcgtcagcgccgacaatgcccaggcggtgaaggccctggccgagcgctatgccgacgtgcactgttcggtgggcgtacacccgctggacctggagcccggaagcgcgccagcgctggactggctgctgggcgaactggcgcatccgcgggtggtggcgatcggcgagaccggcctcgactaccactacgaaccggaagccgccgagttgcaacaggaggcgtttcgcctgcacctggaagccgcgcggatcaccgccaagccagtgatcgtgcacacccgcgaggcgcgcgccgacacgctggcgctgctgcgcgaggcggcgttgccgcaggccggcgtgctgcattgcttcaccgaggactgggaaatggcgcgatcggcgctggacttgggcttctacatttccctgtccggcatcgtcaccttccgcaatgccgatgccctgcgcgaggtggctcgccaggtaccggccgaccggctgttggtggagaccgactcgccctacctggcgccgattccccatcgcggcaagccgaacctgccggaatacgtgcgcgatgtcgccgaattcctcgcgacgttgcgtggcgtcagcctggaaaccctggcggagcagactaccgccaatttccatcggctgtttccgttggcccgctag

SEQ ID NO: 7792 - DNA, 633 bp, Pseudomonas aeruginosa
  CDS (1)...(633)
gtgaccggcctgttcgtcaccctggagggcccggaaggggccggcaagagcaccaaccgcgactacctggccgagcgcctgcgcgagcgcggcatcgaggtgcagttgacccgcgagcctggcggcacgcctctcgccgagcgcatccgtgaactgctgctggcgcccagcgacgagccgatggccgccgataccgagctgttgctgatgttcgccgcgcgggcccagcatctcgccggggtcatccgcccggcgctggcgcgcggggccgtggtgctctgcgatcgctttaccgatgccacctatgcctaccagggcggcgggcgcggtttgccggaggcgcgcatcgccgcgctggaaagcttcgtccagggcgacctgcggcccgacctcacgctggtcttcgacctgccggtggaaatcggcctggcgcgggcggcggcgcgtggccggctcgaccgtttcgagcaggaggaccgacgcttcttcgaggccgtgcgtcagacctacctgcagcgcgccgcgcaggccccggagcgttaccaggtgctcgatgccgggttgccgctggccgaggtgcaggctggcctggatcggctgctgccgaatctgctggagcgtctgaatggctga

SEQ ID NO: 7793 - DNA, 1245 bp, Pseudomonas aeruginosa
  CDS (1)...(1245)
gtgtcgcgtagacgcgtcgtcattactggcatgggcatgctgtcgccgctgggcctggatgtcccgagcagttgggaaggtattctcgccggtcgcagcgggatcgccccgatcgagcatatggacctgtccgcctattccacccgcttcggtggttcggtcaagggtttcaatgtcgaggaatacctgtccgccaaggaagcccgcaagctcgacctgttcatccagtacggtctcgccgccagcttccaggccgttcgcgattccggcctggaggtcaccgacgccaatcgtgagcgtatcggcgtatccatgggttccggtatcggcggcctgaccaatatcgagaacaactgccgatccctgttcgagcaggggccgcggcgcatctcgccgttcttcgtgcccggttcgatcatcaacatggtttccggcttcctgtcgatccacctgggtctgcaggggcccaactacgccctcaccaccgcctgcaccaccggtacccacagcattggcatggctgctcgcaacatcgcctatggcgaggccgacgtgatggtcgccggcggttccgaaatggctgcctgcggtctcggcctgggtggtttcggcgcggctcgcgcgctctccactcgcaacgacgagccgacccgtgccagccgtccgtgggaccgggatcgcgacggcttcgtcctgtccgacggttccggcgccctggtgctcgaagaactggagcacgcccgtgcccgcggcgcgcggatctatgccgagctggttggcttcggcatgagcggcgacgccttccacatgaccgcgccgccggaagacggcgccggtgccgcccgctgcatgaagaacgcgctgcgcgatgccggcctggatcctcgtcaggtcgattacatcaacgcccatggcacctccaccccggccggcgacatcgccgagatcgccgcggtgaagagcgtgttcggcgagcatgcccatgcgctgtcgatgagttcgaccaagtcgatgaccggccacctgttaggtgccgccggtgcggtggaggcgatcttcagcgtgctggccctgcgcgaccaggtcgccccgccgaccatcaacctggacaacccggacgaaggttgcgacctcgacctggtggcccatgaagccaagccgcgcaagatcgacgtggccctgtcgaactcgttcggtttcggcgggaccaacggcaccctggtgttccgcaggttcgccgactga

SEQ ID NO: 7794 - DNA, 237 bp, Pseudomonas aeruginosa
  CDS (1)...(237)
atgagcaccatcgaagaacgcgttaagaagatcgtcgctgaacaactcggcgtgaaggaagaagaagtcaccaacagcgcttccttcgtcgaagacctgggcgccgactcccttgacaccgtcgagctggtgatggctctggaagaggaattcgagaccgaaatccctgacgagaaagctgaaaagatcaccaccgttcaggaagccatcgactacatcgttgctcaccagcaataa

SEQ ID NO: 7795 - DNA, 744 bp, Pseudomonas aeruginosa
  CDS (1)...(744)
atgagtctgcaaggtaaggtcgcattggtaaccggcgccagccgtggcatcggccaggcgattgcgctggaactggggcgcctgggtgccgtggtcatcggcaccgcgaccagcgcgtccggcgccgagaagatcgccgaaaccctcaaggccaatggcgtcgagggtgcgggcctggtcctggacgtttccagcgacgaatccgtagccgcgaccctggagcacatccagcagcatctcggccaaccgctgatcgtggtcaataacgccggcatcacccgcgataatctgctggtgcgcatgaaagacgacgagtggttcgatgtggtcaacaccaacctgaacagtctctaccgtctgtcgaaagccgttctgcgcggtatgaccaaggcccgctgggggcgcatcatcaacatcggttccgtggtcggcgccatgggcaatgccgggcaaaccaactatgccgcggcgaaggccggcctggagggcttcacccgtgcgctggcccgggaagtcggttcgcgtgccattaccgtgaatgcggtggcgccgggcttcatcgacaccgacatgacccgcgagctgccggaagcccagcgcgaagcgctgctgggccagattccgctgggtcgcctggggcaggcggaagagatcgccaaggtggtcggcttcctcgcttcggacggcgcagcctatgtgaccggggccaccgtgccggtcaatggtgggatgtacatgagctga

SEQ ID NO: 7796 - DNA, 939 bp, Pseudomonas aeruginosa
  CDS (1)...(939)
atgtctgcatccctcgcattcgtcttccctggccagggttcgcaatccctcggcatgctggccgagctgggcgcccagcaggcgctggtgcgcgataccttcgccgaggcctccgaggcgctcggttacgacctttgggcgctggtccagaatggtcctgaagagcgcctgaaccagaccgacaagacccagccggccatccttacggtttcgatcgcgctctggcgcctctggctggccgagggcggtgcgcgcccggcgttcgtcgccgggcacagcctgggcgaatattccgcgctggtcgcggccgaaagcctggcgttcgccgatgcggtcaagctggtcgagcgtaggggccaactgatgcagcaggcggttccggcggggcagggcggcatggccgcgatccttggcctggaagacgccgatgtattggcggcctgtgccgaggcggcccagggcgaggtggtcagcgcggtcaacttcaacgcgccggggcaggtagtgatcgccggtgccgcggctgccgttgagcgtgccatcgaggcatgcaaggcacgcggcgccaagcgcgcggtggcgttgccagtcagcgtgccgtcgcattgcgaactgatgcgtccggccgccgagcagttcgccgcctcggtcgaaagcctgcagtggcaggcgccgaagatttcgctggtgcagaacgtcagcgccgccgtgccggctgatctcgatacgctgcgccgcgacctgctggcacagctgtacagcccggttcgctgggtggagagcatccagctgctggcggaaaagggcgtcaccgagctggtcgagtgcgggccgggcaaggtcctggcaggcctcaacaggcgctgcgcgaagggcatcaatacccatggcctggatggcgtcgaggcgttcgccgccacgcgcgccgccctggcctga

SEQ ID NO: 7797 - DNA, 3447 bp, Pseudomonas aeruginosa
  CDS (1)...(3447)
gtgtccgtactgcgtcttcccagcctgccggccagcgccggcaagcaacactggggcaacctccccggtgccgcgctgagcctggctgtcgccgaggccgccagttccgccaagcgcttcaccctgctgctgaccgccgacagccagaatgccgaacgcctggaacaggaactgcggttcttcgcccccgacctgccggtattgcatttccccgattgggaaaccctgccctacgacgtcttttcgccgcaccaggacatcatttcccagcgcatcgccgccctctaccagttgccgcagctcaagcacggcgtgctggtggtgccgatctccaccgccttgcaccgcctggcgccgacccgcttcctgctcggcagcagcctggtcctcgacgtcggccagaaactcgacgtcgagcggatgcgcctgcgcctggaaggcgccggctaccgctgcgtcgacacggtctacgagcacggcgagttcgccgtccgcggcgcgctgatcgacctgttcccgatgggcagcgagttgcccttccgtatcgacctgttcgacgacgagatcgagaccctgcgcaccttcgacccggagacccagcgctccatcgacaaggtcgagtcgatccgcctgctgccggcacgcgaattccccctgaacaaggaagcggtcaccggcttccgcggccgcttccgcgagcgcttcgacgtcgactaccggcgctgcccgatctaccaggacctcgccagcggtttgacaccctcgggaatcgagtactacctgccgctgttcttcgaggaaaccgcgaccctcttcgactacctgccgcaagacacccaggtgttctccctgcccggcatcgaacaggccgcggagcagttctggaatgacgtacgcagccgctacgaggaccgccgggtcgatccggaacggccattgctgccgccggcggaagtgttccttccggtggaagactgcttcgcccggctgaagaactggccacgggtggtcgccagccaggaggacgtcgagccgggcgtcgggcgcgagcgcttcccggccctgccgctgccgaacctggcgatcgaagccaaggccgccgagccgctggccgcgctgcgccggttcatcgaggagttccccggccgcgtactgttctgcgccgaatcggccggacgccgggaagtcctgctggagctgctggcccgactgaagctgcgccccgaggaagtcgacggctggccggccttcctcgccagccaggcacgcctggcgatcagcatcgcgccgctggacgagggcctgctgctggaccatccggccctcgccctggtcgccgaaagcccgctgttcggccagcgcgtcatgcagcgccggcgccgggaaaagacccgcgacggcggcgacgcggtgatcaagaacctcaccgagctgcgcgaaggcgcgccggtggtgcacatcgaccatggcgtcggccgctacctgggcctgatcactctcgaggtggacaaccagcaggcggaattcctcatgctgcaatacgccgaggacgccaagctctacgtgccggtcgccaacctgcacctgatcgcccgctacaccggcgccgacgacgccctggcgccgttgcaccggctcggctcggaaacctggcagaaggccaagcgcaaggccgccgagcaggtccgcgacgtcgccgccgagctgctcgacatctacgcccgccgcgccgcccgcgaaggcttcgcgttcaaggatccgcaggccgactacgcgaccttctcggccggcttcccgttcgaggagacgccggaccagcaaagcgccatcgaggcggtggtcgccgatatgctcgcgcccaggcccatggaccgcctggtctgcggcgacgtcggcttcggcaagaccgaagtggcgatgcgcgcggcgttcgtcgccgtgcatagcggcaagcaggtggcggtgctggtgcccaccaccctgctcgcccagcagcactacaacagcttccgcgaccgcttcgccgactggccggtgagcgtcgaggtgatgagccgcttcaagagcgccaaggaagtcgagaacgctgcgcggctactggccgaaggcaagatcgacatcctcatcgggacccacaagctgctccaggaagacgtgaagttcgccaacctggggttggtcgtgatcgacgaggaacaccgcttcggggtgcgccagaaggagcagctcaaggccctgcgcagcgaagtggacatcctcaccctcaccgccacgccgatcccgcggaccctgaacatggccgtctccggcatgcgcgacctgtccatcatcgccacgccgccggcgcgccgcctgtcggtgcgcaccttcgtcatggagcagcagaacgcggtgatcaaggaagcgctgctccgcgaactgctgcgcggcggccaggtgtactacctgcacaacgaagtgaagaccatcgagaagtgcgcccgcgacctcgccgaactggtcccggaggcgcgcatcggcatcggccacggacagatgcacgagcgcgagctggaacaggtgatgagcgacttctaccacaagcgcttcaacgtgctggtggcctcgaccatcatcgagaccggcatcgacgtgcccagcgccaacaccatcctcatcgagcgcgccgacaagttcggcctggcccagttgcaccagttgcgcggccgcgtcggtcgcagccaccaccaggcctacgcctacctgctgacaccgccgcgccgtcagatgaccccggacgccgagaaacgcctggaagccatcgccaacgcccaggacctgggcgccggcttcgtcctcgccacccacgacctggagatccgcggcgccggcgagttgctcggtgacggccagagcgggcagatccaggcggtcggcttcaccctctacatggaaatgctcgaacgggcggtgaaggccatccgcaagggcgagcagccgaacctcgagcagccgctgggcggtgggccggaggtcaacctgcgggtgcctgcgctgatccccgaggattacctgcccgacgtgcatgcccggctgatcctctacaagcgcatcgccaacgcccctgacgaggaaggtttgcgcgagttgcaggtggagatgatcgaccgcttcgggctcctgcccgatccggcgaagaacctgatgcgcctgacccttctgaagctgcaggcggaaaaacttggaatcctcaaggtcgatgccggaccgcagggcggtcgtatagaattcgccgccgatacccaggtcgacccgctggtactgatcaagctgatccagggccagccgaaccgctacaagttcgaaggcgcaaccctgttccgcttccaggtgcccatggaacgaccggaagaacgcttcaataccctggaggcgctgttcgagcgcctgacaccgcaaaccacctaa

SEQ ID NO: 7798 - DNA, 909 bp, Pseudomonas aeruginosa
  CDS (1)...(909)
atggacaaggacaaggttctgctggtcctgcacggcaagcaggcgggcaacgaagaggttcgtgccgcggtcgcggcacagcgcgaggccgggcgggagctggcggtgcgggtaacctgggaggacggcgacgcccggcgcatcgtcgaggaggcgctggcggccggctatgcgacgctggtcgcgggcggtggcgacggcacgctgcgcgaggtggccgaagcgctggcgcgcgggcgaggcgaggcgagcctggcgatcctgccgctgggcaccgccaacgatttcgcccgcgccgccgggattcccctggaaccggccgcggcgctggcgctgctcgaccagacggcgcggccgatcgacctgggcgaggtgaacggcaagctgttcctcaacatggccactggcggcttcggttcgaaggtcaccgcgaatacctcggaggacctgaagaaggttctcggcggtgccgcctacctgttgaccgggttgacccgtttttccgaagtgcatgccgcccagggccgtttcagcgccccggacttccagtgggaaggcgagttcctcgccctgggcatcggtaacgggcgccaggccggcggcgggcacgtactgtgtccgcaagcgcgagtggacgacggcctgctggacgtgagcatcctgccgacgccgcaggacatggtcggtaccctgggcaccctgctcggcggtggcaacggagtggaaagcctgttcgtccgcgcgcgggtgccatggctggaagtggaggcggcggaaggtctcgacgtcaatctcgacggcgagccgctggaaggacgcaagctgcgtttctcggtttccccgggcgcgctgcgcgtgcacttgccggccggctcgccgttgttgcgcgagccgccgcgcgaggactga

SEQ ID NO: 7799 - DNA, 540 bp, Pseudomonas aeruginosa
  CDS (1)...(540)
atgagccacaaggccgaaacggcattcgtgccgttgaacatcgccgtcctgaccgtcagcgatacccgtaccctggaaaccgatacttcaggccagttgttcgtcgaccgcctgaccgaggccgggcacaacctggccgctcgcgtgctgctgaaggatgacctataccggatccgcgcacaggtcgcgacctggatcgccgaggatagcgtgcaggtcgtgctgatcaccggcggcaccggtttcaccggccgcgacagcaccccggaagcggtggcctgcctgctggacaagcaggtggacggcttcggcgagctgttccggcagatttcgctggccgacatcggtacctccaccatccagtcgcgggccctggccgggctttccaacggcaccctggtctgctgcctgccgggctccaccaacgcctgccgcactgcctgggaaggcatcctcgtcgagcaactggacgcccgtcatcgcccgtgcaacttcgtcccgcacctgaaacaggcggcgccctgcgagagccgcgggtga

SEQ ID NO: 7800 - DNA, 873 bp, Pseudomonas aeruginosa
  CDS (1)...(873)
atgagcaactggctggtagacaagctgatcccttccatcatgcgttccgagtcccagaagagttcggtaccggaaggcctgtggcacaaatgcccgtcctgcgaagccgtgctgtaccgtccggagctggaaaagaccctggatgtctgcccgaagtgcgatcaccacatgcgcatcaacgcgcgtacccgcctggatatcttcctcgatgaggacggtcgcgaggagctgggcgccgacctcgagccggtggaccgcctgaaattccgcgacagcaagaagtacaaggatcgcctcgccgcggcacagaaggacaccggcgagaaggacgcgctgatcgccatgagcggcaagctgcagggcatgccggtggtcgcctgcgccttcgagttctccttcatgggcggttcgatgggcgccatcgtcggcgagcgcttcgttcgcgcagccaacgtcgcccttgagaagcgctgcccgctgatctgcttctccgcctccggcggcgcgcgcatgcaggaagcgctgatctcgctgatgcagatggccaagacctcggcggttctggcgcgcctgcgcgaagaaggcatcccgttcgtctcggtattgaccgacccggtctacggcggcgtttccgccagcctggcgatgctcggcgacgtgatcgtcggcgaacccaaggcgctgatcggcttcgccggtcctcgcgtgatcgagcagaccgtccgcgagaagcttccggaaggcttccagcgtagcgagttcctccttgagcatggcgccatcgacatgatcgtgcatcgtgccgagttgcggccgcgcctggccaatctgctgtcggccttcactcattcgccgagccccgtatccgcatga

SEQ ID NO: 7801 - DNA, 1011 bp, Pseudomonas aeruginosa
  CDS (1)...(1011)
atgtcccagcccctcaatgtcgcagtcgtaggcgccaccggatcggttggcgaggctctggtcggtctcctcgacgaacgcgacttcccgcttcatcgtttgcacctgctggccagcgccgagtcggccgggcagcgcatgggtttcgccgaaagcagcctgcgcgtcggcgatgtcgatagcttcgatttttccagtgtcggcctggccttcttcgccgcggcagccgaggtgtcgcgtgcccatgccgagcgcgcccgcgcggcgggttgttcggtgatcgacctgagcggcgccctggaaccgagcgtcgcaccgccggtcatggtttcggtgaatgccgaacgcctggcctcgcaagcggcgccgttccttttgtccagtccttgcgccgtagccgccgaactgtgcgaagtgctggcgccactcctggccacgctggattgccggcaactgaacctgacagcctgcctctccgtctccagcctggggcgcgaaggggtcaaggaactcgcccggcagaccgccgaactgctcaatgcgcgccccctggagccgcgtctcttcgaccgccagatcgccttcaacctgctcgcgcaggtcggagcggtggatgccgagggacacagcgcgatcgagcggcgcatcttcgcggaggtgcaggccttgcttggcgagcgtatcggaccgttgaacgttacctgcatccaggcgccggtattcttcggcgatagcctcagcgtgaccctgcagtgcgcggaaccggtggacctggccgcggtgacgcgggtcctcgatgcgacgaaaggtatcgaatgggtcggcgagggcgattatccgacggtggtcggcgatgccctcggccaggacgagacctatgtcggccgggtgagggcggggcaggctgatccctgtcaggtcaatttgtggattgtgtctgataatgtgcgaaaaggtgccgcgctgaatgccgtgctcctgggtgagttgttgataaaacactatctgtaa

SEQ ID NO: 7802 - DNA, 639 bp, Pseudomonas aeruginosa
  CDS (1)...(639)
atgaaaccctatacccagacgaccggtctcgtcgctccgctggatcgcgccaacgtcgataccgatcagatcattcccaagcaattcctcaagtcgatcaagcgcaccggcttcggccccaacctgttcgacgaatggcgctacctggatgtcgggcagccgggacaggacaactcgaagcgtccgctgaacccggacttcgtcctcaaccagccgcgctaccagggcgccagcgtactgctggcgcgggagaacttcggctgcggctcgtctcgcgagcacgcgccctgggcgctggacgagtacggtttccgcacggtgatcgcaccgagctatgccgacatcttcttcaacaacagtttcaagaacggcttgctgccgatcatcctgcccgaggccgaggtggacgaactgttccgccaggtcgaggcgaacgaaggctaccagttgtccatcgacctggcggcgcagaccgttacccgtcctgatggcaaggtgctgggtttcgaggtcgacccgttccgcaagcattgcctgctcaacggcctcgacgacatcggcctgacgctgcaggacgccgatgcgatccgtgccttcgaggacggctaccgccagcagcagccctggctgttccgctga

SEQ ID NO: 7803 - DNA, 1485 bp, Pseudomonas aeruginosa
  CDS (1)...(1485)
atgaccactgttcgtactcgcatcgccccgtcgccgacgggcgacccgcacgtcggtaccgcatacatcgcgctgttcaacctgtgcttcgcgcgtcagcacggcggtcagttcatcctgcgcatcgaggacaccgaccagctgcgttcgacgcgggagtccgagcagcagatctacgacgccctgcgctggctcggcatcgaatgggacgagggcccggacgtcggcggcccgcatggcccgtaccggcagagcgagcgcgggcatatctacaagaagtattcggacgaactggtcgagaagggccatgccttcacctgcttctgcacgcccgagcgcctcgatgcggttcgcgccgagcagatggcgcgtaaggaaaccccgcgctacgacggccactgcatgcacctgccgaaggatgaggtgcagcgccgcctcgccgccggcgagtcccacgtcacccgcatgaaggtgccgaccgagggcgtctgcgtggtgccggacatgctccgcggcgatgtcgagattccgtgggatcgcatggacatgcaggtgctgatgaaggccgacggcctgcccacctacttcctcgccaacgtggtcgacgaccacctgatgggcatcacccacgtcctgcgcggcgaagagtggctgccgtcggcgcccaagctgatcaagctctacgagtatttcggctgggagcagccgcagctgtgctacatgccactgctgcgcaacccggacaagagcaagctgtccaagcgcaagaacccgacctctatcaccttctacgagcgcatgggctacctgccgcaggcgctgctcaactacctcgggcggatgggctggtcgatgccggacgagcgcgagaaattcaccctcgccgagatgatcgagcatttcgacctgtcgcgcgtctccctgggcggaccgatcttcgacctggagaagctctcctggctgaacgggcagtggatccgcgagcagtccgtggaggagttcgcccgtgaggtgcagaagtgggcgttgaatcccgaatacctgatgaagatcgctccgcacgtgcagggacgggtggagaacttcagccagatcgcgccgctggccggattcttcttcagcggcggggtgccgctggacgcttcgctgttcgaacacaagaagctcgatccgacccaggtccgccaggtcctgcaactggtgctgtggaaactcgaatccctgcgccagtgggagaaggaacgcatcaccggctgcatccaggctgtcgccgaacacctccagctcaagctgcgcgacgtgatgccgctgatgttcccggccatcaccgggcatgccagctcggtttcggtgctggacgccatggagatccttggcgccgacctgtcgcgttatcgcttgcgccaggccctggagctgctgggcggggcgtcgaaaaaggaaaccaaggagtgggagaagatccgcgacgccattcccggctga

SEQ ID NO: 7804 - DNA, 1998 bp, Pseudomonas aeruginosa
  CDS (1)...(1998)
atgttggataatttgaggataaagctcctgggattgccgcgccgctataagcgaatgctgcaagtcgctgccgatgtgactcttgtgtggctatccctctggctggctttcttggtcaggttgggcacagaagacatgatcagcccgtttagcggccatgcctggctgttcatcgccgccccgttggtggccattcccctgttcatccgcttcggcatgtaccgggcggtgatgcgctacctgggcaacgacgcccttatcgcgatcgccaaggccgtcaccatttccgcgctggtcctgtcgttgctggtctactggtaccgctccccgccggcggtggtgccgcgttccctggtgttcaactactggtggttgagcatgctgctgatcggcggcttgcgtctggccatgcgccagtatttcatgggagactggtactctgctgtgcagtcggtaccatttctcaaccgccaggatggcctgcccagggtggctatctatggcgcgggggcggccggcaaccagttggttgcggcattgcgtctcggtcgggcgatgcgtccggtggcgttcatcgatgatgacaagcagatcgccaaccgggtcatcgccggtctgcgggtctataccgccaagcatatccgccagatgatcgacgagacgggcgcgcaggaggttctcctggcgattccttccgccactcgggcccggcgccgagagattctcgagtccctggagccgttcccgctgcacgtgcgcagcatgcccggcttcatggacctggccagcggccgggtcaaggtggacgacctgcaggaggtggacatcgctgacctgctggggcgcgacagcgtcgcaccgcgcaaggagctgctggaacggtgcatccgcggtcaggtggtgatggtgaccggggcgggcggctctatcggttcggaactctgtcggcagatcatgagttgttcgcctagcgtgctgatcctgttcgagcacagcgaatacaacctctatagcatccatcaggaactggagcgtcggatcaagcgcgagtcgctttcggtgaacctgttgccgatcctcggttcggtgcgcaatcccgagcgcctggtggacgtgatgcgtacctggaaggtcaataccgtctaccatgcggcggcctacaagcatgtgccgatcgtcgagcacaacatcgccgagggcgttctcaacaacgtgataggcaccttgcatgcggtgcaggccgcggtgcaggtcggcgtgcagaacttcgtgctgatttccaccgacaaggcggtgcgaccgaccaatgtgatgggcagcaccaagcgcctggcggagatggtccttcaggcgctcagcaacgaatcggcaccggtgctgttcggcgatcggaaggacgtgcatcacgtcaacaagacccgtttcaccatggtccgcttcggcaacgtcctcggttcgtccggttcggtcattccgctgttccgcgagcagatcaagcgcggcggcccggtgacggtcacccacccgagcatcacccgttacttcatgaccattcccgaggcagcgcagttggtcatccaggccggttcgatggggcagggcggagatgtattcgtgctggacatggggccgccggtgaagatcctggagctcgccgagaagatgatccacctgtccggcctgagcgtgcgttccgagcgttcgccccatggtgacatcgccatcgagttcagtggcctgcgtcctggcgagaagctctacgaagagctgctgatcggtgacaacgtgaatcccaccgaccatccgatgatcatgcgggccaacgaggaacacctgagctgggaggccttcaaggtcgtgctggagcagttgctggccgccgtggagaaggacgactactcgcgggttcgccagttgctgcgggaaaccgtcagcggctatgcgcctgacggtgaaatcgtcgactggatctatcgccagaggcggcgagaaccctga

SEQ ID NO: 7805 - DNA, 1065 bp, Pseudomonas aeruginosa
  CDS (1)...(1065)
atgaaaattctgaccatcattggtgcgcgtccgcagtttattaaagcgagtgtggtttcaaaggctatcattgagcagcagaccctttcggaaatcatcgttcatactggtcagcattttgatgccaatatgtctgaaatatttttcgaacagctgggtattccaaagccggattaccagttggatatccatggtggtactcacggccaaatgaccgggcgtatgctaatggagatcgaggatgtaattctcaaggagaaacctcatcgcgtattggtatacggcgataccaactctaccttggctggagcgttggctgcctccaagctgcatgttcctatcgcacacatcgaagccggcctgcgaagtttcaatatgcggatgccggaggaaattaaccgtattcttactgatcaggttagtgatattctgttttgccctactcgagttgcaattgataatctcaagaatgaaggtttcgaaagaaaggctgcgaagatagtcaacgtgggtgatgtgatgcaggatagcgctctattctttgcgcagcgtgcaacctcgccaattggacttgcgtcacaagatgggtttattctcgcgaccctgcatcgtgccgagaacaccgacgatccagttcgcctgacttcgatagtcgaggctctgaatgaaatccagattaatgttgcacctgtggtgctacccctgcatccacgtacccgcggtgtcatcgagcgcctagggctcaagctggaagtgcaggttatcgatcctgtcggatatctggaaatgatctggctgttgcaacgctctggcctggtgctcacggacagcggcggtgttcagaaagaagcattcttcttcggcaagccctgcgtgaccatgcgtgaccagaccgaatgggtggagctagtgacctgtggagccaacgttcttgtgggagcggcccgcgacatgattgtcgaatctgcacggactagcctgggaaagaccattcaagacgatggtcagctttacggaggcggtcaagcctcttctcggattgctgaatatcttgccaagctgtga

SEQ ID NO: 7806 - DNA, 1680 bp, Pseudomonas aeruginosa
  CDS (1)...(1680)
atgagcgaaagcttcgcagaactctttgaagaaagtctgaaatccctcgacatgcagccgggtgccatcatcaccggcatcgtggtcgacatcgatggtgactgggtcaccgtccatgccggtctgaaatccgagggcgtcatcccggtcgagcagttctacaacgaacagggcgagctgaccatcaaggtgggtgacgaagtccacgtcgcactggacgcggtagaagacggctttggcgagaccaagctgtcccgcgagaaagccaagcgcgccgagagctggattgttctggaagcggctttcgctgccgacgaagtggtcaagggcgtcatcaacggcaaggtcaagggcggtttcaccgtcgacgtcaacggcatccgcgcgttcctgccgggttctctggtcgacgttcgtccggttcgcgacaccacccacctggaaggcaaagagctcgagttcaaggtcatcaagctcgaccagaagcgcaacaacgttgtcgtttcccgccgcagcgtcctggaagccgagaacagcgccgagcgtgaagctctgctggaatcgctgcaggaaggccagcaggtcaaaggtatcgtcaagaacctcaccgactacggcgcattcgtggacctgggcggcgtagacggcctgctacacatcaccgacatggcctggaagcgcatcaagcatccgtccgagatcgtcaacgttggcgacgagatcgacgtcaaggtcctgaagttcgaccgcgagcgcaaccgtgtatccctgggcctgaagcaactgggcgaagacccgtgggttgccatcaaggcgcgttacccggaaggtacccgcgtcatggcccgcgtcaccaacctcaccgactacggctgcttcgccgagctggaagagggcgtggaaggcctggtacacgtctccgaaatggactggaccaacaagaacatccatccgtcgaaagtcgtccaggttggcgatgaagtggaagttcaggttctggacatcgacgaagagcgtcgtcgtatctccctgggtatcaagcagtgcaaatccaacccgtgggaagacttctccagccagttcaacaagggtgaccgtatctccggtaccatcaagtcgatcaccgacttcggtatcttcatcggtctggacggcggcatcgacggcctggtccacctgtccgacatctcctggaacgaagtcggcgaagaagccgtacgtcgcttcaagaagggcgacgagctggaaaccgtcatcctgtcggtcgatccggagcgcgagcgcatctccctgggcatcaagcagctggaagacgatccgttctccaactacgcgtccctgcacgagaaaggcagcatcgtccgcggtaccgtgaaggaagtcgacgccaagggcgctgtcatcagcctgggcgacgacatcgaaggtatcctgaaggcttccgaaatcagccgtgaccgcgtcgaagacgcgcgcaacgtcctgaaggaaggcgaggaagtcgaagccaagatcatcagcatcgaccgcaagagccgcgtcatcagcctctccgtcaagtccaaggacgtcgacgacgagaaggacgcaatgaaagaactgcgtaagcaggaagtagaaagcgctggtccgaccaccatcggtgatctgatccgtgctcagatggagaatcagggctaa

SEQ ID NO: 7807 - DNA, 2772 bp, Pseudomonas aeruginosa
  CDS (1)...(2772)
atgggcgaactggccaaagaaattctcccggtcaatatcgaagacgagctgaaacagtcctatctcgactacgcgatgagcgtgatcgtcgggcgggccctgccggatgcacgtgacggcctgaagccggtgcaccgccgtgtgctttatgccatgagcgagctgggcaacgactggaacaagccctacaagaaatccgcccgtgtggtcggcgacgtgatcggtaagtaccacccgcacggcgacaccgcggtctacgacaccatcgtgcgcatggcgcagccgttctcgctgcgctacatgctggtagacggccagggcaacttcggttcggtggacggcgacaacgccgcagccatgcgatacaccgaagtgcgcatggccaagctggcccacgaactgctggcggacctggaaaaggaaaccgtcgactgggtgcccaactacgatggcaccgagcagatcccggcggtcatgccgaccaagattcccaacctgctggtcaacggttccagcggtatcgccgtgggcatggcgaccaacatcccgccgcacaacctcggcgaagtgatcgacggctgcctggcgctgatggacaaccccgacctgaccgtcgatgagctgatgcagtacatccccggtccggacttccccaccgccggcatcatcaacggccgcgccgggatcatcgaggcctaccgcaccggtcgcgggcgcatctacatccgtgcccgcgccgtcgtcgaggagatggagaagggcggcggtcgcgagcagattatcatcaccgagctgccgtaccagttgaacaaggcgcggttgatcgagaagatcgccgagctggtgaaagagaagaagatcgagggtatttccgagctgcgcgacgagtctgacaaggacggcatgcgcgtggtcatcgagctgcgtcgcggcgaggtgggcgaggtggtcctcaacaacctctatgcccagacccagctgcagagcgtgttcggcatcaacgtggtggccctggtcgacggccagccgcgcacgctgaacctgaaggacatgctcgaggtgttcgtccgccaccgccgcgaagtggtgacccggcgtaccgtctacgagctgcgcaaggcccgcgagcgcgggcacatcctggaaggccaggcggtcgccctgtcgaacatcgacccggtgatcgagctgatcaagagttcgccgaccccggccgaggccaaggaacgcctgatcgccactgcctgggagtccagcgcggtggaagcgatggtcgagcgtgccggcgccgacgcctgtcgtccggaagacctggatccgcagtacggcctgcgcgacggcaagtactacctgtcgccggagcaggcccaggcgatcctcgagctgcgcctgcatcgcctgaccggcctggagcacgagaagctgctctccgaataccaggaaatcctcaacctgatcggcgagctgatccgcatcctgaccaacccggcgcgcctgatggaggtgatccgtgaggaactggaagcggtcaaggccgaattcggcgatgctcgccgcaccgagatcgtggcttcccaggtcgacctgaccatcgccgacctgatcaccgaggaagaccgcgtggtgaccatctcgcacggcggctacgccaagtcccagccgctggccgcctaccaggcgcagcgtcgcggcggcaaaggcaagtccgccaccgggatgaaggacgaggactacatcgaacacctgctggtggccaacagccatgcgaccctcctgctgttctccagcaagggcaaggtctactggctgcgtaccttcgagattccggaagcctcgcgtaccgcgcgtggccggccgctggtgaacctgctgccgctggatgagggcgagcggatcaccgcgatgttgcagatcgacctggaggcgctgcagcagaacggtggcgccgatgacgacctcgacgaagccgaaggcgcggtgctcgagggcgaggtggtcgaggccgccgaggtcgaggaagtcgagggcgagaccgccgagctggtggccgagccgaccggcgcctacatcttcatggccaccgccttcggtaccgtgaagaagaccccgctggtgcagttcagccgtccgcgcagcagcggcctgatcgcgctcaagctggaagagggcgacaccctgatcgccgccgcgatcaccgatggcgccaaggaagtcatgctgttctccagcgccggcaaggtgatccgcttcgccgagagcgtggtgcgcatcatgggccgcaacgcccgcggcgtacgtggcatgcgcctgggcaaggggcagcagctgatctccatgctgattccggagtccggggcgcagatcctcaccgcctccgagcgcggcttcggcaagcgtaccccgctgagcaagttcccgcgtcgcggccgcggcggccagggggtgatcgccatggtcaccaacgagcgcaacggcgcgctgatcgccgcggtacaggtccaggaaggcgaggagatcatgctgatttccgaccagggcaccctggtgcggacgcgtgtcgacgaagtctccctgtccggccgcaatacccagggcgtaaccctgatcaagctcgccagcgacgaggtactggtcggtctggagcgtgtccaggagccgtcgggcggagatgacgaggacctgcccgagggcgaggaagctgccgaatctctgggcgagtcggccgagtccgagtccgagcccgcggcggaagcggaaggcaacgaagagtaa

SEQ ID NO: 7808 - DNA, 1161 bp, Pseudomonas aeruginosa
  CDS (1)...(1161)
atgaacgataccccagagaatccccacgtaccggtcggggaaaaattgcagaaagtcctcgcccgtctcggcgtcggttcccggcgcgacgtagaagtgtggatcgccgaaggccgggtcaacgtcaatggcagcgtggccagcctcggccagcgggtcgacagccacgatgcgatcaccgtcgatggccacctgatccgccgcgaagaggccgccgagagtgtccgtcgcgtgctgatctacaacaagccggaaggcgaggtctgcacccgcgacgatccggaaggccgcccgaccatcttcgaccgcctgccgcgcctgcgcaccggtcgctggatcaatgtcggtcgcctggacatcaataccaccggcctgctgctgttcaccaccgatggcgaactggccaaccgcctgatgcatccttcctatgagatggaccgtgaatacgcggtacgggtgcgcggcgaggtcaccgaagagatgatcgagcgcctgctcaacggcgtgatgctcgaggacggcccggccaagttcagcgatatccagcaggcgccgggcggcgaaggcttcaaccactggtaccactgcgtagtgatggagggccgcaaccgcgaggtgcgccggttgtgggaatcccaggggttggtggtcagccgcctcaagcgggtgcgtttcggcccggtgttcctgacctccgagctgaccatgggccgctaccgcgaaatggaccagcgcgagatcgacatcctcagcgaggaagtcggcctcaagccagtggccctgccgggcatgaccaccaaggcgcgcgagaaggccgaacgccagcagcgcaagcaggcccgtccgctggcgcgcagcgagcgtccggaagccgggcgcaagcgtgcgccgcggcgcgaggacggcgaaaatgccgctcgtcgcgcgccggcttcgcgtcccgcgcgcggtccgcagccgagcgccgagcgcaaggggcgcgagcagggcactccggttgccgagcggccccgcgagagcaaccgcaagccgcgcccgagcaagccgcgcgacgagcgtccggccagcgcgccgggcgacaagccggcggcccgcaagccgcaggtcaagcggcggccgaaaccggccggcgacggtatgcgtccgggcttccgccgctga

SEQ ID NO: 7809 - DNA, 1005 bp, Pseudomonas aeruginosa
  CDS (1)...(1005)
atgactatccgcctggccatcaacggcttcggtcgcatcggccgaaacgttcttcgcgccctgtataccggccactaccgcgaacagttgcaggtagtggcgatcaatgacctcggcgacgccgcggtcaacgcccacctgttccagtacgacagcgtccatggacactttcccggcgaggtcgagcacgatgccgaaagcctgcgggtgatgggcgaccgcatcgccgtcagcgccatccgcaacccggcggaactgccctggaagagcctcggcgtggacatcgtgctcgagtgcacggggctcttcaccagccgcgacaaagccgctgcccacctgcaggccggcgccggcaaggtgctgatctcggcgcccggcaaggatgtcgaagccaccgtggtctacggcgtcaaccacgaggtgctgcgcgcctcccatcggatcgtctcgaacgcctcctgcaccaccaactgcctggcaccggtggcccaggtgctgcatcgcgagctgggcatcgagcacggcctgatgaccaccatccatgcctacaccaacgaccagaacctctccgacgtgtaccacccggacctgtaccgcgcacgttcggcgacccagtcgatgatccccaccaagaccggcgccgccgaggcggtcggcctggtcctgccggaactcgccggcaagcttaccgggctggcggtgcgggtgccggtgatcaacgtgtcgctggtcgatctcaccgtgcaggtggcccgggataccagcgtagacgaggtcaaccgcctgctgcgcgaagccagcgagggctctccggtgctcggctacaacacccagccgctggtgtcggtggatttcaatcacgacccgcgctcgtcgatcttcgacgccaaccacaccaaggtcagcggccggctggtcaaggcgatggcctggtacgacaacgagtggggcttctccaaccgcatgctggacagcgccctggcgctggccgccgcccgcgactga

SEQ ID NO: 7810 - DNA, 561 bp, Pseudomonas aeruginosa
  CDS (1)...(561)
atggaggctctcgacgccttgctcactcgcgtttcccacgcccgcctgagcgatcccgcgccctcgccggagcagctcgaccggctgttccgggtcgccttgcgtgccccggaccacgggcaactgcggccctggcgcttcatcctggtagagggcgaaggccgccgggccctgggcgacctctacgcccgcgccctggcgagccgccagccggacgccgccgaggaagcgctggccaaggcccgcaacatgccgctgcgcgcaccgctgctggtcgtggcggtcgcttgcctgcaggaccacccgaaggtgccgcacgctgagcaactgctggctgccggctgcgccgcccacggcctggtgctgggcgcctatgcccagggactgggggcgatgtggcggaccggcgagatggccaccgatccggtggtgcacgccggcctggggctcggcgagcaggagcggatcatcggcttcgtctacctgggtacgccgatgggcgagttgcgcacgccggcggaactcgacccgacggccttcgtcagcgcctggccgggctga

SEQ ID NO: 7811 - DNA, 996 bp, Pseudomonas aeruginosa
  CDS (1)...(996)
atgtcgttcgtcagcgtcgaacagctcgacaagagctacggtgccaccagcatcttccgcgatatcgacttcgccgccgcccgcggcgagttcgtcaccctgctcggccccagcggctgcggcaagtccaccctgctgcgctgcatcgccgggctgaccgaggtcgacagcgggcgcatcctcatcgacggcgaggatgtggtgcctttgccgccgcagaagcgcgggatcgccatggtgttccagagctacgcgctgttccccaacatgaccgtgcaacagaacgtcgccttcggcctgcgcatgcagaaggtgcctgcggcggaactgaagcagcgggtcgccgaagccatcgaactggtggaactgggcgagtacgccgcacgctacccgcaccaactctccggcggccagtgccagcgcgtggcgctggcccgctcgctggtgacgcgcccgcgcctgctgctgctcgacgagccgctgtcggccctcgacgcgcgcatccgcaagcacctgcgcgaacagatccgccgcatccagcaggagctggggctgaccacggtgttcgtcacccatgaccaggaggaagcgctgaccctgtccgaccgcatcgtcctgatgaacgccggacgcatcgtccagagcggcgacgcggagaccctctacaccgcgccggaaaacgccttcgccgccggcttcatcggcaactacaacctgctcgacgccgaacaggccagccgcctgctcggccagtcctgcgcgcaacaggtggcgatccgcccggaatccctgcgcctgggcaacgaaccgagcgaaggcgtgccggcgctggtacgctcgcacagtctgctcggcaacgtgatccgttaccgcgtcgaggccgccggggtggaactcaccgtcgacgtcctcaaccgcagcgcagaccgcctgtatccggccggcagtcagctgacgctggtcatcgatcgcaacagtattcgagaggtagcttga

SEQ ID NO: 7812 - DNA, 1431 bp, Pseudomonas aeruginosa
  CDS (1)...(1431)
atgaccccaggttatcccctcgccctctctcttgccgtctccatggccgtgctcggcagcgccttgccggcccaggcgcgccaggacgatccgtcactgttcaaccgccaggcccgtggcgaactcagcgagtacggcggcgcacggcgcgtcgagcaggacctgacccaggccctgaagcagtcgctgtcgaagaagaaggcgaagaacgtgatcctgctgatcggcgacggcatgggcgactccgagatcaccgtggcgcgcaactacgcgcgcggcgcgggcggctacttcaagggtatcgatgcgctgccgctgaccggtcagtacacccactactccctgcacaaggacagcggcctgccggactacgtgaccgattccgccgcctccgccaccgcctggtccaccggggtcaagtcgtacaacggcgcgatcggcgtggatatccacgaacagccgcaccgcaacctgctggagctggccaagctcaacggcaaggccaccggcaacgtctccaccgccgagctgcaggacgccacccccgccgccctgctcgcccacgtcaccgctcgcaagtgctacggtcccgaggccaccagcaagcagtgcccgagcaatgccctggagaacggcggcgccggctcgatcaccgagcagtggctgaagacccgccctgacgtggttctcggcggcggcgccgcgaccttcgcggaaaccgccaaggctggccgctatgccggcaagaccctccgcgcccaggccgaagcccgcggctaccggatcgtcgagaacctcgacgagctgaaagccgtgcgccgcgccaaccagaagcagccgctgatcggcctgttcgcgccgggcaacatgccagtgcgctggctcggtccgaccgccacctaccacggcaacctgaaccagccggcggtgagctgcgaggcgaacccgaagcgcaccgccgacatcccgaccctggcgcaaatgaccagcaaggccatcgagctgctgaaggacaatccgaacggcttcttcctgcaggtcgagggcgcgtccatcgacaagcaggaccatgccgcgaatccgtgcggccagatcggcgagaccgtcgacctcgacgaagccgtgcagaaggccctggcctttgccaaggccgatggcgagaccctggtgatcgtcaccgccgaccacgcccactccagccagatcatcccgccggaaaccgccgcgccggggctgacccaactgctcacgaccaaggacggcgcgccgctggcgatcagctacggcaactccgaggaaagctcccaggagcacaccggcacccagttgcgcatcgccgcctacggcccgcaggccgccaatgtcaccggcctgaccgaccagaccgacctgttcttcaccatccgtcgcgcactgaacctgcgcgactga

SEQ ID NO: 7813 - DNA, 951 bp, Pseudomonas aeruginosa
  CDS (1)...(951)
atgcccgccgctgcctactggctccccgccagcgacgaaaccccgctgtacacccgccactggccgagcgcaacggccgtcggcgcggtgatgctgtcccacggcatggccgagcacgccggtcgctacgagcgtctcgccgccgcgctgaacgctgccggctaccacttctatgcgatcgaccagcgcggccacggccggaccgccgaagccgacgagctgggccacttcgccgaccagggcggctggggcaaggtggtcggcgacctggccagcctgaaccaccatatccgccagcagcacccggaactgccgatcttcctgctgggccacagcatgggcagctacatctccatggcctacctgctgcaccacagctgcagcctgcaaggggcgatcctttccggttccaactaccagccgcaagcgctctaccggatcgcccgcctgatcgcccgcttcgagcgctggcgccaggggccgctgggcaagagcgcgctgatcgacttcctctcgttcggctcgttcaacaaggcgttcaagcccaatcgcacggccttcgactggctcagtcgcgatccgcaggaagtcgacaggtacgtggccgacccgctgtgcggcttccgctgcagcaaccagttgtgggtggacctgctcggcggcctggccgatatcaccccgcccacccacctgcggcagatcgatgccgacctgccgctgctgatcatcggcggcgaacgcgacccggtcagccagggcaagcgcctgggcgacctggccgacgccctgcgcggtgccgggctgcgccaggtgaccctgaagacctatcccgaggcccgtcacgagctgttcaacgagagcaaccgcgacgcggtcacccaagacctgatcgactggctggaacaggccctgcgccaccgccgggatcattcgacaaaggagagaacatga

SEQ ID NO: 7814 - DNA, 1176 bp, Pseudomonas aeruginosa
  CDS (1)...(1176)
atggaccttcgcttgctgttgctatccctgaccaccttcgccgccggcctggcggaaagcatcctgatcggcatcctgccgcccctggccgaagacctgcgggtctccatcagcctggccggccagctcaccaccctgttctccctcggcttcgccctcgccgcaccgctgctcggctggctgacccggcgcatcgaacgccgccgcctgctgctggcgaccctgctgctgttcgccctcagcaacgcgctcgccgccctcgctccgggctatctcggcctgctcctggctcgcctgggaatgtcggcctgttgcgggctgctgatcgtcctcgccagcctgctcgccgccgagctggccgccccggcccagcgcggccgggcgatcggcctgatcttcatgggcatcagcggttcgctggtgttcggcgtgccactgggcgtacagatcagcgactggttcggctggcgctggatcttcgccggcatcgcggtctattcgctgcccttgtgcctgctgctctggcgctacctgccgcaacgccaggccggcgacctgcccggccgcgaaggctacctgcggcagttgcgccagcccgcgctgtggctcgcgcaactggtatcgatcctgttgctcggcgggcacttcaccctgttcgcctatttcaccccgtacctggcgagcatggccggtattcgctcgcccagcgagatcagcctgatcctcctgctgatcggcctggcagcgctgagcggcggctatatcggcggctggctggccgaccacctcggccaccggcgcgccctgcgtctggtgccggcggccttcgccctggcgctggcggcggtgccgctgagcctgggcagcatcgggttcctgccggtactgatggtctggagcgcgatcagctggatgatctcgccggtggtgcagagcttcctgctgcgcagcgatccggccagcggttccgccggcgtcgccctgaacacctcggccatgcacctgggcgtgggcctcggcgcggcgctgggcggcctggtggtggcggcactgggagtcgccgcgacgccctgggtcggcctcgccctggtgctggcggcgctggcctgcgcgcttggcgccagcacgctggatggcgccacgcaagcgctgccgttcagtccccctgcacggtga

SEQ ID NO: 7815 - DNA, 858 bp, Pseudomonas aeruginosa
  CDS (1)...(858)
atgcgtgcatcgcttcgcgtcgtcgtcaccctgctggtggtcgctgccgctgtcctcgccggcatctggctctggcgctactacatgctctcgccctggacccgcgatgcccgggtgcgggccgacgtggtggtggtggcgccggacgtgtccggctgggtgaccgacctggaggtcaaggacaaccaggtggtcaaggtcggcgacgtgctgatgcgcatcgaccaggaacgctaccaggccaacctggagcaggcccgcgccgtcgccgagacccgtcaccagcaatacctgttgcgccagaacgaggcggcccggcgcagccgcctgggcatcggcgcgatcagcgccgaggacaaggaaaacgcccagatcaatgccgccatcgctcgcagcgagtaccaggaggcgctggcccaggtgaagatcgccgaactcaacctcaagcgcagcgagctgcgcgccgcgcgcaacggccaggtaaccaacctgcgcctggcccagggcaactacgccacggcgggccaggcggtgatggcgttggtcgaccagcagtccttctatgtggtcgcctacttcgaggaaaccaagctgcccggcatccgcgtcggcatgcgcgcccaggtccgcctgatgagcggcgatcagccgatcgacggcacggtggagagcatcagcagcggtatcaccgaccgcaactcgacgccggacggccagttgctggccaatgtcgagccgaccttcaactgggtgcgcctggcgcagcgtattccggtgcgcatccgcctcgaccaggtgccggcggatgtccacctgagcgccgggatgaccgccagcgtcaccgtgcagggggactga

SEQ ID NO: 7816 - DNA, 993 bp, Pseudomonas aeruginosa
  CDS (1)...(993)
atgccgcgcgccgccgtggtctgcggcctgggcagctacctgcccgaggccgtgctcagcaacgacatgctcgccgccgagctggacacttccgacgcctggatcagcagccgcaccggcgtgcgccagcggcatatcgccggcgacctcggcagcggcgacctggccctgcgggcggcctccgccgcgctcgcctcggcggggctggagcgagtcgatgcggtggtgctggcaaccagcaccggcgacttctgctgcccggccaccgcgcccagggtcgcggcgcgcctggggttggtcggcgcgctcgcgttcgacctgtccgccgcctgcaccggcttcgtctacggcctggccagcgtcggctcgctgatcagcgccgggctggcggacagcgcgctgctggtcggggtggacactttcagccataccctcgaccccgccgatcgctcgacccgcgcactgttcggcgacggcgccggagcggtggtgctgcgtgccggcgatgccgaggaagaaggcgcgctgctggccttcgacctcggcagcgacggccaccagttcgacctgctgatgacccccgccgtcagtcgcgccgaacgcagttccggacaggcctccaactacttccggatggacggcaaggcagtgttcggccaggcggtgacgcagatgagcgactcggtgcggcgggtgctcgaccgggtcggctggcaagcttcggacctccatcacctggtcccgcaccaggccaacacacgcattctcgcggcggtcgccgaccagctcgaccttcccgtcgagcgagtggtgagcaacatcgccgaggtgggcaataccgtcgccgcctcgattcccctggccctggcccacggcctgcgccaaggcatcctgcgcgacggcggcaacatggtcctcaccggtttcggtgccggactgacctggggttcggtcgccctgcgctggccgaagatcgttccgacaatggactga

SEQ ID NO: 7817 - DNA, 2139 bp, Pseudomonas aeruginosa
  CDS (1)...(2139)
atgcgcgagcaagccctacgcatcctcaaagacgttttcggttacgacgccttccgtggcaaccaggcacggatcatcgagcgggtagccgagggtggcgatgcgctggtactgatgcccaccggcggtggcaagtccctgtgtttccaggtcccggcgctgctgcgcgaaggcctgacggtggtggtgtcgccgctgatcgcgctgatggaggaccaggtcgccaccctggacgaactcggcgtgccggcggtggcgctgaactccaccctcaaccccgagcagcagcgggacatcgccgagcgcctgcagcgtggcgagatcaagctgctctacctggcaccggaacggttggtccagccgcgcatgctggccttcctgcaacgactgccggtcggcctgttcgccatcgacgaagcgcactgcgtgtcgcaatggggccatgacttccgtcccgaatacctgcagctcggccagcttgccgagctgttcccgcaggtgccgcggatcgccctgaccgccaccgcggacatgcgtacccgcgaggagatgatccagcgcctgcacctgcagaacgccgagcagttcctctccagcttcgaccggccgaacatcttctaccgcatcgtgcccaaggagcagccgcgcaagcagttgctcggcttcctctccgagcggcgcggcgatgccggcatcgtctactgcctgtcgcggaagaaggtcgaggaggtcgcggaattcctcggcaaccagggcttccccgcgctgccgtatcacgccggactgtccaacgaactgcgtgcccaccaccagaagcgcttcctcaacgaggaaggcttgatcatggtggcgaccatcgccttcggcatgggcatcgacaagcccaacgtgcgtttcgtcgcccacctcgacctgcccaagagcctcgaggcctattaccaggaaaccggccgcgccggccgcgatggcctgccggccgacgcctggatggcctacggcctgcaggacgtcctgctgctgcggcagatgatgcagagttccgagggcgacgagcggcacaagcgcgtcgagcggcacaagctggaagccatgctggcgctctgcgaggaaacccgttgccggcgccaggcgctgctggcctatttcgacgaggagatgccgcagccctgcgggcattgcgacaactgcgtggacggcgtggaaacctgggatgccaccgaatccgcgcgccaggcgctgtcggcgatctaccgcagcggccagcgctacggcgtcggccatctggtggatatcctgctcggccgcgagaccgagaagatccgcagtctcggccaccagcacctggcggtgttcgggatcggcaaggggcgcggcgaagacgagtggcggaccctgttccgccagttggtcgcgcgcggcctggccgacgtcgacctggacggcttcggcggcctgcgcctgaccgaggcctgtcgtccgctgctgcggggcgaggtgcggctggagctgcgccgcgacctcaaaccacagcgcgccaagggctcctccagcggcggcgccagcgccgccagccaattggtgcgcagcgaagagcgggaaatgtgggaggccctgcgcgcgctgcggcgcaagctggccgaagagcattcggtgccgccctatgtgatcttccccgacgcgaccctgctggaaatgctccgcagccagccgcgctcgctatccgacatggcccaggtcagcggggtcggcgcgcgcaagctggagcgctacggccaggccttcctcgatgtcctcaccgactcgccggcggcgcccgccgcgccgccgcaggacctgcgccacgaattggccagcctggcctgtgcggggatgaccccggcgcagatagcccgccagctcaattgcagcgagaagaacgtctacgcgatgctcgccgaggccatcgccggtcagcaggtgagcctggagcaggcgctggatctgcccgaggaactcctcggcgaaatccaggacgccttcctcgaggaagacggcgaactgccgccggtggcggcgctggaggagcgtttcggcaagcgggtgccgagtggcgtgctgcactgcgtgcgcgccgccctgcaggtggaactggagtcgtga

SEQ ID NO: 7818 - DNA, 1002 bp, Pseudomonas aeruginosa
  CDS (1)...(1002)
atgaatgagcgcaacggcgaagcgaaacgcctggcccttctggaggcggtcaacctggcgttgcaccgggccatggccgaggacgagacggtggtggtgctgggcgaagacgtcggggtcaacggcggggtgtttcgcgccaccctcggcctgcgcgagcgcttcggcttcaagcgggtgctggatacgccgctggcggagaacatgatcgccgggctgtccatcggcatggccgcccagggcctgaagccggtgatggagatccagttcatgggcttcatctacgccgccatggagcaactggtgtcccatgccagccgcctgcgcaatcgcacccgcggccgcctggcctgcccgttggtgctgcgcacgccgatgggcgcggggatccgcgcgccggagcaccacagcgaggcgaccgaggcgatgttcgcgcacatccccggcgtccgcgtgctggtgccgtcgtcgccggcgcgggcctacggcctgctcctggcggcgatcgacgatcccgatccggtgatcttcctcgagccgacccggctctaccggatgaacccgcagccgctggcggacgacgcccggcgcctgccgctggacagttgcttcacccttcgcgaaggcggcgacctgaccctggtcagctggggcgccagcgtccacgagacccagcaggccgccgagcgcctggcgcagcgcggcatcgaggccgaagtgatcgacgtcgcctgcctcaagccgctcgacctcgacaccctcgaagcttcggtgcgcaagaccggtcgctgcgtgatcgtccatgaggcgccgaagagcggcggccttggcggggaaatcgccgcgagcctctacgagcgcgtcctgttcgatctgcgggcgccgatccagcgggtcgccgcggccgatatcccgccgccgctgtaccgcctggaaccgctgtacatgcccgccgtggaggacatcctggcggcctgcgacaccgtgctcggctacgcctga

SEQ ID NO: 7819 - DNA, 1098 bp, Pseudomonas aeruginosa
  CDS (1)...(1098)
atggttcacaaccggatcgacccgcctttcacccgctacctcgacagcgacggtcggcccctcggcgagttgcccgcctgggccggcgacagcgatgcgctggtcggcctctaccggcagatgctcctgacccgcctgttcgaccagaaggcggtggccctccagcgtaccgggcggatcggcacctatgcgccaaccctcggccaggaagccatcggcgtggccatcggcagccagatgcgcgccgaggacgtgctggtgccgtattaccgcgataccgccgtgcaattgatgcgcggcgtgcgcatggaggacatcctcctctactggggcggcgacgagcgcggcagcgactacgccgaaccgctggcggcgcaggactttcccatttgcgtgccgatcgccacccaggccctgcatgcctgcggggtcgcctcggcgttccgcatccgcggcgaacaccgggtggcggtgaccacctgcggcgacggcgccaccagcaagggcgatttcctcgaggcgctgaacgtggcgggcgcctggcagttgccggtgctcttcgtggtcaacaacaaccagtgggcgatctcggtgccgcggcgcatccagtgcggcgcgccgaccctggcggagaaggcggtgggtgccggcttccccggcgaacaggtggacggcaacgacgtgctggcggtcgccgaacgcgtccgcgcggccctggagcgcgcgcgccagggcaaggggccgaccctgctggagtgcatcagctatcgcctctgcgaccacaccacggccgacgacgccagccgctaccgttccgccgaggaggtcaaccaggcctggcgcgaggagccgatcaagcgcctgcgcgccttcctcgccggccgcggccagtgggacgaggagcgcgagcaggcgctggtgggcgagtgccaggcgcgggtgcaggaggcggtggagcgtttcgagacgttcgccgcgcaggcgccgcaggcactgttcgagcatgtctacgcgcgctggccggcggtcctggaggagcagcgcgagcaattgctggagcgcgccgcgcggcggcggggaggggccgaacatgaatga

SEQ ID NO: 7820 - DNA, 1572 bp, Pseudomonas aeruginosa
  CDS (1)...(1572)
atgaaaaaaatcttattgatgcttttgtgcgtcagcgtgctgggttgctccaaaaacagcgtcgaatcggaaaaaccggtcgacgtgctcctgatcggtggcggcatcatgagcgccaccctgggtacctatctgaacgaactggaaccaggctggaccatcgagatggtcgagcgcctggacaaggtcgccgaagaaagctccaacggctggaacaacgcgggcaccggtcactcggcgttctgcgaactgaactacaccagcgaggccgcggacggctcgatggatatcagcaaggcggtggcgatcaacgagaacttcgagatctccaagcagttctgggcctaccaggtcgaccgcaaggtgctgaacgatccgaagtcgttcatcaacaacgtcccgcacatgagcttcgtctggggcgacgacaacgtcgccttcctcaagaagcgccacgccgccctgcagcacagctcgctgttccgcggcatggagtactcggaagaccccgagcagatcaagcagtgggtgccgctggtgatggaaggccgcgagccggggcagaagatcgccgccacgcgcatgtcgatcggcaccgacgtcaacttcggcgagatcactcgccaactggtgggctcgctgtcggccaaggacaccttcaagctgcgcctgcaacatgaggtccgcgacctcaagcgcaacgacgacaacacctggaccgtgaccatggccgacctggccaatggcgacaaggaaaccagcgtcaaggccaggttcgtcttcatcggcgccggcggcggcgcgctgaagctgctgcagatgtccggcatccccgaggccgaaggctacgccggcttcccggtgggcggttcgttcctcgccaccaccaacccggacgtggtcaagcgccacctggccaaggtctacggaaaggcttcggtgggttcgccgccgatgtcggtgccgcacctcgacacccgcatgatcgacggcaagccggttctgctgttcggtccgttcgccactttctccaccaagttcctgaagaacggctcgctgtgggacctgccgggctcggtgaccagcggcaacatcggcccgatgttcaacgccggcatcgacaacttcgatctcagccagtacctgatcggccagctgatgctcagccaggacgaccgcatggcctcgctgcgcgagtacttcccggaagcccgcgacgaggactggaagctggtgcaggccggccagcgcgtgcagatcatcaagaaggacgccgagaaaggcggcgtactgcaattcggcaccgaagtggtgaccgcagcggacggctccgtcgccgccctgctcggcgcctcgccgggcgcctcgaccgccgcgccgatcatgctgtcggtgctggagaaggccttcaaggacaaggtcgctacccccgagtggcaggcacgcctgaaggaaatcgtgccgtcttacgggcgcaagctgaacaacgacatcgagctgaccaacagcacccgtgcctggagcagcgagcgcctgcaactgatccacgtgccggtacagccggaggcctga

SEQ ID NO: 7821 - DNA, 474 bp, Pseudomonas aeruginosa
  CDS (1)...(474)
atggttgaaagtaataagaccgctgccgatacctattcgctcgctattttccgcgccatccgccgtctccagcaggccgccgaaatccactccaagcgtctcagccgatacggtggcctgaccccgctgcaattgctgatcctgcatgtcctggcggtggagggagaactgaccgcgacgcaactggccaagctggtcagcctgtcccaggcatcgctctccggcgtgctcgaccgcctcgaaggacgcggcctgctctatcgtcggcgcgacgaacaggaccggcgcaagtcctggctgcacctcgacccggccggccacgaagccctggcggaggcgccgccgctattgccggagtacgtgatcgagcgcttcgccgcgttgcccgagtgggagcgccacggcctgctggccgcgctgctgcgcgcggccgacctgttcggcttgccggaagaggacgtcgaagaagagtga

SEQ ID NO: 7822 - DNA, 1197 bp, Pseudomonas aeruginosa
  CDS (1)...(1197)
atgacccctctgccacaaccggacctcaactacctgcaacgggtgctgctggagatgctcgccatccccagccccaccggcttcaccgataccatcgtgcgctatgtcgccgagcagctcgacgaacttggcgtgcccttcgagatgactcgccggggaaccatccgcgcgaccctccagggccgcctgaataccccggaccgggcggtttccgcgcacctcgacacgatcggcgcgctggtccgcgagatcaagcccaacggccgcctcggcctggccccggtaggctgctggtcgagccgtttcgccgagggtagccgggtcacggtgttcaccgaacagggcgtgttccgtggcagcgtgctgccgctgctggcctcgggccacgccttcaataccgaggtggacaacctgaagatcagctgggacaacatcgagctgcgtctcgacgcctataccgccagccgcgccgacagcgagagcctgggcatctcggtgggcgactacgtggccttcgatccgctgccggagttcaccgagagcggccatatcagcgcccgccacctggacgacaaggccggggtcgcggcgctgctggcggcgctgaaggcggtcaaggaaagcggccaggagccgccgatcgactgccacccgctattcaccatcaccgaggaagtcggttccggcgccgccggcgccctaccctgggacgtcagcgagttcgtcggcatcgacatcgccccggtggccgaaggccagaattccaacgagcacagcgtcagcgtggccatgcaggactccggcgggccctacgacttccatctgtcgcggcacctgctgcggctcggcgagcgccacgacatcgccctgcgccgcgacctgttccgctactaccacagcgacgcgcagtcggcgatcgccgccggccacgacacccgcgccgcgctgctggcgttcggctgcgacgccacccacggctacgagcgcacgcacatcgacagcctcgccgcgctgagccgcctgcttaccgcctacatcctcagcccgccggtcttcgccagcgacgccaagccccgggaaacctcgctggaacgcttcaacaagcagctcgagcatccggtgcacatggaaagctgcacccacgtcccgccggtggacgaagtgctcgacagcagcaacaacagcgacaagggctga

SEQ ID NO: 7823 - DNA, 2034 bp, Pseudomonas aeruginosa
  CDS (1)...(2034)
atgtccgaaccacgcaagatcctcgttaccagcgccctcccctacgccaacggttccattcacctgggacacatgctggagtacatccagacggacatgtgggtgcgcttccagaagatgcgtggcaaccaggccgtctacgtctgcgccgacgacgcccacggttcggcgatcatgctccgcgccgagcgcgagggcatcacctccgagcaactgatcgacgccgtgcgcgccgagcacatgggcgacttcgccgacttcctggtggacttcgacaactaccactcgacccactcggaagagaaccgcgagctgtccagcgcgatctacctgaaactgcgcgacgccgggcacatcgacacccgcccggtgacccagtacttcgacccggaaaagcagatgttcctcgccgaccgcttcatcaagggcacctgcccgaagtgcggcaccgccgaccagtacggcgacaactgcgaggcctgcggcgcgacctacgccccgaccgaactgaaggacccgaaatcggcgatctccggcgccaccccggtgctcaaggaatcgctgcactacttcttcaagctgccggacttcgaggccatgctcaagcaatggacccgcagcggcgcccttcaggagtcggtggccaacaagctcgccgaatggctggacagcggcctccagcagtgggacatctcgcgtgacgcgccgtacttcggcttcgagattcccgacgctcccggcaagtacttctacgtctggctggacgcgccgatcggctacatggccagcttcaagaacctctgcgcgcggcgtcccgagctggacttcgacgcgttctggggcaaggactccggcgccgagctgtaccacttcatcggcaaggacatcgtcaacttccacgcgctgttctggccggccatgctcgaaggcgccggctaccgcaagccgaccgcgctgaacgtgcacggctacctgaccgtgaacggccagaagatgtccaagtcgcgcggcaccttcgtcaaggcgcgcacctacctcgaccacctggacccggaatacctgcgctactactacgcgtccaagctcggccgcggcgtcgaggacctcgacctgaacctcgaggacttcgtgcagaaggtcaactccgacctggtcggcaaggtcgtcaacatcgccagccgctgcgccggcttcatccacaagggcaacgccggcgtgctggtcggcgccgatccggcgccggaactgctcgccgccttccgcgaggccgcaccgggcatcgccgaggcctatgaggcccgcgacttcaatcgcgccatgcgcgagatcatggccctcgccgaccgcgccaacgcctggatcgccgaacaggcgccctgggcgctggccaagcaggaaggccagcaggacaaggtccaggccgtctgcggcctgggcatcaacctgttccgccagttggtgatcttcctcaagccggtgctgccgaagctggccgccgccgccgaagccttcctcaacgtcgccccgctgacctgggccgaccaccagaccctgctggccaaccaccagttgaacccgttccagcccctgatgacccgtatcgagcccgcgaaagtagaagccatgatcgaagcctccaaggaagacctcgccgccgcatcccaacccgccggcaacggcgagctggtcaaggaacccatcgccgcggagatcgacttcgacgctttcgccgcggtcgacctgcgcatcgccctgatcgagaagtgcgaattcgtcgaaggcgccgacaagctgctgcgcctgtcgctggacatcggcgacgcgaagcgtaacgtgttctccgggatcaagagcgcatatcccgacccgagtgccctggaaggccgcctgacgctctatgtggccaacctggcgccgcgcaagatgaagttcggggtgtccgagggcatggtcctggccgccggcccgggtggcgaggagatctacctgctgagtccggacagcggcgccaagccgggccagcgcgtcaagtaa

SEQ ID NO: 7824 - DNA, 1434 bp, Pseudomonas aeruginosa
  CDS (1)...(1434)
atgccaagtcacattacggaatcccgtatacacgggggcgcctactcgtccccggcattcgccgcgatcttttccgataccaaccaggtgcggaggtggctggatgtcgagcgagccttggcggcgacccaggccgagatgggcatcatcccccacgaggcggcgcgggagatcgaccgcgccgcccaggtggagcgcttcgacctcacccaactgggccgcgaaagcctggagacagggcacctgctggtgcctaccatccgcgccctggcgaggtcgtgcgagggtagctggggggagtacgtgcactatggcgtgaccacccaggacatcctcgacaccgggctgatgctgcaggtcaaggaagcctggggccatgcgctcgggctcctgcactcgatccgtggccatctgctggcgcttgccctgcgccaccagcacacgccgatggttgcacgcacccacgggcagcaggcgctgcccacgaccttcggctacaaggtcgccgtctgggtggatgaaatcgaccgtcacctggcgcgcttcgacgaagcgcgcgaacgcgtcctggtcggcaacctgaccggtgccgtgggaaccctggcgtcgttcggcgcccagggcttcgagctacagcggcgaaccctggccaggcttggcctcggcgcgccgtcgaccagttggcacagcgcccgggaccgggtgctggaggttgccgggttgctggtccaggtgtcggtgacgctgggccgggtggcgaacgagatctaccacctgcagcgcagcgaaatcgacgaggtacgcgagggcagccggccgggacaggtgggcagcagcaccatgccgcacaagcggaacccgtcgtcggtcgacctggtcagcgcgctgtcgcggctggtgcgggcacagatggtggcgctcaccgatgccgcgttccagttgcacgagcgcgacggcaccgcctggcgcatcgagtgggcggcgttgccggagctgttcgtctacgccggcgccttgctgacccgcatggaggcggtgctggccgaggggctcgaggtgcgcgaggaacgcatgcgcgccaacctcgacctgctgggtgggctgatcctgtcggagcgggtcatgctcgcgctggcggggcagttcggcaagcagaccgcccacgaactgctccatgagataacccaggcctcccagcggcagggcgttccgttccgcgaggcgctgctcgggcagccaaggttgcgcggctgtttcagcgccgaggcgctcgaagaactgctcgaccccgtcggctacgtcggcctcgccgcggagatggtcgacctggtcgccgacaaaccacgaaccggcgcgtcgggcgacaggcccgaaggcgccgcctcttcccaaggaaatcccggtcagtcccagtacgtgatggaggataggtga

SEQ ID NO: 7825 - DNA, 1758 bp, Pseudomonas aeruginosa
  CDS (1)...(1758)
atgaaactagcgatcgtcaccgcctgccctggcggacaggtcaccagcgtgctcgccgcgcgcctgctgcggggcgccgccgagcgcctgggctgggaaacctgcgtcgaggcgaatgccgggtcgaggcccgagggcgaactgagcgccgaacagatcgccgaagccgactgggtcctgctggtcggcgtcgagccgctggcggcggcgcgtttcgtcggcaagccggtgtatcgcgcgcgtcccgccgaggcgctggccgatccgcgcgccttcctccagcgggccgccgccctggcgagcgtggaggtcgccggggacgaggccggcctggttgcgccggaggccggagcggcaccgcggattgtcgcggtgaccgcctgtccgaccggcgtggcgcacaccttcatggccgccgaggcgttgcagctcgcggcggggcaactgggcttcgcgttgcaggtcgagacccagggctcggtcggcgcgcgcaacccgctcgacccggcggacatcgccgccgccgacgtggtcctgctggccgccgacatcgacgtggacacggcccgtttcgccggcaagaagatctaccgttgcggcaccggcgtggccctcaagcaggcccgcgcgacgctcgagcgggcgctggcggaagggcaggtcgagagcgcgggcgcagccagcgcggtggtcgccagggacgagaagcgcggggtgtacaagcacctgctgaccggggtgtcgttcatgttgccgatggtggtcgcgggcggcctgctgatcgccctgtcgctggccttcggcatcgatgcctacaagcagccgggcagcctggcggcggtgctgaggacggtcggcgacacggctttcgtcctgatggtgccgatgctcgccggctacatcgcctattccatcgccgaccgcccgggcctggcgccgggcatgctcggcggcctgctcgccgggaccctcggcgccgggttcatcggcgggatagtcgccggcttcatcgccggctatgcggcgcgggccatcagccacgggctgaggctgccggcgagcctggaagcgctgaagccgatcctggtcatcccgttgctggccagcctggtcaccggcctgctgatgctctacgtggtcggcaagccggtggccgggatgctcgcggcactgaccgggttcctcgacggcatgggtacctccaatgccatcctcctcggcctgctgctcggcgggatgatgtgcgtcgacctcggcggaccggtcaacaaggccgcctacgccttttccgtcggcctgctctcgtcgcacagctacgcgccgatggcagcggtgatggcggcgggcatggtgccgccgatcggcatgggcctggcgaccctgctggcgcggcgcaagttcgccgagagcgagcggcaggccggcaaggcagcctcggtgctggggctgtgcttcatctccgaaggcgccatcccgttcgccgccaaggacccgttgcgggtgatcccggcgagcatcgccggcggcgcgctgaccggcgccctgtcgatgtatttcggctgcaagttgcaggcgcctcacggcgggttgttcgtgatgctggtgcccaacgcgatcaaccacgccctggcgtacctgctggcgatcgtcgccggcagcctgcttaccgggctgctctacgccgtgctcaagcgcggcgccgagccgggactggcgttggggacctcgtcctcgcgggagccggcggctggcggatag

SEQ ID NO: 7826 - DNA, 945 bp, Pseudomonas aeruginosa
  CDS (1)...(945)
atggcgcggatcctgacgattaccctgaacccggcgctggacctcaccgtgcgcctgcgccagctggaactgggggcggttaaccgcagcgaggcggtgctgacccaggccgccggcaagggtctgaacgtcgcccaggtgcttgccgatctcggccatcggttgacggtcagcggcttcctcggcgaagacaaccagccgccgttcaccgccatgttccagcgtcgtggcttcgccgatgcgttcgtccgggtgccgggcgaaacccgcagcaacatcaagctggccgagcgcggcgggcgcgtcagcgacctcaacgggccgggcccggaggccgacgagcgagcccaggcggcgttgctcgaacgcctcgaccggcttgccggggagcacgagctggcggtggtcgccggcagcctgccgcgcggggtcgagccggaatggctgggcgaactgctgcggcgcttgcggcgcctcggcctgaaggtcgccttcgacagcagcggcgcggccctgcgcgaaggtgtgaaggctgcgccgtggatgatcaagccgaacgtcgaggaactggccgatctctgctcggcgccgatggatgacctggtcgcacagcgccaggcggccgaacgtctgcgccatgacggggtaggccaggtggtgatttcccagggcgccgcgggggtcaactggttcgccgccgagggtgcctggcaggcgcggccgccggcggtggaagtggccagcacggtgggcgccggcgattccctgctggccggcatgctgcacgggctggccagcggctggccggccgagcgggtgctgcgtcaggccaccgccatcgccagcctggcggtgacccagttcgagttcggcatcggcgatccgcagcgcctggcgcggatcgaagcgggcgtcgtggtacagccattggtcgaggaggcctga

SEQ ID NO: 7827 - DNA, 2871 bp, Pseudomonas aeruginosa
  CDS (1)...(2871)
atgctcgaactcgatacccggcagatccgcatgggccagcgcgccgcggacaaggccgaagccctgcgcctgctcggcgcggcgctggtcgccgacggcctggccgcgcccggctatgccgagggcctgaaggcgcgcgaggcacaaggctccacctacctcggccagggcatcgccataccccatgggaccccggatacccgcgagctggtcttcagcaccggtgtgcgcctgctgcaattccccgagggagtggactggggcgatggccagcaggtctacctggccatcggcatcgcggcgaagtccgacgaacacctgcagctcctgcaattgctcacccgcgccctcggcgaggccgacctgggaccggcgctgagcgcggccgccagcgccgaggaagtcctcggcctgttgcagggcgcgccgcaggaactggcgctggacgcacaactggtcggcctcggccagaacgccgaggacctcgacgaactggcctggctcggcgcgcgcctgttgaagaaggccggctgcgtggagaacggcttcgccgccgtgctccagcagaccgaaccgttgccgctgggcgacgggctgtgctggttgcacagcgaacaattggtgaagcgccccgggctggccttcgtcactccggcgcaaccgttgcagcaccaggggcaactggtcaccgggctgttctgcctggccagcctgggcgaagcgcaccaggcgctgctcgaacgcctgtgcgacctgttgctggaagggcgtggcgccgagctggtgcgcgccaccagcagccgcagcgtactcgcggcgctcggtggcgagctgccgccggactggcccagcgcgcgagcggtcctggccaacccgcatggcctgcatgcccgcccggcgcaggcgctggcgcagctggccaagggtttcgccggcgagatccgggtacgcctggccgacagtgaggcggcccccgtctcggcgaagagcctgagcaagctgctcgccctcggcgcgcgacgcggccagacgctggagttcagcgccgagccggcgatcgccgaggacgcgctgccagccttgctggccgcggtgcgcgaggggctcggcgaggaggtcgaagcgctggcggaggaggccttgcccgatgccgtcggcgaggcggaagaggatgcccggccggcgccgctgcgcgccggcgagcgcctgcaggcaatcgccgcgtcgccgggcatcgccagtggtccggcgcatgtccaggtggcgcagcgcttcgagttccagccgcgcggcgagtcaccggcccatgaacgcgagcgcctgctgcgggccaagcgggcggtggacgaggagatcgtcggcctggtcgaacgcagcacggtgaaggcgatccgcgagattttcgtcacccaccgggagatgctcgacgatccggaactggccgagcaggtgcaactgcgcctgaatcgcggcgaaagcgccgaagcggcctggagtcgggtggtggaagacagcgcggcgcaacaggaggcgctgcacgacgcgctgctcgccgagcgcgccgccgacctccgcgacctcggccggcgggtgctggccaggctctgcggggtggaggcgccgcgcgagccggagcagccgtacatcctggtgatggacgaggtcggcccctccgatgtcgcccgcctcgacgcccagcgggtcgccggcatcctcacggcgcgcggcggcgccacttcgcacagcgcgatcatcgcccgcgccctcggcattccggcattggtcggcgccggcgcggcggtgctcggcctggagcctggcacggcactgctgctggatggcgagcacggctggctgcaggtggcgccgagcaccgaacagttgcagcaggccgccgccgagcgcgacgcccgccagcagcgccaggcccgcgccgacgcgcagcggctggagcctgcgcggacccgcgatggccacgcggtggaagtctgcgccaaccttggcgacaccgccggcgccgcgcgcgcggtggagctgggcgccgagggcgttggcctgctgcgcaccgagttcgtcttcatgaacaacgcccgcgcgccggacctggcgacccaggaagcggaataccgtcgggtgctcgacgccctcgacggacgtccgctggtggcgcggaccctggatgtcggcggggacaagccgctgccgtactggccgattccccacgaagagaatccctatctgggcctgcgcggtatccgcttgaccctgcagcgaccgcagatcctcgagacccagttgcgcgcgctgttccgcgccgccggggagcggccgctgcgggtgatgttcccgatggtcggcagcctcgacgaatggcgccaggcgcgtgacctggcgctgcgcctgcgcgaggaaatcccgctggccgacctgcaactggggatcatggtcgaggtgccctcggcggcgttgctcgcgccggtgctggcccgcgaggtggacttcttcagcgtcggcaccaacgacctgacccagtacaccctggctatcgatcgcggccacccgagtctttcggcccaggccgacggtctgcatccggcggtgctgcaactgatcgacatgaccgtccgcgccgcccacgccgagggcaagtgggtcggcgtctgcggcgaactggcggccgacccgctggcgttgccgctgctggtcggcctgggagtggacgagctgagcgtctcggcgcgcagcatcgccctggtcaaggccggcgtgcgcgaactgcagctggtcgctgcgcgcggcctggcccgcaaagccctgggcctggcgagcgccgccgaggtccgggccctggtggaagcggaggtgcagtaa

SEQ ID NO: 7828 - DNA, 1014 bp, Pseudomonas aeruginosa
  CDS (1)...(1014)
atgaaagctgtcggttactaccaatccctgcccatcgaccatcccgacgccctgctcgacctcgaactgcccgagcccacgccgggcccgcgcgacctgctggtggaggtccgcgccatctcggtcaacccggtggataccaaggtccgccagcgcgcccagccggaagccggccaggccaaggtgctgggctgggacgcggcgggcgtggtgcgcgcggtcggcagcgaggtcagcctgttccgtcctggcgatcgggtctggtacgccggggacatcacccgccccggtagcaacagcgagctgcatcgggtcgacgagcgcattgccgggcacctgccgaaaagcctcgacttcgcccaggccgcggccctgccgctgaccaccatcactgcctgggaactgctcttcgagcgcttgcagatcgccgaaggcaaggccgaccagggccagagcctgctggtggtcggtgccgccggcggggtcggttcgatcctggtccaactggcccggcaactgaccggcctgaacgtgatcggcaccgcttcgcgcgcagagacccaggcctgggtccgcgacctcggcgcgcaccatgtgatcgaccacggcaagccgctggccgaagagctgaagcggatcggtgtcgccgaggtcagccacgtcgccagcctgacccacaccgaccagcacctcgaacagatcgtcgccgcgctgcgcccgcaaggccgcctggcgctgatcgacgacccggcgtcgctggacatcggcaagctgaagcagaagagcctgtcgctgcactgggagttcatgtacacccgctcgatgttccagaccgacgacatgatcgagcagcaccggctgctggagcgggtcgccgggctgatcgacgaaggcgtgttgaagaccaccgtcggcgagcatttcggccgcatcgacgcggccaacctgcgccgcgcccacgcgctgctggagagcggccgggccaagggcaagatcgttctcgaagggttctga

SEQ ID NO: 7829 - DNA, 1518 bp, Pseudomonas aeruginosa
  CDS (1)...(1518)
atgaccgacaagcacaacaagaaatacgtcgtcgccctggaccagggcaccaccagctcccgcgccatcgtcttcgaccgcgatgccaacgtggtcagccaggcccagcgcgagttcgcccagttctatccgcaggccggctgggtcgagcacgacccgatggaaatctgggccacgcagagttcgaccctggtcgaggccctcgcccaggccagcatcgagcacgaccaggtggccgccatcggtatcaccaaccagcgcgagaccacggtggtctgggaccgtcacagcggtcggccgatccacaacgccatcgtctggcagtgccggcgcagcgcggcgatctgcgcgcagctcaagcgcgacgggctggaagactacatccgcgaaaccaccgggctggtcaccgatccgtacttctccgggaccaagctgaagtggatcctcgacaacgtcgaaggcgcccgcgaacgcgcgcgcaacggcgacctgttgttcggcaccatcgacacctggctgatctggaagctcaccgaaggcaaggtccacgtcaccgactacaccaatgcctcgcggaccatgctgttcaatatccacagccgcgactgggacgcacggatgctcgaggtgctcgacattccccgctcgatgctacccgaggtgcgcaactcttcggaggtctacggcaacgcccggatcggcggggtcggcggcggcgagctgccgatcgccgggatcgccggcgaccagcaggccgccctattcggccagatgtgcgtggaaccgggccaggcgaagaacacctacggcaccggctgcttcctgctgatgcacaccggcgacaaggcggtgaagtccacccatggcctgctcaccaccatcgcctgcggtccgcgcggcgaggtcggctacgccctggagggcgcggtgttcaacggcggctccacggtgcagtggttgcgcgacgaactgaaggtgatcaacgactccttcgattccgaatacttcgccaccaaggtcaaggacagcaacggcgtctacctggtaccggccttcaccggactcggcgcgccctattgggacccctatgcgcgcggcgcggtgttcggcctgacccgtggagtcaaggccgaccacctgatccgcgctaccctggaatccatcgcctaccagacccgcgacgtgctcgacgccatgcagcgcgatgccggcgaacgcctgcgcgccctgcgcgtcgacggcggggcggtggccaacaacttcctcatgcagttccaggccgacatcctcggcacccgcgtggaacgtccggtgatgcgcgagaccaccgccctcggcgccgcctacctggccggcctggcttgcggcttctggagcagcctcgacgagctgaagagcaaggcggtgatcgagcgggtgttcgagccggagtgcgacgagccccggcgcgaaaagctctatgccggctggaagaaagcagtggagcgcactcgcggctgggacgacggcgaactgtga

SEQ ID NO: 7830 - DNA, 264 bp, Pseudomonas aeruginosa
  CDS (1)...(264)
atgaaacccggcatccatcccgaataccgtcccgtcctgttccatgacacctcggccgacgtgtacttcctgatcggctccaccgcggagaccgacaagacccatacccataccgacggcaagacctatccctacgtgacgctggacgtttccagcgcctcgcacccggtctacaccggcgaacagcgcaagaccaagagcgaaggccgcgtggccgggttcaacaagcgtttcgccggcttcgtcggcggcaagggggcctga

SEQ ID NO: 7831 - DNA, 1611 bp, Pseudomonas aeruginosa
  CDS (1)...(1611)
atgaatctgtcgctactcagtcgctatgcgtttttcgcctgtatcgccctgttcaccttgctcagcctgccgttcctcggcagcaccgaatggctctggccattcaccctcctgggcgtggccctgagcctgctcggcctgttcgacctgatccagacgccacacgcggtgcgccgcaactatccgatcctgggcaacatccgctatctggtggaaggcatccgcccggagatccgccagtacctgctggaagccgacggcgacgccctgcccttctcccgcgcccagcgctcgctggtctactcgcgggcgaagaacgaaagctcggagaagcccttcggcaccctgatcgacgtgtacaccgccggctacgaattcatcagccactcgatgcgtccggcgccactcagcgatccctgcgagttccgcgtcgacatcggcgggccacaatgcagcaagccgtactccgcttcgctgttcaacgtctcggcgatgagtttcggcgccctcagcgccaacgccattcgctcgctgaaccgtggcgcgcagatgggcaacttctaccacgacaccggcgagggcagcatcagtccctatcaccgcgagaacggcggcgacctggtctgggaactgggcagcggctacttcgggtgccgcacccgcgatggcaagttcgaccctgagcgcttcgccgcccaggccctcgacccgcaggtgaagatgatcgagatcaagctcagccagggcgccaagccgggacacggcggtatcctgcccaagcacaaggtcacccccgagatcgccgccacccgtggcgtgccgatgggtgaggattgcgtttcgccgtcgcgccacagcgccttctccacgccgatcgagctgatgcagttcatcgcccagctgcgcgaactgtccggcggcaagccggtcggcttcaagttctgcctgggccatccatgggagttcatgggcatcgccaaggccatgctggagaccggcatcctccccgacttcatcgtcgtcgacggcaaggaaggcggcaccggcgcggcgccgctggagttcaccgaccatatcggcgtgccgctgcgcgaaggcctgctgttcgtccacaacaccctggtcggcctcaacctgcgcgacaagatcaaggtcggcgccagcggcaagatcgtcagcgccttcgatatcgccagcgtcctggccaccggcgcggattgggccaactcggcgcgcggcttcatgttcgccatcggctgcatccagtcgcagagctgccataccaacaagtgcccgaccggcgtcgccacccaggacccgctgcgccagcgcgcgctggtggtgccggacaaggccgagcgggtgcgcaacttccatcgcaacaccctcaagggcctggccgagatgctcgccgcggcgggcctggaacatccctcgcagctcgaagccaagcacctggtgcgacgcatcaccgacaccgagatccgcctgttctcgcagctgcactacttcctcaagccgggcgaactgctttccggcaagatcgagggcgagttctacgagcgcatgtggaacatggcgcgggccgacagcttcgacgcggcggcctga

SEQ ID NO: 7832 - DNA, 2568 bp, Pseudomonas aeruginosa
  CDS (1)...(2568)
atgaccgacctctcccagcacacgccgatgatgcagcagtacttcaaactgaagcatcagcaccccgaccaattgatgttctatcgcatgggcgacttctacgagctgttctacgaggacgcgaagaaggccgccaaactgctcgacatcaccctgaccgcacgcggccagtccggcggcaaggcgatcccgatggcaggcattcccttccattcggcggagggctacctggccaagctggtcaagctcggcgagtcggtggcgatctgcgagcagatcggcgacccggccaccagcaaggggccggtggagcgccaggtggtgcggatcatcacccccggcacggtgagcgacgaggcgctgctcgacgaacgccgcgacaacctgctggcggcgatcctcggcgacgagcgcctgttcggcctcgccgtgctggacatcaccagcggccgcttcagcgtccaggagataaaaggctgggaaaccctgctggccgaactggagcgcctcaacccggccgagctgctgattccagacgactggccacagggcctgccggcggagaagcgccgcggcgtacgtcgccgcgcgccatgggacttcgatcgcgactcggcgcacaagagcctctgccagcaattcggcacccaggacctgaaaggcttcggctgccagaacctgaccctggccatcggcgccgccggctgcctgctcgcctacgccaaggaaacccagcgtaccgccctgccgcacctgcgcagcctgcgccacgaccgcctcgatgacacggtgatcctcgacggtgccagccgccgcaacctggagctggatatcaacctcagcggtggccgcgagaacaccctgcaatcggtggtcgaccgctgccagaccgccatggccagccgcctgatgagccgctggctgaaccgtccgttgcgtgaccgcgcggtactggaagcccgccaggagtccatcgcctgcctgctggaacgctaccgcttcgagaacctgcaaccgcagctcaaggaaatcggcgacctcgaacgcatcctcgcccgcatcggcctgcgcaacgcccgccctcgcgacctggcgcgcctgcgcgacgcgctggcggcgctgccggacctgcagaacgccatgaccgaactggaagcgccgcacctgcaggcgctggccaccaccatcggcacctatcccgaactcgccgaactgctggccaaggcgatcatcgacaacccgccagcggtgatccgcgacggtggcgtgatcaagaccggctatgacgccgagctggacgagctgcaggcgctgagcgaaaacgccgggcaattcctgatggacctggaagcgcgcgagaaggcccgcaccggcctgcccaacctgaaggtcggctacaaccgcatccatggctacttcatcgagctgccacgggtgcaggccgaacaggcgccggccgactacatccgccggcagaccctgaaaggcgccgagcgcttcatcacgccggaactgaaggccttcgaggacaaggcgctgtcggcccagagccgcgccctggcccgcgagaaggcgctctacgaagagctgctggaacgcctgatcggccacctcgctccgctccaggacagcgcctcggcgctggcggaactggacgtgctggcgaatctcgccgaacgcgcgctgaacctcgacctgaatcgcccgcggttcgtcgaacacacctgcctgcacatcgagcagggccgccatccggtggtcgagcaggtgctggagacaccgttcgtggccaacgacctggcgctggatgccgacacccggatgctggtgatcaccggtccgaacatgggcggtaaatccacctacatgcggcaaaccgcgctgatcgtgctgcttgcgcacatcggcagcttcgttccggctgcacgctgcgagctgtccctggtggaccgcatcttcacccgcatcggctcgtccgacgaccttgccggcggccgctcgaccttcatggtggagatgagcgaaaccgccaacatcctgcacaacgccaccgacaagagcctggtgctgatggatgaggtcggccgcggcaccagcaccttcgacggcctgtcgctggcctgggcagcggccgaggacctggcccggactcgcgccttcaccctgttcgccacccactatttcgaactgaccgtactgccggaaagccagcccgcggtagccaacgtgcacctgaacgcgaccgagcacaatgaacgcatcgtgttcctgcaccatgtactgccgggaccggcgagccagagctacggcctcgcggtggcccagttggccggcgtgccggccccggtaatccagcgcgcccgcgaacacctcaagcgcctggaaaccaccagcctgccgcacgagatgccgagccagcagagcggcaagcccgcctcgccgatgcagagcgacctgttcgccagcctgccgcacccggtgatcgatgaattgtcgaggatcaatcccgacgatatcagcccgcggcaagctctcgatctgttatatgcatggaagatgcgggtctga

SEQ ID NO: 7833 - DNA, 705 bp, Pseudomonas aeruginosa
  CDS (1)...(705)
atgacgacttccgaccttcccgccttctggacggtgatccccgccgccggcgtgggttcgcgcatgcgcgccgaccgcccgaagcaatatctcgatcttgccggtcgcaccgtgatcgagcgtaccctcgattgtttcctcgaacacccgatgctcaggggcctggtggtctgcctggccgaggacgatccctactggcccgggctggactgcgccgccagccggcatgtgcagcgcgccgccgggggcgccgagcgcgccggctcggtgttgaacggcttgctgcgcctgctggagttgggggcacaggccgacgactgggtgctggtgcatgacgccgcgcggccgaacctgacccgcggcgacctcgaccgcctgctcgaagaactcgccgaagatccggtcggcgggctgctggcggtgccggcgagggacactctcaagcgctccgaccgcgacggccgggtcagcgaaaccatcgaccgctcggtggtctggctggcctatacgccgcagatgttccgcctcggcgccctgcaccgggcgctggccgatgcgttggtggccggcgtggcgatcaccgacgaggcttcggcgatggagtgggccggctatgcgccgaagctggtggaagggcgcgccgacaacctgaagatcaccaccccggaagacctgctgcgcctgcagcgcagttttccgcactga

SEQ ID NO: 7834 - DNA, 1290 bp, Pseudomonas aeruginosa
  CDS (1)...(1290)
atggcaaagatcgtcgacatcaagggccgtgaggtcctggactcccgcggcaaccctaccgttgaagcggacgtgatcctggacaacggcatcgtcggcagcgcctgcgcgccttccggtgcttccaccggttcccgcgaggccctcgagctgcgcgatggcgacaagagccgttacctgggcaagggcgtgctgaaagccgtggccaacatcaacggcccgatccgcgacctgctgctgggcaaggacgcggccgaccagaaagccctcgaccacgcgatgatcgagctggacggcaccgagaacaaggccaagctgggcgccaacgcgatcctcgcggtgtccctggctgccgccaaggccgccgcacaggccaagggcgtaccgctgtacgcgcacatcgccgacctcaacggcactcccggccagtactccatgccggtgccgatgatgaacatcatcaacggcggcgagcatgcggacaacaacgtcgatatccaggaattcatggtccagccggtcggcgcgaagaacttcgccgaggcgctgcgcatgggcgccgagatcttccatcacctcaaggccgtgctgaaggcccgtggcctgaacaccgccgtcggtgacgaaggcggcttcgcgccgaacctgtcgtccaacgaagacgccctggccgccatcgccgaggccgtcgagaaggccggctacaagctgggcgacgacgtgaccctggccctggactgcgcctccagcgagttcttcaaggacggcaagtacgacctggaaggcgaaggcaaggtattcgacgccgccggtttcgccgactacctggccggcctgacccagcgctacccgatcatctccatcgaggacggcatggacgagtccgactgggccggctggaaaggcctgaccgacaagatcggcgccaaggtccaactggtcggcgacgacctgttcgtgaccaacaccaagatcctcaaggaaggcatcgagaagggcatcggcaattcgatcctgatcaagttcaaccagatcggttcgctcaccgagaccctggaggccatccagatggccaaggccgccggctataccgcggtgatctcgcaccgctccggcgaaaccgaggactcgaccatcgccgacctggccgtgggtaccgccgccggtcagatcaagaccggttcgctgtgccgctccgaccgcgtgtccaagtacaaccagttgctgcgcatcgaagagcaactgggcgccaaggcgccgtaccgtggtcgcgcggaattccgcggctga

SEQ ID NO: 7835 - DNA, 1629 bp, Pseudomonas aeruginosa
  CDS (1)...(1629)
atgacgcgctacatcttcgtcacgggtggtgttgtttcttcattggggaaaggcatcgcttcggcttctctggctgcgatcttggaagcgcgtggcctgaagatcacgatgctcaagctggacccttacatcaacgtggacccgggcaccatgagcccgttccagcacggtgaggtcttcgtgacccaggacggcgccgagaccgacctggacctgggccattacgagcgcttcgttcgtaccaccatgacccagaacaacaacttcaccaccggccgcgtctacatggacgtgttgcgcaaggaacgccgcggcgactacctgggcgccaccgtgcaggtgatcccgcacatcaccgacgagatcaagcggcgcatcatcaagggcgccggcgatgccgacgtcgccctggtggagatcggtggcaccgtcggcgacatcgagtcgcagccgttcctcgaggcgatccgccaactgcgcgtcgagatcggcgccaagcgcgcgatgctgatgcacctgaccctggtcccgtacatcgccaccgccggcgagaccaagaccaagccgacccagcactcggtcaaggagctgcgctccatcggcctgcaaccggacgtgctggtctgccgttccgaccacccgatcgacgtctcctcgcggcgcaagatcgcgctcttcaccaacgtcgaggagcgcgcggtgatcgccctggaagacgtcgacaccatctaccgcatcccgtcggtgctgcatgcccagggcctagacgacatcgtcgtcgagcgcttcggcctggagtgcgggcaggccgacctgtccgaatgggaccgggtggtcgatgccaagctcaaccccgagcgtgaagtcaccatcgccatggtcggcaagtacatggaactgctggacgcgtacaagtcgctgatcgaggcgatgacccacgccggcatccagagccgcaccaaggtcaacctgcgctacatcgactccgaagacatcgagcagcagggcaccagcctgctggaaggcgtcgacgccatcctggtcccgggcggcttcggcctgcgcggcgtggaaggcaagatcagcaccgtgcagtacgcccgcgagaacaagattccctacctgggcatctgcctgggcatgcaggtcgcggtcatcgaatacgcccgcaacgtgctcggctggagcgacgccaactccaccgagttcgacaagtccagcggccatccggtggtcggcctgatcaccgaatggcaggacgcgaccggcgccaccgagatccgcaccgaagcttccgacctgggcggcaccatgcgcctgggcgcccaggagtgccagctgcagaccggcaccttggtgcacgactgctatgccaaggacgtgatcgtcgagcgccatcgccatcgctacgaagtgaacaacaacctgctgccgcaactggaacaggccggcctgaagatttccggccgctccggcgacggcgccctggtggaagtggtcgaggccccggagcatccgtggttcgtcgcctgccagttccacccggagttcacctccacaccgcgtgatggccacccgctgttcagcggtttcgtcaacgccgcgctgaaatattccgggaaggcctga

SEQ ID NO: 7836 - DNA, 951 bp, Pseudomonas aeruginosa
  CDS (1)...(951)
atgaacccgaactttcttgatttcgaacagccgatcgccgacctgcaagccaagatcgaagagctgcgcctggtgggcaacgacaatgcgctgaacatcagcgacgaaatctcgcgtctgcaggacaagagcaaggcgctcaccgaaaacatcttcggcaatctgtccagttggcagatcgcccagctcgcgcgccatcccaagcgtccctataccctcgactacatcggctacctgttcagcgatttcgaggaactgcacggcgaccggcatttcgccgacgacccggcgatcgtcggcggcgttgcccgcctcgacggttccccggtgatggtcatcggccaccagaagggccgcgaagtccgtgagaaggtccggcgcaacttcggcatgccgcgtccggaaggctatcgcaaggcctgccgcctgatggaaatggccgaacgcttcaagatgccgatcctcaccttcatcgacacgcccggcgcctacccggggatcgatgccgaggaacgcggccagagcgaggcgatcgcctggaacctgcgggtgatggcgcgactgaagacgccgatcatcgccaccgtgatcggcgagggcggttccggcggcgcgctggccatcggtgtctgcgaccagttgaacatgctgcaatactccacctattcggtgatctcgccggaaggctgcgcctccatcctctggaagaccgccgagaaggcgccggaagccgccgaggccatgggcatcaccgccgagcgcctgaaaggcctgggcatcgtcgacaaggtcatcgacgaaccgctgggcggcgcccatcgcgatccggcgagcatggccgaatcgatccgtggcgaactgctggcgcaactgaagatgctccagggcctggaaatgggtgagttgctggagcgtcgttacgaccgcctgatgagctacggcgcgccgtaa

SEQ ID NO: 7837 - DNA, 3522 bp, Pseudomonas aeruginosa
  CDS (1)...(3522)
atgaccgtatccttcgttcacctgcgtctgcataccgaattctccctggtcgacggcctggtccgggtcaagcccctggccaaggcagtggcagggctgggcatgccggcggtggcggtcaccgaccagagcaacatgtgctcgctggtgaagttctacaagaccgccatgggcgccggcatcaagccgatctgcggggccgacatctggctcgccagccgcgaggaagatggcccgctcagtcgcctgagcctgctggcgatgaacgcgaagggttatcgcaacctcaccgagctgatttcccgcggttggagcgaaggccagcgcaacggcgagatcatcatcgaacgcgactgggtcaaggaggcggcggaaggcctgatcgcgctgtccgcggccaaggagggcgagatcggccacgcgctgctcgacggcgaggaagccaaggccgaggcgctgttgcgcgagtggatggaggtgttccccgagcgcttctacgtcgaagtgcaacgtaccagccgggtcaacgacgaggagcacctccacgcggcggtggctttggcgtcacgctgcaacgcgccgctggtggcgaccaacgacgtgcgcttcatcaagcaggaagacttcgaggcccacgagacccgcgtctgcatcggcgagggtcggaccctcgacgatccgcggcggccgcgtacctattcggaccagcaatacctgaagtcgccggcggaaatggccgagctgttcagcgacctgccggaagcgttggaaaacaccgtcgagatcgccaaacgctgcaacatcgaggtgcagctgggcaagtacttcctgccggacttccccacgcccaatggcatgggcatcgacgactacctgcggcacgcctccttcgaaggtctcgaggagcgcctggaggtgctgttgccgaaggacaccccggactacgaggccaagcgccaggtctatgtcgatcgcctgaacttcgaactcgatatcatcatccagatgggtttccccggttacttcctcatcgtgatggacttcatcaagtgggcgaagaacaacggcgtaccggtaggccccgggcggggctcgggcgccggctcgctggtggcctacgtgctgaagatcaccgacctcgatccgctggcctatgacctgctgttcgaacgtttcctcaacccggaacggatctccatgcccgacttcgacgtcgacttctgcatggagggccgcgaccgggtgatcgactacgtggccgacgcctacgggcgcaacgcggtgagccagatcatcaccttcggcaccatggcggcgaaggcggtggtacgcgacgtggcgcgggtccagggcaagtcctacggtctcgccgaccggctgtcgaagatgatcccgttcgaagtcggcatgaccctggataaggcctacgagcaggaagaaatgctccgcgacttcctcaagagcgacgaggaagccgccgagatctgggagatggccctcaagctggaaggcatcacccgcggtaccggcaagcacgccggtggcgtggtgatcgcgccgaccaagctgaccgacttctcgccgatcgcctgcgacgaggaaggcggcggcctggtgacccagttcgacaaggacgacgtggaggcggccggcctggtgaagttcgacttcctcggcctgcggaccctgaccatcatcaagtgggcgatggagatcatcaaccgcgagcaggccaagaagggcctggagccggtgaacatcgacttcatcccgctggacgacaagccgacctattcgctgctgcagaaggccgagaccactgcggtgttccagctcgaatcgcgcggcatgaaggagctgatcaagaagctcaagccggactgcctggaagacctcatcgcactggtggcgctgttccgcccgggtcctctgcagtcgggcatggtggacgacttcatcaaccgcaagcacggtcgcgccgagctgtcctatccgcaccccgattaccagtacgccggcctggagccggtgctcaagcccacctacggcatcatcctgtaccaggaacaggtgatgcagatcgcccaggtcatggccggctataccctcggtggcgcggacatgctgcgccgggcgatgggcaagaagaagcccgaggaaatggccaagcagcgcggcggtttcatcgagggttgcaagaacaacggcatcgatgccgacctcgcgggcaacatcttcgacctggtggaaaaattcgccggctacggcttcaacaagtcgcactcggcagcctacggcctggtctcctaccagaccgcctggctgaagacccacttcccggcgccgttcatggccgcggtactcaccgcggatatgcagaacaccgacaaggtggtgacgctgatcgaagaatgccggcacatgaagctgcgcatcgtggcgccggacgtgaacaactccgagttccgcttcaccgtcgacgacgatggccggatcgtctatggcctgggcgcgatcaagggcgtcggcgaggggccggtggaggcgatcaccgaatgccgcgccgaaggcgggccgttcaacaccctgttcgacttctgcgaccgcgtcgacctgaaacgcatcaacaagcgcaccctggaagcgctgatccgcgccggtgcgctggatcgcctggggccgcactaccacgacgagctaaaggcctaccaggctaccgtcgacctcaaccgcgccgtgctgctggcggcgatggaggaagcgatccaggccgccgagcagaccgcgcgcagccacgacagcgggcacatggacctgttcggcggagtcttcgccgagccggaggcggatgtctacgccaaccaccgcaaggtcaaggagctgaccctcaaggaacgcctgaagggcgagaaggacaccctcggcctgtacctgaccggccatccgatcgacgagtacgaaggcgaggtgcggcgcttcgcccgccagcgcatcgtcgagctgaagccggcgcgcgatacccagacggtggccgggctgatcgtcaacctgcgggtgatgaagaacaagaagggcgacaagatgggcttcgtcaccctcgacgaccgctccggacggatcgaggcctcgctgttctccgaagccttcgccgcggcccagtcgctgctgcagaccgacgcgctggtggtggtcgagggcgaggtcagccaggacgacttctccggcggactgcgcctgcgcgccaagcgcgtgatgagcctggaggaggcgcgtaccggcctggcggagagcctgcggatgaagctgcacgccgacctgttgaagggcgatcgcctgcgctggctgggcgagctgttcaaccgccatcgcggttcctgcccgatcaccctggactacaccagcgccgacgccaaggccctgctgcagttcggcgagagctggcgggtggatccggcggacgatctgatccaggcattgcgtgaccagttcgggcgcgacaacgtcttcctcaattatcgttaa

SEQ ID NO: 7838 - DNA, 1416 bp, Pseudomonas aeruginosa
  CDS (1)...(1416)
atgcaagaattcgccactcaggtcgtcgacctgctcaacggccttatctggggcaagatcctcatctggctgctggtcggttgcggcctgtacttcaccgtgcgcctggggctgatccagttccgccacttcggtcataccttcagcgtgctcaagggcagccgccagtcggacgactcgggaatctcctcgttccaggcgctctgcacctctctggcggcgcgggtcggtaccggcaacgtcgccggcgtggcggtagcgatcacgctcggcggtcccggcgcagtgttctggatgtgggcgatcgccctggtggggatggcgaccggcttcgtcgaggcgaccctggcccagttgttcaagattcgcgacgacaagggccagttccgtggcggcccggcctactacatggagaagggcctgggcgcgcgctggatgggcatcctgttctcgatcttcctgatcatcgccttcggtttcgtcttcaactcggtgcaggccaataccatcaccggtgccatgcagggcgccttcggcgtgccgacctggatcagcggcatcgccgtggtgatcctcaccgcgttgatcatcttcggcggcctgcgttccatcgcgcgcttctccgaactggcggtacccttcatggcggtggcctacctgctgctggcggtgggcatcatcctgttcaacctcagcgaactgccgggcgtcctggcgatggtggtgaagagtgccttcggctggcacgaggccgccgccggcggcatcggcgcggcgatcctcaacggcttcaagcgcggcctgttctccaacgaagcaggcatgggctcggcgcccaacgccgccgcctcggccacgccctatccgccgcacccggcgtcccagggctacgtgcagatggccggcgtgttcatcgataccctgctgatctgtaccgcttccgccgccatcatcctgctggccggaccgcaggaaggcgagggcatcatgctggtgcagaatgccctgaccagccaggtcggcgattggggccgctatttcctggcggtgatcatcctgttcttcgccttcacctcgatcgtcgccaactacttctatgccgagaactgcctggtattcctcgagcacaaccacctggcgggcctgttgatcttccgcctgatcgtgctggcgatggtgatgttcggcgcgctggcttcgctgccgttcgtctggaaccttgccgacgtgtcgatgggcctgatggcgatcaccaacctgatcgccatcctgctgctgtccaacctcgcgatcaagctggccaaggactacaacgcccagcgcaaggccggcaagctgccgaccttcgacgccagccagttcccggaagtccagcagaagctcgagccgggcatctgggacgaccgccgcgcctga

SEQ ID NO: 7839 - DNA, 441 bp, Pseudomonas aeruginosa
  CDS (1)...(441)
atgatggacatcaacgagattcgcgaatacctgcctcatcgctatcctttcctgctggtggatcgggtggtagagctggacatcgagggcaagcgcattcgcgcctacaagaatgtcagtatcaatgagccgttcttcaacggacatttccccgagcacccgatcatgccgggcgtgctgatcatcgaggcgatggcccaggcggccggtatcctcggtttcaagatgctcgacgtgaagcccgccgacggcaccctttactacttcgtcggttcggacaagctgcgcttccgccagccggtcctgccgggcgaccaactgcaactgcacgccaagttcatcagcgtgaagcgcagcatctggaaattcgactgccacgctaccgtcgacgacaagccggtatgctcggctgaaatcatctgtgcggaacgcaaactatga

SEQ ID NO: 7840 - DNA, 756 bp, Pseudomonas aeruginosa
  CDS (1)...(756)
atggaaaagacccggaaggatgtgtgcgtgccacgccacgtggccattatcatggacggtaacaatcgctgggcgaagaagcgtcttctgcccggcgtcgccggccacaaggccggtgtcgatgccgtcagggcggtgatcgaggtctgcgccgaggcaggggtcgaggtcctcaccctgttcgcgttctccagcgagaactggcagcgtccggcggacgaagtcagcgcgctgatggagctgtttctcgtggccctgcgccgcgaggtgcgcaagctcgacgagaacggcatccgcctgcgcatcatcggcgatcgcacgcgtttccatccggagttgcaggcggccatgcgcgaagcggaagccgccactgccggcaatacccgtttcctcctccaggtcgccgccaactacggcggccagtgggacatcgtccaggccgcacagcgcctggcgcgcgaggtccagggcgggcacctggcggcggacgatatctccgccgagctgctccagggctgcctggtgaccggcgaccagccgctgcccgacctgtgcatccgcaccggcggcgagcatcgcatcagcaatttccttctctggcagctggcctacgccgagctgtatttctccgacctgttctggcccgacttcaagcacgcggcgatgcgggctgccctggcggatttctccaagcgccagcgccgcttcggcaagaccagcgagcaagtcgaggccgaggcccgtccgtcatgctga

SEQ ID NO: 7841 - DNA, 558 bp, Pseudomonas aeruginosa
  CDS (1)...(558)
atgatcaacgagatcaagaaggaagcgcaggagcgcatgggcaagaccctggaagcgctgggccatgccttcgcgaagattcgtaccggtcgcgcgcatccgagcatcctggatagcgtgatggtttcctattacggggccgatacgccgctgcgccaggtcgccaacgtcaccgtggaagactcccgtaccctggccctggccgtgttcgacaagagcatgatccaggcggtcgagaaggccatcatgacctccgacctggggctcaacccggccaccgccggcaccaccatccgcgtaccgatgccggccctgaccgaggagacccgcaagggctacaccaagcaggcgcgtgccgaggccgagcaggcgcgggtttccgtgcgcaacatccgtcgcgatgcgctggcccagttgaaggacctgcagaaggaaaaggaaatcagcgaggacgaagagcgccgcgccggcgacgacgtgcagaagctgaccgacaagttcatcggtgagatcgagaaggcactggaagccaaagaagcggacctcatggctgtctga

SEQ ID NO: 7842 - DNA, 870 bp, Pseudomonas aeruginosa
  CDS (1)...(870)
atggcagaaattactgcagccatggttaaagaactgcgcgagcgtaccggcttgggcatgatggagtgcaagaaggcgctgaccgccgctggcggcgacatcgagaaggccatcgacgacatgcgcgctgccggtgcgatcaaggctgccaagaaggccggcaacattgccgccgaaggctcgatcgccgtcaagatcgctgccgacaacaaggccgccgtgatcatcgaagtcaactcccagaccgacttcctggccctccaggacgacttcaagggcttcgtcgccgagagcctggaaaaggccttcaacgagaagctgaccgacgccgctccgctggtcgaagcacgtgaggaagctcgtctggccctggtcgccaagaccggcgagaacgtcaacatccgccgcctgacccgcgtcgagggcgacgtggtcggcgcctacctgcacggccaccgcatcggtgtcgtggtcaacctgaaaggcggcaacccggaactggccaaggacatcgccatgcatgtcgccgccagcaacccgcagttcctgagcgcttcggaagtttccgaagaagcgatcgcgaaagagaaggaaatcttcctggcgctgaacgccgacaagatcgccggcaagccggagaacatcgtcgagaacatggtcaagggccgcatcagcaagttcctcgccgaagcgagcctggtcgagcagcctttcgtgaagaacccggaagtgaaggtcggcgacctggccaagcaggccggtgccgaaatcgtttccttcgttcgttacgaagtgggtgaaggcatcgagaaggccgaagtggacttcgctgccgaagttgccgctcaagtagccgccaccaagcagtaa

SEQ ID NO: 7843 - DNA, 741 bp, Pseudomonas aeruginosa
  CDS (1)...(741)
atgtcccaagtcaacatgcgcgatatgctgaaggccggtgtgcacttcggccaccagacccgttactggaacccgaaaatgggcaagttcattttcggcgcgcgcaacaagatccatatcatcaacctcgaaaagaccctgccgatgttcaacgaggccctgaccttcgttgagcgcctggccgctggcaagaacaagatcctgttcgtcggcaccaagcgttccgccggcaagatcgttcgcgaggaagccgctcgttgcggtatgccgtacgtcgaccatcgctggctgggcggcatgctcaccaactacaagaccatccgtcagtcgatcaagcgcctgcgcgacctggaaacccagtcccaggacggcaccttcgacaagctgaccaagaaagaagccctgatgcgcagccgtgacctcgagaagctcgagcgcagcctgggcggcatcaaggacatgggcggcctgccggacgctctgttcgtgatcgacgtcgaccacgagcgcatcgccatcaccgaagccaacaagctgggcatcccggtcatcggcgttgtcgataccaacagcagcccggaaggcgtcgactatgtaattcccggtaacgatgatgccatccgcgccgtgcaactctacctgaactcgatggccgaagcggtaatccgcggcaagcagggcgctgccaccagcgccgacgagttcgtcgaggaagcgccggccgaatccgccgaaggctga

SEQ ID NO: 7844 - DNA, 648 bp, Pseudomonas aeruginosa
  CDS (1)...(648)
atgcgtgtgattctgctcggggcacccggtgccggcaaaggcacccaggcacggttcatcaccgagaagttcggcattccgcagatctccaccggcgacatgctgcgcgccgcagtcaaggccggcagcccgctcggccagcaggtgaaaggcgtgatggacagcggcggcctggtatccgacgacatcatcatcgccctgatcaaggaacgcatcaccgaggccgattgcgccaagggcttcctgttcgacggcttcccgcggaccatcccgcaggccgaagcgctgaaggacgccggcgtgaccatcgaccatgtggtcgagatcgccgtcgacgacgaggagatcgtgtcgcgtatcgccggtcgtcgcgtgcatccggcctccggccgcgtgtaccacaccgagcacaacccgccgaaggtcgccggcaaggacgacgttaccggcgaagagctgatccagcgcgaggacgacaaggaagagaccgtgcgtcaccgcctgtcggtctaccattcgcagaccaagccgctggtcgacttctaccagaagctgtcggccgccgaaggcaccccgaaataccacagcatcgccggcgtcggctcggtcgagcagatcaccgcgaaagtgctttcggccctgagctga

SEQ ID NO: 7845 - DNA, 1506 bp, Pseudomonas aeruginosa
  CDS (1)...(1506)
atgagcgaccaacaactcgaccagcacgaactgcaacaggaagaaaacaagctgatcgcccagcgcaaggaaaaacttgccgccgtgcgcgaagcccgggccatcgccttccccaacgacttccgccgcgacgcctacttcgcggacctgcagaaacagtacgccgacaagaccaaggaagagctggaagccgcagcgatcccggtcaaggtggccggtcggatcatgctcaaccgcggttccttcatcgtcctccaggacagcagcgagcgcctgcaggtctacgtcaaccgcaagaccctgccggaagaaaccctggccgagatcaagacctgggacctgggcgacatcatcggcgccgaaggcgtgctggcccgctcgggcaagggcgacctgtacgtcgacatgaccagcgtgcgcctgctgaccaagtcgctgcgtccgctgccggacaagcaccatggcctgaccgacaccgagcagcgctaccgccagcgctacgtcgacctgatggtcaacgaggaaacccgccacaccttccgcgtgcgttcccaggtcatcgcccacatccgccgtttcctcagcgagcgcggtttcctcgaagtggagaccccgatgctgcagaccatccccggcggcgccgcggccaagccgttcgagacccatcacaacgcgctggacatggccatgttcctgcgcatcgccccggagctgtacctcaagcgcctggtggtcggcggtttcgagaaggtcttcgagatcaaccgcaacttccgtaacgaaggcgtctcgacccggcacaaccccgagttcaccatgctcgagttctaccaggcctacgccgactacgaagacaacatggacctgaccgaggaactgttccgcgaactggcccagtcggtactcggtaccaccgacgtgccctacggcgacaaggtcttccacttcggcgagccgttcgtgcgcctgtcggtgttcgattcgatcctcaagtacaacccggagatcaccgccgccgacctcaacgacgtcgagaaggcgcgggccatcgccaagaaggccggcgccaaggtcctcggccacgaaggcctgggcaagctgcaggtgatgattttcgaggaactggtggagcacaagctggagcagccgcacttcatcacccgctaccccttcgaggtttcgccgctggcccgccgcaacgacgaagacccgagcgtcaccgaccgcttcgagctgttcatcggcggccgcgagatcgccaatgcctattccgagctgaacgacgccgaggaccaggccgagcgcttcatgttgcaggtcaaggagaaggacgccggcgacgacgaggcgatgcactacgacgccgacttcatcaatgccctggaatacggcatgccgccgaccgccggcgaaggcatcggcatcgaccgcctggtgatgctgctgaccaactcgccgtcgatccgcgacgtgatcctgttcccgcacatgcgcccgcaggcctga

SEQ ID NO: 7846 - DNA, 897 bp, Pseudomonas aeruginosa
  CDS (1)...(897)
atgagtaccctcgaacatcccctgatcgaccgtttcctcgatgccctgtggctggaaaaaggccttgccgacaacacccgcgaggcttatcgcaacgacctccagcagttcaacgcctggctcgatggccgcgggctgcgcctggagggcatcggccgcgacgccatcctcgatcacctggcctggcgcctggaacagggctacaaggcccgctcgaccgcgcgcttcctctccggcctgcgtggcttctatcgctattgcctgcgcgacggcctgatcgccgaggatcccaccttgcaggtggacctgccgcaactgggcaagccgttgccgaaatccctctccgaagcggacgtcgaggcattgctggcggcgccggaagtcgacgacccgctgggcctgcgcgatcgcaccatgctcgaagtgctgtatgcctgcggcctgcgggtcagcgaactggtcggcctgaccctggagcaggtcaacctgcgccagggcgtggtcaaggtgttcggcaagggcagcaaggagcgcctggtgccgctcggcgaggaagccatcggctggctcgaacgctacctgcgcgaggcccgcggcgacctgctcggcgggcggcccagcgacgtgctgttccccagcctgcgcggcgaacagatgacccgccagaccttctggcatcgcatcaagcatcacgcgcaggtggcggcgatcggcacgtcgatttcgccgcacaccctgcgccacgccttcgccacccacctgctcaaccatggcgccgacctgcgggtggtgcagatgctgctcggccacagcgacctgtcgaccacccagatctatacccatatcgcccgggcccgcctccaggatctgcacgcacgccaccacccgcgaggctga

SEQ ID NO: 7847 - DNA, 351 bp, Pseudomonas aeruginosa
  CDS (1)...(351)
atgaccaacaagatcattcagcagatcgaagctgaacagatgaacaaagagatcccggcgttcgcccccggcgataccgtgatcgtccaggtcaaggtgaaggaaggagaccgtcagcgtctgcaggccttcgaaggcgtcgttatcgccaagcgcaaccgtggcctgaacagcgccttcaccgtgcgcaagatctccaacggcgtgggcgtggaacgtaccttccagacctacagcccgatcgtcgacagcctgagcgtcaagcgtcgcggcgacgtgcgcaaggccaagctgtactacctccgcgccctgtccggcaaggccgcgcgcatcaaggaaaaactggtctaa

SEQ ID NO: 7848 - DNA, 759 bp, Pseudomonas aeruginosa
  CDS (1)...(759)
atggacaagcgtttgtgggtgggcgtcgtcagcatctttccggagatgttccgcgcgatcagtgactatggcatcaccagccgtgcggtaaagcaggggttgctcacgctgacctgctggaatccacgggactacaccgaggaccgccaccagacggtggacgaccggcccttcggcggtggccctggcatggtgatgaagatcaagcctctggagggcgcgctggcggatgccaggcaagccgccgggggcaggaaggcgaaggtgatctacctttcgccgcaaggccgccagctgacgcaggcgggcgtacgcgaactggccgaagaggaagcgttgatcctcatcgccgggcgctacgaaggcatcgacgagcgcttcatcgaagagcacgtcgatgaagaatggtcgatcggcgattatgtcctgtccggcggtgagttgccggccatggtgctggtcgatgcagtgacgcggttgctgcccggtgcattgggtcatgcagattccgccgaggaggactccttcacggatggcctgctcgactgcccgcactacacccgacccgaggtgtacgcggacaaacgtgttcctgaagtgttgctcagtggcaaccatgaacacatccggcgttggcgtttgcagcaggcccttgggcggacctgggaacgacgcgccgatcttctggatagccgctcgctttctggagaagagcagaagctgctggcggaatatatccgtcagcgggacgatagttaa

SEQ ID NO: 7849 - DNA, 252 bp, Pseudomonas aeruginosa
  CDS (1)...(252)
atggtaaccatccgtcttgctcgtggcggctccaaaaagcgccccttctaccacctgaccgtgaccaacagccgcaatgcgcgcgatggtcgcttcgtcgagcgcatcggtttcttcaacccggttgcgactggtggcgaagtgcgtctgtccgtcgaccaggagcgtgctacctactggctcggccagggtgcacagccgtctgagcgcgttgctcagctgctcaaggacgctgccaaggcaaacgcctaa

SEQ ID NO: 7850 - DNA, 1374 bp, Pseudomonas aeruginosa
  CDS (1)...(1374)
atgttcgaaaaccttacagaccgcctctcgcagacgcttcgccatgtcaccggcaaggccaagctgaccgaggacaacatcaaggacactctgcgcgaagtgcgcatggccctgctcgaggccgacgtggccctgccggtggtcaaggacttcgtcaacaaggtcaaggagcgcgccgtcggtaccgaggtctcgaagagcctgaccccgggacaggcgttcgtgaagatcgtccgcgccgagctcgaggagctgatgggggcggccaacgaggacctggcgctgagcgtcgcgccgccggcggtgatcctgatggccggcctgcagggcgcgggcaagaccaccaccgcgggcaagctggcgcgcttccttaaggaacgcaagaagaagtcggtgatggtggtttccgccgacgtctaccgacccgccgctatcaagcagctggaaaccctggcgggcgaggtcggcgtaaccttcttcccttccgacgtcagccagaagccggtggccatcgccgaggcggcgatccgcgaggcgaggctgaagttcatcgacgtggtgatcgtcgataccgcaggccgcctgcacatcgatgccgacatgatggacgagatcaagcaggtgcacgcggcgatcaagccggcggaaaccctgttcgtggtcgatgccatgaccggccaggatgccgccaacaccgccaaggccttcaatgacgccttgccgctgaccggcgtggtcctgaccaaggtcgacggcgacgcgcgtggtggtgccgcgctctcggtgcgggcgatcaccggcaagccgatcaagttcctcggcatgggcgaaaagagcgaagcgctcgatccgttccatcccgaccgcgtggcctcgcgcatcctcggcatgggcgacgtgctcagcctgatcgaacaggccgagcagaacctcgaccgcgacaaggccgagaagctggcgaagaagatcaagaagggcaagggcttcgacctggaagacttccgcgaccagttgcaacagatgaagaacatgggcggcctcggcgggctcatggacaagctgccgatgctcggcggggtcaacctggcgcagatgggcaatgcccagggtgctgcggagaaacagttcaagcagatggaggcgatcatcaactcgatgacgcccggcgaacggcgcgatccggaaatgatcagcggctcgcgcaagcgccgcatcgcccttggctccggtacccaggtgcaggacgtcggccggctgatcaagcagcacaagcagatgcagaagatgatgaagaaggtcaccgccaagggcggcatggccaagatgatgcgaggcatgggcagtatgttcccggggggcatgcccaagctttga

SEQ ID NO: 7851 - DNA, 1092 bp, Pseudomonas aeruginosa
  CDS (1)...(1092)
atgctcgaaggcaacattctcaccccgcaaggctgggtcctcggccgcctacacatccaggacgggcgtatccagcggatcgaaggcgagccctgcgatccggccggcaacgccgatccgtacctgctgccaggcttcatcgacctgcatgtgcacggcggcggcggccgcgacatcatggaaggcggcgacgccttcgccaccatcgcccgcacccaccggcgcttcggcacgacctcgctgctggccaccaccatgaccgcaccgcgcgaggagatcgccgacatcctcagccagctcggcgcttactgccgccgctcgctggagggcggttcacggatactcggcgtgcacctggaaggcccctacatcaactccggcaagctcggcgcgcagcccaacttcgcccatgccgcggtgctcgaggaagtcgaggactacctgcgccgcgcgccgatccgggtgatcaccatcgcccccgagatcgccggacaccggccgctgatccgcgccctcgccgagcgcggcgtacgcctgcagatcggccataccctgggcagctacgaggacggcgtggccgcactggaagccggcgccagcagcttcacccacctctacaacgcgatgaccggcctgcaccaccgcgaaccgggtatcgtcggcgcggccctggcccacgcacgctacgccgagctgatccccgacctgctgcatgtccatcccggcgccatcagggtggccctgcgttcgatcccgtgcctgtactgcgtgaccgactccaccgccgccgccggcatgcccgacggccagtacaagctcggcagccacacggtgaccaagtgcctgggcggcgtgcgcctgcccgacggcactctggccggcagcaccctgaccatggaccaggcgctgcgcaacctggtgaagatcggcctgcccctggccgaagcctcgcaacgcctttcgcaattccccgccgattacctcggcctcgccgagcgcggccgcctggcgcccgcagcctgggccgatgtggtgcgcctggatcgctccctggaactcgacgccgtgatggtggaaggagaactcgaatga

SEQ ID NO: 7852 - DNA, 2529 bp, Pseudomonas aeruginosa
  CDS (1)...(2529)
atgaacaacaagaatctcgccctcaaagcgcccctgagcggccccgtgatgccgctcaaccgagtacccgacccggtgttttccagcggcaccctgggcgaaggcatcgccatcgacccgctcaacgactgcctgcacgcgccctgcgccgggctggtcagccacttggcgcgaacccgccacgcgctcagcctgcgcgccgacaacggtgccgagctgctgctgcacgtcggcctcgacaccgtacagctgcaaggcgaaggcttcgaggcgctggtcgaggaaggtgcgcgggtgatcgagggccagccgctgctgcgcttcgacctggaccgcgtcgcccgcggcagccgcagtctgatcacggtgatgatcctgaccaacggcgacggcttccaggtacgcccgctgaccaccaacccggtggaggtcggcgcgccgctcctgcaactgagtccggagaaggccgagcaacgtccggccaatcccgcgcctggcgaaggctccgcgcagcgccaggtccgcgggcgggcgcgggtcgcccatcatggcggtctgcacgcacgcccggcagcgctgctacgcaagaccgcgcagggcttttccagccaggccgaactgcacttcgccgggcaggtggccagcgtcgacagcctggtcggcatcatgggcctgggggtcgccgaacaggacgaggtagaggtgatctgtcgcggcgaagacagcgaggcggccctcggcgccctgctcgcggccctcgccagcgccaccgcgggggctccgaaggatgccccgcgcgccatcgccccgggcgagccggcgcgacctgcggctgtcgccggtaccctggccggcgtctgcgcttcgcccggcctggccagcggtcccctggcgcggctcggcgccatcagcctgccggcggatgacggccggcatcgtcccgaggaacagcacctcgccctggaccaggccctgcaacgggtgcgcgacgacgtacaggggagcctgcagcaggccaggctcggcggcgacgagaacgaagcggcgatcttttccgcgcatctcgcgctgctggaagacccgggtctgctggacgccgccgacatgctgatcgaccagggcgtcggcgccgcccacgcctggcaccgggcgatccaggcccagtgcgagattctccaggcgctgggcaacctgctgctggccgagcgcgccaacgacctgcgcgacctggaaaaacgcgtgctgcgggtactgctcggcgacaccgcgccgttgcgggtgcctgctggggccatcgtcgccgcccgggagatcaccccctccgacctcgcgccgctggtggatgccggcgcggctggcctgtgcatggccgaaggcggcgccacctcccacgtggccatcctcgcccgcagcaagggcctgccgtgcctggtggcgctcggcgccgggctgctggagctggaggaaggccggcaggtggtgctggacgccggccagggccggctggaactcagccccgacgctcgacgcctggagcaggtcgccttgcaagtggcgcagcgcgaggaacaacgccgccgccagcaggccgatgcgcagcgcgaggcgctcacccgcgacggccggcgcatcgagatcggcgccaacgtcgcctcgccgcgcgaggccgccgaagccttcgccaacggcgccgacggggtcggcctgctacgcaccgagtttctcttcctcgagcgccgcgccgcgcccgacgaagaggagcagcgcaacgcctaccaggaggtcctggacgccatgggccagcgcaaggtgatcatccgcaccatcgatgtcggcggcgacaagcacctcgactacctgccgctgccggtggaagaaaacccagcactgggcctgcgcggcatccacctcggccaggcgcgcccggagctgctcgaccagcagttgcgcgcgctgctgagggtcgaaccactggaacgctgccggatactgctgccgatggtcagcgaggtcgacgaactgcgcgccatccgtcgccgcctcggcgagctggccacgcagttggggatcgagcgcctgcccgaactcggggtgatgatcgaagtgccctccgccgccctgctcgccgatcaactggccgaacacgccgacttcctctccatcggcaccaacgacctgtcgcagtacgccctggccatggaccgttgccacgccggcctggccgaccgcatcgacgccctgcacccggcgctgctgcggctgatcgcccagacctgcgccggagcagcccgccacggccgctgggtcggcgtctgcggtgcgctggcctcggacccgctggcgacaccggtactggtcggcctcggggtcgaggaattgtccgtcgggccgaacctggtcggcgagatcaagacccgggtgcgccagctcgacgccgctgaatgccgccgccacgcccaggcgctactggacctgggcagcgcccgggcggtgcgcgacgcctgcctgcaacactggccgctggcctga

SEQ ID NO: 7853 - DNA, 1713 bp, Pseudomonas aeruginosa
  CDS (1)...(1713)
atgcccccgttcctgatcgaaagcctgcaacgcctgggccgcgccctgatgctgccgatcgcgatcctgccgatcgccggcctgctgctgcgcctgggcgacgtcgacctgctcgacattccgctggtccacgacgccggcaaggcgatcttcgccaacctggcgctgatcttcgccatcggcatcgccgtcggtttcgctcgcgacaacaatggcaccgccggcctcgccggcgccatcggctacctggtgatgatctcggtgctcaaggtgatcgatccgggcatcgacatgggcgtgctctccggcatcatcagcggcctggtggctggcgccctgtataaccgcttcaaggacgtgaagctgccggaatacctggcgttcttcggcggccgccgcttcgtgccgatcgccaccgggatcagcgcggtctgcctgggcctgctgttcggggtgatctggccaccgctgcaacagggcatcaacggcctcggccaactcatgctggaaagcggcagcttcggcgccttcgccttcggcgtgctgaaccgcctgctgatcgtcaccgggttgcaccacatcctcaacaacctggtgtggttcgtcttcggtagcttcaccgacccggaaaccgggcgcgtcgtcaccggcgacctggcgcgctatttcgccggcgacccgaagggcggccagttcatggccgggatgttcccggtgatgatgttcggcctgcccgccgcctgcctggcgatgtaccgcaacgcccgtccggagcggcgcaagctgatcggcgggctgctcctgtcgatggccttgaccgccttcctcaccggcgtcaccgagccggtggagttcgccttcatgttcctcgcgccgctgctctacctgctgcatgcgctgctcaccggcctgtccatggccctcaccgacctgctcgatatccgcctcggcttcaccttctccggtggcgccatcgacctcgccctgggctggggccgttccacccacggctggatgctctggccgctgggcctgctctatgccggcatctattacctggtgttcgacttctgcatccgccgcttcaacctgaagaccccgggccgcgaagacgacgcgagcagcgaatcgggcgacaacgccgaagccgagcgcgccccggcattcatccgcgccttgggtggcgcagccaacctcgaagtggtggacgcctgcaccacgcgcctgcgtctgcgcctggtcgaccgcaacaaggcctcggacgcccaactcaaggccctcggtgcgatggccgtggtacgtccgggcaaggccggcagcctgcaggtggtggtcggcccacaggccgacagcatcgccgacgagatccgccgcgccctgcccttcgatacgcaaccgggcgaagccgtaccgccgctgggcagtccgcacacagccgaagaggtggtggcgatgcaggccaccgtcgacgccgccgaagcccaggcctggctcggcgccctcggcggcgccggcaacctgcgcgaggtacgggacgtcgcactgacccgcctgcgggtcagcgtggcggacgaacgcaagctggccaccgagcaactgcgtcgtctcggcggacagggcgtcagttccctcgccggcggcatctgccatatcctggtgggcccccgcgccgcggccctgagccaggccctgcaaccgctgctgcggcgctga

SEQ ID NO: 7854 - DNA, 1578 bp, Pseudomonas aeruginosa
  CDS (1)...(1578)
atgtcccaagacattcacgcccaccgtatcctgatcctcgatttcggctcccagtacacccaactgatcgctcgccgcgtgcgcgagatcggcgtgtattgcgaaatccatcccttcgacatgagcaacgaggcgatcatcgccttcgcgccgcgcggcatcatcctcgccggtggccccgagtcggtacacgaagccgacagcccgcgcgcgccgcaggcggtgttcgacctgaaggtgccgctgttcggcatctgctacggcatgcagaccatggccgagcagatgggcggcaaggtgcagggctccgacctgcgcgagttcggctacgcccgcgtcgacgtggtcggcaaggcgcgcctgctggacggcatcgaggaccacgtggacgacgacggcgtgctcggcctcgacgtgtggatgagccacggcgacaaggtcaccgagatgccggccggcttccacatcctggccagcaccccgagctgcccgatcgccgccatggccgacgatgcccgcgcctactacggcgtgcaattccacccggaagtcacccacaccaagcagggcctgcgcattctctcgcgcttcgtcctcgacatctgcggttgcgccgcgctgtggaccccctcgaacatcgtcgacgacgccatcgccaccgtgcgcgcccaggtcggttcctccaaggtcctgctcggcctctccggcggcgtggactcctcggtggtcgccgcgctgctgcacaaggccatcggcgaccaactgacctgcgtgttcgtcgacaacggcctgctgcgcctgcacgaaggcgaccaggtgatggccatgttcgccgagaacatgggcgtgaaggtgatccgcgccaacgccgaggacaagttcctcggccgcctggccggcgtcgccgacccggaagagaagcgcaagatcatcggccgcaccttcatcgaagtcttcgacgaagaagccaccaagctgcaggacgtgaagttcctcgcccagggcaccatctaccccgacgtgatcgagtcggccggcgccaagaccggcaaggcccacgtgatcaagtcgcaccacaacgtcggcggcctgccggaggacatgcagttcgaactggtcgagccgctgcgcgaactgttcaaggacgaagtgcgcaagatcggcctggagctgggcctgccctacgacatggtctaccgccacccgttccccggcccgggcctgggcgtgcgcatcctcggcgaggtgaagaaggagtacgccgacctgctgcgccaggccgaccacatcttcatcgaggaactgcgcgccttcgactggtaccacaagaccagccaggcgttcgtggtgttccagccagtgaaatcggtcggcgtggtcggcgacggccgtcgctacgcctgggtcgtcgccctgcgcgcggtggagaccatcgacttcatgaccgcgcgctgggcgcacctgccctacgaactgctggagaaggtctcgaaccgcatcatcaacgagattgccggtatctcccgggtcacctacgacgtgtcgagcaagccgccggcgactatcgagtgggaatga

SEQ ID NO: 7855 - DNA, 1470 bp, Pseudomonas aeruginosa
  CDS (1)...(1470)
atgctgcgaatcagtcaagaagccctgactttcgacgacgtccttctgatccccggttattccgaagtcctgcccaaggacgtgagtttgaaaactcgcctgacccgcggcatcgaactgaacatcccgctggtatccgccgcgatggataccgtgaccgaagcccgcctggccatcgccatggcccaggaaggcggcatcggcatcatccacaagaacatgggcatcgagcagcaggccgcggaagtccgcaaggtcaagaagcacgaaacggccatcgtccgcgacccggtcaccgtgaccccctcgaccaagatcatcgaactgctgcagatggcccgcgagtacggcttctccggtttcccggtggtggagcagggcgagctggtcggtatcgtcaccggtcgcgacctgcgggtgaagccgaacgccggcgataccgtcgccgcgatcatgaccccgaaggacaagctggtcaccgcccgcgaaggcaccccgctggaagagatgaaggccaagctctacgagaaccgcatcgagaagatgctggtggtcgacgagaacttctacctgcgtggcctggtgaccttccgtgacatcgagaaggccaagacctacccgctggcgtccaaggacgagcagggccgcctgcgcgtcggcgccgccgtcggcaccggcgccgataccggcgagcgcgttgccgcgctggtcgccgccggggtcgacgtggtggtggtggacaccgcccacggccactccaagggcgtgatcgagcgtgtgcgctgggtcaagcagaccttcccggacgtccaggtgatcggcggcaacatcgccaccgccgaggccgccaaggccctcgccgaggctggcgccgacgcggtcaaggtcggcatcggcccgggctcgatctgcaccacccgcatcgtcgccggtgtcggcgtgccgcagatctccgccatcgccaacgttgccgccgccctcgaaggcaccggcgtaccgctgatcgccgacggcggcatccgcttctccggcgacctggccaaggccatggtcgccggcgcctactgtgtgatgatgggctcgatgttcgccggtaccgaggaagcgccgggcgagatcgagctgttccagggccgttcctacaagtcctaccgcggcatgggttcgctgggcgccatgtccggctcccagggctcgtccgaccgctacttccaggacgcctccgccggcgccgagaagctggtgccggaaggcatcgagggtcgcgtgccgtacaagggtgccctgtccgccatcgtccaccagctgatgggcggcctgcgcgccgccatgggctacaccggcagcgccgacatccagcagatgcgcacgcagccgcagttcgtccggatcaccggcgcgggcatggccgagtcccatgtccacgacgtccagatcaccaaggaagcccccaactaccgggttggttga

SEQ ID NO: 7856 - DNA, 1380 bp, Pseudomonas aeruginosa
  CDS (1)...(1380)
atgcgtaacgatcccttccaacggctcggcctcgatcgcgaggtgctgaccgtcagccaactgaaccagcgcgcccgcctgctgctggaagacgtgttcccgcaggtctgggtcgagggcgagctgtccaacctcgcccggccggcctccggccatgtctacttcaccctcaaggacagcaacgcgcagatccgctgcgcgctgttccggcagaacgccctgcgcgtacgccaggccttgcgcgacgggctggcggtaaaggtgcgcgggaagatctcgctgttcgagggacgcggcgactaccagttgatcgccgataccgtcgagccggccggcgacggcgccctgcgcctggccttcgaggcattgaaggaaaaactcgccggcgaaggcctgttcgccagcgaacgcaagcgtccgctgcccgcccatccgcgccgcatcggtatcgtcagttcgcccagcggggcggtgatccgcgacatcatcagcgtgtttcgccgccgcgcaccgcaggtcgagctgaccctggtgcccaccgcagtgcagggccgcgaggccgtcgcacagatcgtccgcgcgctgcaactggccgaccggcaaggcttcgacgcgctgatcctggcccgtggcggcggttccctggaagacctctggtgcttcaacgaagaagcggtggcgcgcgccgtggcggcctgcgccacgccaatcgtcagcgcggtcggccacgagaccgacgtatcgatcagcgacttcgtcgccgacgtgcgcgcgccgacgccttcggccgccgccgaactgctggcgcccaacgccggcgacctgcagcagcgtctcgacggcctgcgccggcgcctggtgctgcgcatgcgcgaccagttgctgcgcgaacgcctgcgcctggaaggcgtcgcccgccgcctgcgccatcccggcgaacgcctgcgccagcaggcgcagcgcctggacgacctggacatgcgcctgcgccgtgccttcgagcgccagctggcggtccgccacgaacgtctggtccgcctggagacacgtctcgccgcacagcatccgggccgcaccctggcgctgctccggcagaagctcgacagcctcgccgcgcgcctgccgcgcgccgcccgtgaggtactgaaggatcgtcgtcagcgcctcgaaggactggcgcagacgctcaacgtggtcagcccgctggcgaccctgggccgcggctacagcatcctcctcgacgagcgtggccgggcgatccgcgatgccggccagacccagccgggacagcgcctgaaggcgcgcctggcggaaggcgaactggaggtgcgggtcgaggacaaccaccggacgccggtgaccctgtcgctgctggactga

SEQ ID NO: 7857 - DNA, 1482 bp, Pseudomonas aeruginosa
  CDS (1)...(1482)
atggttcccgttattgccctggtgggtcgcccgaacgtcggcaagtccactctgttcaaccgcctgaccaagtcgcgcgacgccatcgtggcggagtacgcaggcctgacccgcgatcgccagtacggcgaggcgcgctggcagggccgcacctatatcgtcatcgataccggaggcatctccggcgatgaggaaggcatcgatgcgaaaatggccgagcaatcgttgcaggccatcgaggaggcggatgccgtcctgttcctggtcgattcgcgcgccggcatgaccgccgccgaccagatgatcgccgagcacctgcgcaagcggaacaagcgcagcttcctgatcgccaacaaggtcgacaccatcgatcccgatctcgctcgcgccgagttcagcccgctgggcctgggcgatgcgctgccgatcgccgccgcccacggtcgcggcatcaaccatatgctgcaggaagccctggggatcttccccaaggacaacgcggaggaagaaggcgagggcgagccggcgagcgaagaggtcgccgaaggcgaggaaccgacccggattcccggtcccagcgagaaggacgggatcaagatcgccatcatcggccggcccaacgtgggcaagtcgaccctggtcaaccgcatgctcggcgaagagcgggtgatcgtctacgaccaggccggcaccacccgcgacagcatctacatcccgttcgagcgcaacgaggagaagtacaccctgatcgacaccgctggcgtgcggcgtcgcggcaagatcttcgaggcggtggaaaagttctcggtggtgaagaccctccaggcgatccaggacgccaacgtggtgatcttcgtcatggacgcccgcgaaggggtggtcgagcacgacctcaacctgctcggcttcgtcctcgagaccggccgtgccctggtcattgccctgaacaagtgggatggcatggaggcggccgagcgtgactacgtgaagaccgaactggagcggcgcctgctgttcgtcgacttcgccgacatccatttcatttcggccctgcatggcaccggcgtcggccatctctacaagtcggtccaggagtccttccgttcggcggtgacccgctggccgaccagccgcctgaccagcatcctcgaggacgccgtgcaggtgcaccagccgccgatggtcaacggtcgccggatcaagctgcgctacgcccacctgggcggcgccaatccgccgctgatcgtgatccacggcaaccaggtggacgcggtgccgaaggcctatacccgctacctggagaagacctaccggcgggtattgaagctggtcggtacgccgatccgcatcgagtacaagggcggcgagaacccctacgagggcaagaagaactcgctcaccgcgcgccaggtcaacaagaagcgccggctgatgtcgcaccacaagaaagccgagaagaagaagaaggacaagcgccgctga

SEQ ID NO: 7858 - DNA, 1290 bp, Pseudomonas aeruginosa
  CDS (1)...(1290)
gtgagcaagtccctgcaagccattcgtggcatgaacgacatcctgccggaacagactccggcctggcgctatctggaacgcaccttcgccggcctgctggacggttacggctacagcgagatccgcctgcccatcctcgagttcaccgaactcttcgcccgcggcatcggcgaaggcaccgatgtggtcgacaaggagatgtacaccttcctcgaccgcaacggcgaatccctgaccatgcgtccggaaggtaccgccggttgcgtgcgcgccgtgctggagcacggcctgagcggcggtggccaggtgcagaagctctggtacaccgggccgatgttccgttacgagaaaccgcagaaaggtcgctaccggcagttccaccagatcggcgtggaagtcttcaacctgcccggtccggacatcgacgccgagttgatcatcctcacctggcgcctgtggcagaagctcggcatggccgacgcggtgaccctgcagctcaacaccctcggctccagcgaggcccgcgcacgctatcgcgaggccctggtggcctatctgcaggagcgcttcgagcaactcgacgaagacagccagcggcgcatgaccaccaatccgctgcgaatcctcgacagcaaggtggagagcacccaggcgttgctggttggcgcgccgaccctgcacgactatctcgacgaagaatcgatcgcccacttcgagggtctcaaggcccgcctggatgctgtcggacttcgctacgaaatcaaccagaagctggtgcgcggcctggactattactgccgcacggctttcgagtgggtcaccgacaagcttggcgcccagggcaccgtttgcggcggtggccgctacgacgggctggtcagccagttcggcggcaagccgaccccgggtgtcggtttcgccatgggcgtggaacgcctggtgctgctgctggaaaccttgggggtgatccccgccgaactgaaccgtccggccgacctctacgtctgcgccttcggcgaaccggccgagctggccgccctgaccctggccgaacagttgcgcagcgccattcccggcatacgcctgctggtcaacgccggcgccggtagcttcaagagccagttcaagaaggccgacaagagcggcgcgcgctttgccctgatcctcggggaggacgaggtggccaatcgcgtggtaggtttcaagcccctgcgtgacgagggcgagcaacaaagcattgcctgggatgctctgcccgagcacctggcagcctgtctggcacaggcttga

SEQ ID NO: 7859 - DNA, 777 bp, Pseudomonas aeruginosa
  CDS (1)...(777)
atgttcgaacgtgtgcgtgaagatatccaaagcgtattccaccgtgatccggcggctcgcaacgcactcgaggtcctcacctgttatccgggcctgcacgccgtctggctgcatcggctggcccacggcttgtggacgtccggctggaagtggctggcgcgcctggtgtccaatttcggccgctggatgaccggcatcgagatccacccgggggccaggatcggccggcgcttcttcatcgaccacggcatgggcatcgtcatcggcgaaaccgccgagatcggcgacgacgtcaccctctatcagggtgttaccctgggcggcaccacctggaacaagggcaagcgccaccccaccctcggcaacaacgtagtggtcggtgccggtgccaaggtgctcggcccgttcaccgtcggcgagggcgccaaggtcggctccaacgccgtggtgaccaaggaagtcccgccgggtgccaccgtggtcggcattcccgggcggatcatcatgcgcgaggactccgagcagcaggccaagcgccaggcgatggcggagaagctcggcttcgatgcctatggggtcagccaggacatgccggacccggtggcgcgtgccattggtcagttgctcgatcacctgcaggccgtcgacggccggctcgagggcatgtgccaggcgctcaccgccctgggtagcgactactgcgcgaaggacctgccggtattgcgcgaggaagatttcgccggagtcaaggatgaggacggcaatccggccgcgtaa

SEQ ID NO: 7860 - DNA, 1119 bp, Pseudomonas aeruginosa
  CDS (1)...(1119)
atgaacttcgagctgctggcgaccgacggcaaggcccgtcgcggccgcctgaccttcccccgcggcgtggtcgagaccccggccttcatgccggtgggcacctacggcacggtgaagggcatgttgccgcgcgacatcgaggacatcggcgcgcagatcatcctcggcaacaccttccatctctggttgcgcccgggcaccgaggtgatccagcgccacggcgacctgcacgacttcatgcagtggaaaggcccgatcctcaccgattccggcggtttccaggtgttcagcctgggagccatgcgcaagatcaaggaggagggcgtgaccttcgcctcgccggtggacggcgccaaggtcttcatggggccggaggagtccatggcggtgcaacgcgccctgggctcggacatcgtgatgatcttcgacgaatgcacgccgtacccggccgaccatgacgtcgccaagcgctccatggagctgtcgctgcgctgggccaagcgctcgaagatcgcccatggcgatagcccgtcggcgctgttcggcatcgtccagggcggtatgcacgaggacctgcgcctgcgctcgctggatggcttgcaggagatcggcttcgacggcctggccatcggtggtttgtcggtgggcgagccgaaggaagagatgatccgcgtgctcgatttcctgccgccgcagatgccggccgacaagccgcgctacctgatgggcgtgggcaagccggaagacctggtggaaggcgtgcgccgcggcgtggacatgttcgactgcgtgatgccgacgcgcaatgcgcgcaacggccacctgttcgtcgacagcggggtgatcaagatccgcaactcggtacacaagcacgacgactccacgctcgacccgacctgcgactgttacacctgcaaacatttttcccgcgcctatctgcaccacttggacaagtgcggggaaatgctcggtagcatgctcaataccatccacaacttgcggcattatcagcgggttatggctggtttgcgcgaggcaatccaacagggtacattggccgcctttgtcgatgccttctatgccaagcgcggccttcccacgccgccgctggatgcctga

SEQ ID NO: 7861 - DNA, 1044 bp, Pseudomonas aeruginosa
  CDS (1)...(1044)
atgcgtgtcgccgattttcatttcgacttgcccgaggccctgatcgcccgtcatcccctgcctgaacgccgcgcaagccgcctgttggcgctggatggcccgacgggaaccctcgcccacagacaattcgccgatctcctggactacctgcgtccgggcgacctgatggtgttcaacaatacccgggtaatcccggcgcgcctgttcggccagaaggaatccggcggcaagctggaagtcctggtcgagcgcgtgctcgaccagcaccgggtgcttgcccacatacgcgccagcaaggcgcccaagcccggcacgcggatcctcgtcgaaggcggtggcagcgcggagatgctgcaacgccacgacgccctgttcgaactcgcgttcgccgaacccgtgctgcctttgctggagcgggtcgggcacatgccgttgcctccctatatcgaccgaccggacgatgcggccgaccgcgagcgctaccagaccgtctacgcccagcgcgccggtgcggtggcggccccgaccgccggcctgcacttcgatgaggcgctgctcgaggcgatccgcgcgaagggggtggataccgccttcgttaccctgcatgtcggcgccggtaccttccagccggtgcgtgtcgagcgtatcgaggaccatgtgatgcaccgcgaatggctggaggtcggccaggacgtggtggacgcggtttccgtctgccgggcccgcggcggccgggtagtcgccgtcggcaccaccagcgtgcgctcgctggaaagcgcggcacgcgacggtgagctgaagcccttcagcggcgacaccgacatcttcatctacccgggccggccgttccatgtggtcgatgccctggtcaccaacttccacctgcccgaatccaccctgctgatgctggtctcggccttcgccggctacccggagaccatggccgcctacgccgcggcggtggcgcagggctatcgcttcttcagttacggtgatgccatgttcatcacccgcaatcccgcgccccgcggacccgaggactga

SEQ ID NO: 7862 - DNA, 1488 bp, Pseudomonas aeruginosa
  CDS (1)...(1488)
atggaattccttgttaaaagcgtacgcccggaaaccctgaaaaccgccaccctggtgctcgccgtaggcgaaggccgcaagctcggcgccagcgccaaggcggtcgacgacgccaccggcggcgccatcagcgcagtgctcaagcgtggcgacctggccggcaaggtcggccagaccctgctcctgcagagcctgcccaatctcaaggccgagcgcgtgctgctggtcggcgccggcaaggagcgcgaactgggcgaccgccagtaccgcaagctggcctccgccgtgctgtcgaccctcaagggcctggccggcgccgatgccgcgctggccctcggcgatctcgcggtgaaaggccgcgatgcccacgcgaaggcgcgtctgctggtggaaaccctggccgatggcctgtacgtgttcgatcgctacaagagccagaaagccgagccgctgaaactgaagaagctgaccctgctcgccgacaaggccgacagcgccgccgtcgagcaaggcagcaaggaagcccaggccatcgccaatggcatggccctgacccgtgatctcggcaacctgccgccgaacgtctgccatccgacgttcctcggcgagcaggccaagggcctggccaaggagttcaagggcctgaaggtcgaggtcctcgacgagaagaaactgcgcgagctgggcatgggctcgttcctcgccgtcgcccagggcagcgaccagccgccgcggctgatcgtcctgcaatacaacggcgcgaagaaggaccaggccccgcacgtgctggtcggcaagggcatcaccttcgacaccggcggcatcagcctcaagccgggcctgggcatggacgagatgaagttcgacatgtgcggcgccgccagcgtcttcggcaccttccgcgcggtgctcgaactgcagttgccgatcaacctggtcggcctgctggcctgcgccgagaacatgcccagcggcggagccacccgtccgggcgacatcgtcaccaccatgagcgggcagaccgtcgagatcctcaacaccgacgccgaagggcgcctggtgctgtgcgatgcactgacctacgccgagcgcttcaagccgcagtcggtgatcgacatcgccaccctcaccggcgcctgcatcgtcgccctgggcagcaacacctcgggccttatgggcaacaacgaagcgctggtcaggcaactgctcaaggccggcgagttcgccgacgaccgcgcctggcaattgccgctgttcgacgaataccaggaacagctggacagcccgttcgccgacatcgccaacatcggcgggccgaaggccggcaccatcaccgccggctgcttcctctcgcgcttcgccaagaaataccactgggcgcacctggacatcgccggcaccgcctggatcagcggcggcaaggacaaaggcgccaccggccgcccggttccgttgttgacccagtacctgctggaacgggccaagtga

SEQ ID NO: 7863 - DNA, 2853 bp, Pseudomonas aeruginosa
  CDS (1)...(2853)
atggacaagacttaccagccgcacgccatcgagacttcctggtacgagacctgggagtccaacgactacttcgctccgagcggcgaaggccagccctacaccatcatgatcccgccgccgaacgtgaccggcagcctgcacatgggccatggcttcaacaacgcgatcatggacgcgctgatccgctaccgccgcatgcagggccgcaacaccctgtggcagccgggcaccgatcacgccggcatcgccacccagatggtggtcgagcgccagctcggcgcccagggcgtgagccgccacgacctcggccgggagaagttcctggagaaggtctgggaatggaaggaacagtccggcggcaacatcacccggcagattcgtcgcctgggctcctcggtggactggtcgcgcgagcgcttcaccatggacgacggcctctccgaagcggtcaaggaagccttcgtgcgcctgcatgaagacggcctgatctaccgcggcaaacgcctggtgaactgggacaccaagctgcacaccgcgatttccgacctggaagtggaaaaccacgacgagaagggccacctctggcacctgcgctacccgctggtgaacggcgcgaagaccagcgaaggcctggattacctggtggtcgccaccacccgtccggaaaccctgctgggcgacgccgcggtcgcggtgcacccggaagacgagcgctacgccaagctgatcggccagttcgccgaactgccgatcgtcggccggcacatcccgatcatcgccgacgagtacgtcgaccgcgaattcggcaccggctgcgtgaagatcaccccggcccacgacttcaacgactacgaagtgggcaagcgccacgacctgccgctgatcaacatcttcgacaagaacgccgcggtgctggcccaggcccaggtgttccacctcgacggcagcgtcaacccgaacctcgaccccagcctgccgcagagctacgccggcatggaccgcttcgccgcgcgcaaggccatcgtcgccgagttcgaggccatgggcttgctcgagaaggtcgacgaccacgcgctgaaagtaccgaagggcgaccgctccggcaccgtcatcgagccctggctgaccgaccagtggtacgtcagcaccaagccgctggccgaagacgccatcgccgccgtggaagacggccgtatccagttcgtgcccaagcagtacgagaacatgtacttctcctggatgcgcgacatccaggactggtgcatcagccgccagctctggtggggccaccgcatcccggcctggtacgacgaggccggcaacgtctacgtcggccgcgacgaggtcgaggtgcgcaccaagcacaagctcggcaacgaggccgagttgcgccaggacgaagacgttctcgacacctggttcagctccggcctgtggaccttctccaccctcggctggccgcagcagaccgagttcctcaagaccttccaccccaccgacgtactggtcaccggcttcgacatcatcttcttctgggtcgcgcggatgatcatgctcaccatgcacctggtgaagaaccccgacggcaccccgcagatcccgttcaagaccgtctatgtccacggcctggtgcgcgacggccagggccagaagatgtccaagtccaagggcaacgtactcgacccgctggacatcgtcgacggcatcgacctcgataccctgctgcaaaagcgcaccagcggcatgatgcagccgaagctggcggagaagatcgccaagcagacccgcgccgaattccccgaaggcatcgccagctacggcaccgacgccctgcgcttcaccttctgctcgctggcctccaccggccgcgacatcaagttcgacatgggccgcgtcgaaggcttccgcaacttctgcaacaagatctggaacgccgccaacttcgtcatcgagaacaccgatggccaggacaccggggtcaacggcgagccggtcgagctgtcctcggtcgaccgctggatcatctcccagttgcagcgcaccgagcaggaagtcacccgccagctcgacgccttccgcttcgatctggccgcccaggccctctatgagttcatctgggacgagtactgcgcctggtacctggagctggtcaagccggtgctgtgggacgagaacgcccccatcgagcgccagcgcggcactcgtcgcaccctgatccgcgtgctggagacggccctgcgcctggcgcacccgttcatgccgttcatcaccgaggaaatctggcaacgcatcaagggccaggccggcaaggaaggcccgaccctgatgctgcaaccctggccggtggccgacgaaggcaggatcgacgccgccgccgaaggcgacatcgaatgggtcaaggcgctgatgctcggcgtgcggcagatccgcggcgagatgaacatctccatggccaagcgcatcgacatcatcctcaagaacgcctcgcccagcgaccaccgccgcctggccgacaacgagccgctgctgatgaaactggccaagctggaaagcatccgcgtgctggaagccggcgaggaagcgccgatgtccgccaccgccctggtcggcgacatggaagtattggtgccgatggccggcctgatcgacaagagcgccgaactggggcgcctggacaaggagatccagcgcctggaaggcgaggtcaagcgcgtcggcggcaagctgtccaacgaaggcttcgtcgccaaggccccggccgacgtgatcgagaaggaacgcgccaagctagccgaggccgaacaggccctggccaagctggccgagcaacggcagaagatcgccgcgctctaa

SEQ ID NO: 7864 - DNA, 690 bp, Pseudomonas aeruginosa
  CDS (1)...(690)
gtgggttacctgaagaatcattggtggaaacgctggatccgccgccgcggctgcaagctggccggcggcccggccagtgtcggcaagcgcaccacgctggtgctcgaggagcgggtcgaactcggccacctgcgcatcgtcccgccgaggctggagatcggcgcctacagctatgtgcgcagcggcaccgacctgtccctggtggcgtccatcgggcgtttctgctcgatcggctcggactgtttcatcggccaggaaaagcacacccatcccagcgactgggtgagcagccaccccttccagcacaccggcaccgcgctgcgctacgagccggcgctgagctacgcggaaatcggccacgacgtctggatcgggcacagcgcgatggtgatggaaggtgtcaaggtcgggactggggcgatcatcgccacgcgcgccgtggtcactcgcgacgtgccgccctatgccatcgtcgccgggactccggcgcaggtgatccgctaccggcatccgccggagatcatcgagggcctgctcgcctcacgctggtgggagctggatagcgccttcctcaccggcctgccgctggaccgaccccgggagttcctcgccgccctggaggcgcgcgaggcgccgcgtgcggcgtaccggcggatgaccatcacccgccaggggtgccggctggattga

SEQ ID NO: 7865 - DNA, 3786 bp, Pseudomonas aeruginosa
  CDS (1)...(3786)
atgagtcacctgctcgaccgcctgcagttcttcaagaagaagcagggcgaattcgccgatggccacggcgagaccagcaacgagagccgcgcctgggaaggtgcctaccggcagcgctggcagcacgacaagatcgtgcgctccacccacggggtgaactgcaccggctcctgctcctggaagatctacgtgaagaacggcctgatcacctgggaaacccagcagaccgactacccgcgcacccgtccggacctgcccaaccacgagccgcgcggctgcccgcgcggggccagctattcctggtacatctacagcgccaaccgcctgaagtacccgaaggtgcgcaagccgttgctcaagctctggcgcgaggcgcgggcgcagcacggcgacccggtgaacgcctgggccagcatcgtcgaggacgccgccaaggcgaagagctacaagagccagcgcggcctgggtggcttcgtccgttccagctgggacgaggtcaccgagatcatcgccgcggccaacgtctacaccgccaagacctacggtccggaccgggtgatcggcttctcgccgatcccggccatgtcgatggtcagctacgccgccggcgcccgctacctgtcgctgatcggcggggtctgcctgagcttctacgactggtactgcgacctgccgccggccagcccgcagatctggggcgagcagaccgacgtgccggagtcggccgactggtacaactccagctacatcatcgcctggggctccaacgtgccgcagacgcggaccccggacgcgcacttcttcaccgaggtgcgctacaagggcaccaagaccgtctccatcaccccggactattccgaggtggccaagctcaccgacctctggctcaaccccaagcagggcaccgacgccgcgctgggcatggccttcggtcacgtgatcctgaaggagttccacctcgaccggccgagcgcctacttcgtcgactactgccgccagtacaccgacatgccgatgctggtgttgctggaagaacacgccggcggcgcgttcaagccgacccgctacctgcgcgccgccgacctggcggacaacctcggccaggacaacaaccccgagtggaagaccatcgcctacgacgagcgcagcggcgggctggtctcgcccaccggcgccatcggctaccgctggggcgagtctggcaagtggaacatcgccgagctggacggcaggagcggtgaccagacgcgcctgcaactgtcgctgctcgatggcccggaacatgcctgcgaggtggccttcccgtacttcgccgggcaggagcacccgcacttcaagggcgtcgccaacgacgaggtactgctgcgccgggtgccgttccgcgagatcgtcgcggcggacggcaagcgcctgcgggtggccaccgtctatgacctgcagatggccaactacagcatcgaccgcggcctgggcggcgacaacgtggcgacctcctacgaggacgccgacacgccctataccccggcctggcaggagcgcatcaccggcgtcccggcggcgcgcgcgacgcaggtcgcccgcgagttcgccgacagcgccgacaagacccgcggcaaggcgatggtgatcatcggcgcggcgatgaaccactggtaccacatggacatgaactaccgcgcggtcatcaacatgctgatgatgtgcggctgcatcggccaaagcggcggcggctgggcgcactatgtcggccaggagaagctgcgcccgcagaccggctgggcgccgctggccttcggcctggactggagccggccgccgcggcagatgaacggcaccagcttcttctacctgcacagctcgcaatggcgccacgagaagctgtcgatgcacgaggtgctgtcgccgctggccgacgccagccgcttcgccgaacacgccctggactacaacatccaggccgaacgcctcggctggctgccgtcggcgccgcaactgaaccgcaacccgctgcgcatcgccgccgaggccgaggccgccggcctgccggtcgccgactatgtggtgcgtgaactgaagagcggcggcctgcgcttcgccagcgaatcgccggacgatccgcagaacttcccgcgcaacatgttcatctggcgctccaacctgctgggctcctccggcaaggggcacgagtacatgctcaagtacctgctcggggcgaagaacggggtgatgaacgatgacctcggcaaggccggcggtccgcgtcccaccgaggtcgactgggtcgacgacggtgccgagggcaagctcgacctggtcaccaccctggacttccgcatgtcctccacctgcatgtactcggacatcgtcctgccgaccgctacctggtacgagaaggacgacctcaacacctccgacatgcaccccttcatccatccgctgtcggcggccaccgatccggcctgggaagccaagagcgactgggagatctacaaggccatcgccaagaagttctccgccgtcgccgaaggccacctcggcgtggagcaggacctggtcacggtgccgctgctgcatgacacccccaccgagctggcgcagccgttcggcggcgacggccatgactggaagaagggcgagtgcgagccggtgccgggacgcaacctgccgacgctgcacctggtcgagcgcgactacccgaacgtctaccgcaagttcacctcgctcggtccgctgctggacaagctgggcaacggcggcaagggcatcggctggaacaccgagaaggaagtgaagctggtcggcgacctcaaccatcgcgtggtcgagagcggcgtcagccagggccggccgcgtatcgacagcgccatcgacgccgccgaggtggtcctcgccctggctccggaaaccaacggccaggtcgcggtcaaggcctgggaagcgctgtcgaagatcaccggccgcgagcacgcccacctggcgctgcccaaggaagacgagaagatccgcttccgcgacatccaggtgcagccgcgcaagatcatctccagcccgacctggtccggcctcgaggacgagcacgtcagctacaacgccggctacaccaacgtccacgagctgatcccgtggcgcaccatcaccggtcgccagcagttctaccaggaccacccgtggatgcaggcgttcggcgaaggcttcgtcagctaccggccgccggtcaacacccggaccaccgagaaactgttgaacaggaagcccaacggcaacccggagatcaccctgaactggatcaccccgcaccagaaatggggcatccactccacctacagcgacaacctgctgatgctcaccctgtcgcgcggcggtccgatcatctggctcagcgagcacgacgcggccaaggccgggatcgtcgataacgactgggtcgaggtgttcaacgccaacggcgcggcgacctgccgcgcggtggtcagccagcgggtcaaggacggcatggtgatgatgtaccacgcccaggaacgcatcgtgaacgtacccggcagcgagaccaccggcacccgtggcggccaccacaactcggtgacccgcgtggtgctcaagccgacccacatgatcggcggctacgcccagcaggcctggggcttcaactactacggcacggtcggctgcaaccgcgacgagttcgtcgtggtgcgcaagatgagcaaggtcgactggctggacgaaccccgccacggcggactcggcggcgacgccctgccgcaaccgctgccccaggacatttga

SEQ ID NO: 7866 - DNA, 1164 bp, Pseudomonas aeruginosa
  CDS (1)...(1164)
atgatcgaactggacaagctcagcaagaccttcacccagaagaacggcaaggagttccgcgccgtcgattccgtcagcctgaccgtggagaaaggcgagatctgcgtcttcctcggcccctccggctgcggcaagaccaccaccctgaagatgatcaaccggatcatcccgccgacctccggccgcgtgctgatcgacggccaggacaccgcggacctcgacgaggtcaccctgcgccgccacatcggctacgtgatccagcagatcggcctgttcccgaacatgaccatcgaggaaaacatcatggtcgtgccgcgcctgctcggctgggacaaggcgcgctgcaaggagaaggcccgcgagctgatgagcatggtcaagctggagcccaagcagtacctgcaacgctacccgcgcgaactctccggcggccagcagcagcgcgtcggggtgatccgcgcgctggcggcggacgcgccgctgctgctgatggacgagccgttcggcgcggtcgacccgatcaaccgcgagtcgatccagaacgagttcttcgagatgcagcgcaagctcggcatgaccgtgatcatggtcagccacgacatcgacgaagccatcaagctgggtgacaaggtggcggtgttcaagagcggccggctgctccagtacgaccacccggacaccctgctggcgcacccggcggacgagttcgtcagcgccttcaccggccaggacagcacgctcaagcgcctgctcctggtgcgcgccgaagacgccgccgacagcagcctggtcaccgcccggccgcagaccccggtggccgaggcgctggaactgatggacgagaacgaccggcgctacctgatcgtggtggatgaccagggcaagggcctgggctacgtgcgacgcaaggacctgcgccgccaggagggcacctgcgcgccgttcgtcaccccgttccgggtcaccgccagccacgacgagcacctgcgcatcctgttgtcgcggatgtacgagttcaacagctcctggctgccggtgctcgaccccgaccagcagttcctcggcgaggtcacccaggaatccatcgccgactacctcagctccggccgctcgcgcggcggcaagggcctgatcgtgtcgccggccgaacaggtcggggcctag

SEQ ID NO: 7867 - DNA, 1224 bp, Pseudomonas aeruginosa
  CDS (1)...(1224)
gtgagcgcttgcgcctgcgatggcggccaactgcgcccgctcgacgaggcgctggccgaactgctggcgcgcgcgccgcgcccgccagcctgcgagagcctggccctggagcgggcgctgggacgagtgctcggcgaggacctgctggcgccgatggacctgccgcattgggacaacagcgcgatggacggctacgccttgtgctccgccgacctgccgcgcagcggcggcagcctgacggtcggcgcgcggatcgccgccggcgacacccgcggcatgagcctgccgctgggccaggcggcgcggatcttcaccggcgcgccgctgccgaccggcgccgactgcgtggtgccgcaggaactctgcgtggtcgacggcgagcgcgtgcagttgccgccggtgagcgccggccagcatgtgcgccggcgcggcgaggagttgcgtcgtggcgcgccggtgctgcgtgccggacagcgcttgcgcccgcaggaactcggcctgctggcgagtctcggcgtcgccacggtctcggtgcgtcggcgcttgcgcatcggcctgctgagcagcggcgacgaattgcgcgagcccggccagacactgttggccgggcagatctacaacgccaaccgttactgcatcggcgccttgctgcgcggtctgggcttcgaggtgcacgacgaggaagtgctcgccgacgaactggtggccagccgcgatgcgctcagcctggcggcctccgaatgggacgcgctggtcaccagcggcggtgtctcggtaggcgaggaagaccacctcaagcgcgccatcgccgagcttggcgaggtcaacctgtggcgcctggcgatccagccgggcaagccgttcgccttcggctccgtggccggcaagccctggctggggctgcccggcaaccctgcggcggcgctggtcaccgcattactggtggcgcgtccgttcctgcttcgccagcagggactgttcgacgtagtgccgcggccgctggcgttgccggcggccttcgactggccgcaaccgcgggcgcgtcgccagtacctgcgggcgcggctcgatgaacgggggcgggtggaaatccacccgcagcagggctcggcgatgctgcttgccgccagttgggcggacgggctggcggtgatcgagcgcggcgccaccctgggcgtgggtgatgcgatcgactttctgccgttctccgcactgatggcctga

SEQ ID NO: 7868 - DNA, 2379 bp, Pseudomonas aeruginosa
  CDS (1)...(2379)
atgaacagcgccacgctaaccgagctcgatctgccggtcagcggcatgacttgcgcgtcctgcgccggccgtgtcgaacgagccctgaagaaagtgcccggggtcgcggccgcctcggtcaacctggccagcgagcaggcccgcgtacaggccccggcggacagcctgccggccctggtggcggcggtcgagcaggccggctaccaggttccggcgcgcagcctggaactgtccatcgagggcatgacctgcgccagttgcgtcggccgggtcgagcgggcgctgaagaaggtgcccggcgtacgcgaggtcagcgtcaacctggccagcgagcgcgcccacctcgagctgctcggcgccgtggacagccaggccttgctacaggcggtggaacaggccggctacaaggcccgcctgctcgacgcggggcaaccacgccaggacgatgccgagcgccgcctgcgccgcgaacgctggtgggtgatcgccgcgctgttgctggcgttgccgctggtgctgccgatgctggtggaatgggccggcctgcactggatgctgccgccgtgggcgcagttcctcctggcgaccccggtgcagttcgtcatcggcgcgcgcttctatgtctccgcctggcgcgcggtgaaggccggtgccggcaatatggacctgctggtcgccctcggcaccagcgccggctacggcctcagcgtctacctctggctgaccgccccgcccggccacatgccgcacctctacttcgaagcctccaccgtggtgatcgccctgatcctcctcggcaagtacctggaaagccgcgccaagcgccagaccgccagcgccatccgcgccctcgaggcgttgcgcccggagcgcgcggtgcgcctgcgcgacggtcgcgaggaagaggtggcgatcgccgagttgcgcctcggcgacgaggtggtggtgcgtcccggcgaacgcttcccggtggacggcgaggtgctcgacggcagcagccacgccgacgaggcgctgatcaccggcgagagcctgccggtgcccaaggctcccggcgacaaggtcaccggcggcgcgatcaacggcgaaggccgcctgctcctgcgcaccactgcgctcggcggggaaacggtgctggcgaagatcatccgcctggtggaagacgcccaggccgccaaggcgccgatccagaagctggtggacaaggtcagccaggtcttcgtcccggtggtgatcctcatcgcgctggtcaccctcggcgcctggctggtcgccggggtcggcctggagcaggccctggttaacgccgtggcggtgctggtgatcgcctgcccctgcgccctcggcctggccaccccgaccgcgatcatggccggcaccggcgtggccgcgcgccacggcatcctgatcaaggacgccgagtccctggaagtcgcccatgcggtcaccagcgtggccttcgacaagaccggcaccctgacctccgggcgaccgcagatcatccacctcggcggcgacgaccaggagcaactgctcaggctcgccggcgccctgcaacgcggcagcgagcacccgctggccaaggccgtgctcgagcgctgcgccgagcgcgacctggaggttccgccggtgaacgccagccaggccctcagcggtcgcggcatccagggcgaggtcgagggtcgccggctggccctgggcaaccgccgcctgctcgacgagcaggaactcaagcccggcgcgctggcgagtgccgccgcggactgggaggccgagggccgcaccctgtcctggctgctggaattggctccggagaaacgcgtgctcggcctgttcgccttcggcgacagcctcaaggacggcgccgccgaagcggtggaggccctgcgcggacgggatatccacagccacctgatcaccggcgacaaccgcggcagcgcggcggtggtggccaaggccctgggcatcgacgacgtacacgcggaagtgctgccggcggacaaggccgccacggtcgccgagctgaaaggccggggccgggtggtggcgatggtcggcgacggcatcaacgacgccccggcgctggccgctgccgacgtaggcatcgccatgggtggcggcaccgacgtggccatgcacgccgccggcatcaccctgatgcgcggcgacccgcgcctggtgccggcggcgctggacatctcgcggcggacctacgcgaagatccgccagaacctgttctgggccttcatctacaacgtgatcggcatcccgctggcggccttcggcctgctcaacccgatggtggcgggcgcggcgatggccttctccagcgtcagcgtggtcggcaacgccctgctcctgcgacgctggaagccctga

SEQ ID NO: 7869 - DNA, 630 bp, Pseudomonas aeruginosa
  CDS (1)...(630)
atgaaactgcgcggcctgtacgccatcaccgatagccagctactggacgacggccgcctgctgccctacgtcgaagccgcgctccgcggcggcgcgcgcctgctgcaataccgcgacaaatccagcgaccaggcgcggcgcctgcgcgaggcggaaagcctgcgcgaactctgcgaacgccacggcgcgcagttgatcgtcaacgacgacgccgaactcgccgcgcgcctgggcgtcggcctgcacctcggccagaccgacggttcgctgtcggcggcgcgcgccctgctcggccgccaggcgatcatcggcgccacctgccacgcccaactggaactggccgagcaggcggtggccgagggcgccagctacgtcgccttcggccgcttcttcaattccagcaccaaacccggcgcccccgccgccagcgtcgaactgctcgaccaggcccggccgcgcctgcacctgccgatcaccgccatcggcggcatcagcctcgacaccgcgcccggcctgatcgcccgcggcgtcgatctggtcgccgtgatccatgcgctgttcgccgccgcgtccgccgccgaggtggaacgccgcgcccgcgccttcagcgccctgttcgaacctgcctga

SEQ ID NO: 7870 - DNA, 1284 bp, Pseudomonas aeruginosa
  CDS (1)...(1284)
atgtcccgttccgaaacgctgttcaacaacgcccagaaacacattcccggcggggtcaactccccggtgcgcgccttcaagagcgtcggcggcaccccgctgttcttcaagcacgccgaaggcgcctatgtactggacgaggacgacaagcgctacgtggactatgtcggctcctggggcccgatgatcctcggccacagccatccggacgtgctcgacgcggtgcgccggcaactcgaccacggcctgtcctatggcgcgccgaccgcgctggaagtggaaatggccgacctggtctgctccatggtgccgtcgatggagatggtgcgcatggtcagctccggcaccgaggcgaccatgagcgccatccgcctggcccgcggctacaccgggcgcgacagcatcatcaagttcgaaggctgctaccacggtcactccgacagcctgctggtgaaggccggctccggcgccctgaccttcggcgtgccgaactccccgggcgttccggcggccttcgccaagcacaccctgaccctgccgttcaacgacatcgaggcggtgcgcaagaccctgggcgaagtcggcaaggaggtcgcctgcatcatcgtcgagccggttgccggcaacatgaactgtgtgccgccggcgccgggcttcctcgaaggcctgcgcgaagcctgcgacgaacacggcgtggtgctgatcttcgacgaagtgatgaccggcttccgtgtcgccctcggcggcgcccaggcctactacggggtcaccccggacctgtcgaccttcggcaagatcatcggcggcggcatgccggtgggcgccttcggcggcaagcgcgagatcatgcagcagatttccccgctgggcccggtctaccaggccggcacgctctcgggcaacccgctggcaatggccgccggcctgaccaccctgcgcctgatcagccgccccggtttccacgacgaactgaccgcctacaccacgcgcatgctcgacggcctgcaacagcgcgcggatgccgccggcatccccttcgtcaccacccaggcgggcggcatgttcggcctgtacttcagcggcgccgacgccatcgtcaccttcgaggacgtgatggccagcgacgtcgaacgcttcaagcgcttcttccacctgatgctcgacggtggcgtgtaccttgcgcctagcgccttcgaggccggcttcacctccatcgcccatggcgacaaggagctggaaatcacgctgaacgccgccgaaaaagccttcgccgcgctgaaatga

SEQ ID NO: 7871 - DNA, 2622 bp, Pseudomonas aeruginosa
  CDS (1)...(2622)
atgcacgagcaatatcagccactcgagatcgaaacccaggcccagaactactggaaagaacaccagtccttcctcgtcagggagctacccgacaaggagaagttctactgcctgtcgatgttcccgtatccgagcggcaagctgcacatgggccacgtgcgcaactacaccatcggcgacgtgatcagccgctaccaccgcatgcagggccgcaacgtgctgcagccgatgggctgggacgcgttcggcatgccggcggaaaacgccgcgatgaagaacaacgtcgccccggcggcctggacctacgacaacatcgcctacatgaagtcgcagctggacagcctcggcctggcgatcgactggagccgcgaggtcaccacctgcaagccggactactaccgctgggagcagtggctgttcacccgcctgttcgaaaaaggggtgatctaccgcaagaacggcacggtcaattgggatccggtcgaccagaccgtactcgccaacgagcaggtgatcgacgggcgcggctggcgctccggcgcgctgatcgagaagcgcgagatcccgatgtactacttcaagatcaccgcctacgccgaggaactgctggagagcctcgacaacctgcccggctggccggagcaggtgaagaccatgcagcgcaactggatcggcaagtcgcgcgggatggagatcggcttcccctacgaccaggcctccatcggccacgccggccaactgaaggtgttcaccacccgtccggacaccctgatgggcgccacctacgtcgccgtcgccgccgaacacccgctggccacccaggcagcgcagaacgacccgcagttgcaggcgttcatcgacgaatgcaagcgcggcggcgtcgccgaggccgacatcgccacccaggagaagaaaggcatggccacttccctgttcgtcgaacacccgctgaccggcgacaagctgccggtatgggtcgccaactacgtgctgatgaactacggcgaaggcgcggtgatggcggtgcccggccatgacgagcgcgacttcgagttcgccaacaagtacggcctgccgatccgccaggtgatcgccaaggtcgagggcgacaacgacttcgagtccagcgtctggaaggagtggtacggcgccaaggacgagtccgtgctcaccgtcaactccggcaagtacgacaacctcggctaccaggccgccttcgacgccatcggcgccgacctcgaggccaagggcctgggccaggcgcgcacccagttccgcctgcgcgactggggcatcagccgccagcgctactggggctgcccgatcccgatcatccactgcgaggcttgcggcgacgtcccggtgccggccgaccagttgccggtggtgctgccggaagacgtggtaccggacggctccggttcgccgctggcgaagatgccggaattctacgaatgcaactgcccgaaatgcggccagccggccaagcgcgaaaccgacaccatggacaccttcgtcgagtcgtcctggtatttcgcccgctacgcctgcccgcagttcgaaggcggcatgctggacaggaaggcggccgactactggctgccggtcgaccagtacatcggcggcatcgagcacgccatcctgcacctgctctatgcgcgcttcttccacaagctgatgcgcgacgaaggcctggtcggcagcgacgaaccgttcaagaacctgctgacccagggcatggtggtcgccgatacctactaccggaccaccgccaacggcggcaaggactggttcaacccggccgacgtcgaggtcgagcgtgacgccaaggccaaggtcgtcggcgcgcgcctgaagagcgacggccagccggtcgagatcggcggcaccgagaagatgtcgaagtcgaagaacaacggtgtcgacccgcaatcgatgatcgaccagtacggtgccgatacctgccgcctgttcatgatgttcgcctcgccgccggacatgagcctggagtggtcggacgccggcgtcgagggcgccaaccgcttcctccgccgcgtctggcgcctggctcacgcccacgtcagcgccggcctccccggcgcgctggacgtcgccgccctgagcgacgcgcagaagcaggtccgccgcgccatccacctggcgatcaggcaggccagccaggatgtcggccagcaccacaagttcaacaccgccatcgccgcggtgatgaccctgatgaacgtgctggagaaggcgccgaaccaggacgcccaggaccgcgccctgatccaggaaggcttggaaaccgtggtcctgctgctggcgcccatcactccgcacatctgccacgtgctctggggccagctcggccatgccgaagcggtgatcgatgcgcgctggccgagcgtcgacgagagcgcactggtgcaggacaccctgcaactggtggtgcaggtcaacggcaagctgcgcggacacatcgacgtggccgccagcgccagccgcgaggatgtcgaggccgccgcgcgcgccaacgagaacgtgctgcgtttcaccgaaggcctgagcatccgcaaggtcatcgtggtaccgggcaaactggtcaacatcgtcgccaactga

SEQ ID NO: 7872 - DNA, 984 bp, Pseudomonas aeruginosa
  CDS (1)...(984)
atgagcactgttgtggagaagtccggagaagccaagccgggcaaggtggaagtcggcgtgaagctgcgcggcgcggaaaaggtcgcgcggattccggtgaagatcattcccaccgaggaactgccgaagaaacccgactggatccgcgtgcgcatcccggtttcccccgaggtcgaccgcatcaagcaactgctgcgcaagcacaagctgcacagcgtctgcgaagaggcgtcctgcccgaacctgggcgagtgcttctccggcggcaccgcgaccttcatgatcatgggcgatatctgcacccgacgctgcccgttctgcgacgtcggtcatggccggccgaagccgctggacgtcgacgagccgaccaacctggccatcgccatcgccgacctgcggctgaagtacgtggtgatcacctcggtggaccgcgacgacctgcgcgacggcggcgcccagcacttcgccgactgcctgcgcgagatccgcaagctgtcgccggggatccagctggaaaccctggtgcccgactatcgcggtcgcatggacatcgccctggagatcaccgccaacgagccgccggacgtgttcaaccataacctggagacggtaccgcgcctgtaccgctcctcgcggccgggctcggacttcgagtggtcgctggacctgctgcagaagttcaagcagatggttccgcacgtaccgaccaagtccgggctgatgctcggcctgggcgagaccgacgacgaggtcatcgaggtcatgcagcggatgcgcgagcacgacatcgacatgctgaccctcggccagtacctgcagccgtcgcgcaaccacctgccggtgcagcgcttcgtgcatccggacaccttcgcctggttcgccgaggaaggcgagaagatgggcttcaagaacgtcgcgtccggcccgctggtgcgttcgtcctaccatgccgaccagcaggcgcacggcaacaagatcggctga

SEQ ID NO: 7873 - DNA, 888 bp, Pseudomonas aeruginosa
  CDS (1)...(888)
atgatcgcggcctaccaggcgcgctgccaggcgcgcgtcgatgccgccctggacgccctgttcgtcgctccccgcgaagaactgcaacgcctctacgaggccatgcgctacagcgtgatgaacggtggcaagcgggttcgcccgctgctcgcctacgccgcctgcgaggccctcggcggagcgccgcagcgcgccgacgccgcggcctgcgcggtggagctgatccatgcctactcgctggtccacgacgacctgccggcgatggacgacgacgacctgcgccgtggccagccgaccacccaccgggccttcgacgaagccaccgcgatcctcgccgccgacggcttgcaggcgctggccttcgaagtgctcgccgacacccggcgcaatccgcaggaacatgccgtctgtctggaaatgctcacccgcctggcgcgcgccgcaggctccgccggcatggtcggcggccaggcgatcgacctcggctcggtcggcgtggccctcgaccaggcggccctggaagtcatgcaccggcacaagaccggcgcgctgatcgaagccagcgtgcgcctcggcgccctcgccagcggtcgcgccgagcccgcctcgctggccgccctggagcgctacgccgaagcgatcggcctggccttccaggtgcaggacgacatcctcgacgtggaaagcgacaccgccaccctcggcaagacccagggcaaggaccaggcgcacaacaagccgacctatcccgccctgctcggcctggaggccgccaaaggctatgccctggagctgcgcgacctggccctggccgccctcgacggttttccgccgagcgccgacccgctgcgccaactggcccgctacatcgtcgagcgacgcaactga

SEQ ID NO: 7874 - DNA, 1098 bp, Pseudomonas aeruginosa
  CDS (1)...(1098)
atggcactcaacacgatcgacgaactgatcgaagacatccgccaaggcaagatggtcatcctgatggatgacgaggaccgcgagaacgaaggcgacctgatcatggccgccgaatgcgtccgcaccgaagacatcaacttcatggtcaagcatgcccgcggcctggtctgcatgccgatgacccgcgagcgttgcgagcgcctcggcctgccgctgatggtgcagcgcaacggctccggcttcggcaccaagttcactgtctccatcgaggccgccgagggcgtcaccaccggcatctccgccgcggaccgcgcccgcaccgtgcaggctgcggcggcgaagaacgccgtggccgccgacatcgtcagccccggccacatcttcccgctgatggcccagccgggcggtaccctggctcgcgccgggcacaccgaggcggcctgcgacctggcgcggatggccgggttcgagccgtccggggtgatctgcgaggtgatgaacgacgacggcagcatggctcgccggcccgaactggaggcgttcgccgccgagcacgggatcaagatcggcaccatcgccgacctgatccactaccggctgatccacgagcgcaccgtcgagcgcatcgccgagcagccgctcgacagcgaactgggccacttcaacctgatcacctaccgcgactcggtggagggcgacgtgcacctggcgctgaccctcggcaaggtctgcgcggaagagccgaccttggtccgcgtgcataacatggacccgctgcgcgacctgctgcaggtcaaccaaccgggccgctggagcctgcgcgcggcgatgaccaaggtcgccgaggcgggcagcggcgtggtgctgctgctcggtcaccagatcggcggcgacgacctgctcgcccatgtccgcgagatcgcttcggcgccggctccggcgcccaaggccaccaccacctacagcaccgtcggtgccggttcgcagatcctgcgcgacctcggcgtgcgcaagatgcgcctgctgagtgcgccgatgcgcttcaatgcgatatccggtttcgacctggaagttgtagaatacctgcccgccgaataa

SEQ ID NO: 7875 - DNA, 660 bp, Pseudomonas aeruginosa
  CDS (1)...(660)
atgttcaccggcataatcgagtcgatcggcagcgtccgcgcaatgacgcccaagggcggcgacctgcgggtctacatcgccaccggcaagctcgacctgggcgacgtcaagctcggcgacagcatcgcggtcaacggcgtctgcctgaccgcagtggaactgcccggcgatggcttctgggccgacgtcagccgcgagagcctggcgcgcaccgccttccagcacctgaaggtgggcagccgggtgaacctggaaaaggccctgacgccgaccacccgcctcggcggacacctggtgagcggccacgtcgacggcgtcggcgaggtgctcaagcgcgaggagaacgcccgcgccatccagttcaccgtgcgtgccccgcgcgaactggccaggtacatcgcgcacaagggctcgatcaccgtcgacggcaccagcctcacggtgaacgcggtgaacggcgcggagttcgagctgaccatcgtcccgcatacgctcagcgaaaccatcatggccgagtaccagcccggacgccgggtcaacctcgaggtcgacctgctggcccgttacctggagcgcctgctgcttggcgacaaggccgccgagcccagcgcctccggcatcagcgaagcgtttctcgccgagaacggttttctcaagtaa

SEQ ID NO: 7876 - DNA, 1122 bp, Pseudomonas aeruginosa
  CDS (1)...(1122)
atgaacgccgccgacccgctgtacatggcccgcgccctggaactggcgcgccaggggctgtactccacccagccgaatccgcgcgtcggctgcgtgctggtcaaggacggccaggtggtcggcgagggctggcacgtccgcgccggcgagccgcacgccgaggtccatgccctgcgccaggccggcgagaatgcacgcggcgccaccgcctacgtgaccctcgagccctgcagccacttcggccgcaccccgccgtgcgccgatgcgctggtgggcgccggggtggcgcgggtggtcgcggcgatgcaggatcccaaccccgaggtcgccggtcgcggcctgctgcgtctgatgcaggccggcatcgcggtgcagagcggcgtcctcgaagccgaggcgcgggaactcaacatcggtttcatcaagcgcatggaacatggcctgccgttcgtccgggtcaagctggcgatgagcctggacgggcgcaccgccatggccagcggggaaagccagtggatcaccgggccctccgcgcgttcggcggtgcagcgcttgcgcgctcgctccagcgtggtgttgtccggcgccgatacgctgctggcggacgatgcgcggctcaacgtacgccccgacgaactgggcctgaacgccgagcttaccgcgctcgccgcggctcgccagccgttgcgggtgctggtcgacgggcgcctgcgggtgccgctggagtcggcgttctaccaggccggtccggcgctggtggcgacctgcgccgccgcctcggcgcgcgaacgcttccaggacgccggccacgaactgctggcgctgccctccgccgagggccacgtcgatttgcacaagctgctcctggaactggcggcgcgcggcgccaacgaagtgctggtggaggccggcccgcgtctggccggcgccttcgcccggctggggctggtggatgagtaccggctgttcgtcgcgccgaagttcctcggctccagcgcccgtcctttgctcgattggccgctggcgcggatggccgatgcggcgcagttgcggatcgacgacatccgcgcggtgggcgacgactggctggtcaccgcgcggccccatctgcgggacgcctga

SEQ ID NO: 7877 - DNA, 1059 bp, Pseudomonas aeruginosa
  CDS (1)...(1059)
atgaaagcactgcgctggcacgccgcccgcgacctccgcctgagcgaactggaacgccaggcgccgcggcccggcgaagtcgaactggaagtcgcctactgcggcatctgcggcagcgacctgcacgaataccagagcggcccgcactcgattccccaggccgaggcgcacccgctgtccggttgccgcgcgccgctgaccctcggccatgagttctgcggcgtggtcgccgcgctcggccctggcgtggagggaccgcgcatcggcgaccgcgtcgcggtggagccggaataccgctgcggcgaatgccgctactgccgggaaggccgctacaacctctgcgagtcgatgggcttcatcggcctgatgggcgacggcggcttcgccgagcgcgcgcgggtgccggcctacatgctgcaccgcctgccggacgcggtgggcttccgccaggccgccgtgctcgaaccggccgccgtggccctgcacgcgctgcgccgcagcagcctggcgccgggccagcgctgcgcggtgttcgggcttggcccgatcggtctgctgctggtgatgctcgcccgcctgcgcggaatcgaggacatcgccgcggtcgacgtcagtcccgagcgcctcgccctagccggcgaattcggcgccagccgggcgctcgacgcccgtgacggcgacacggcggcgcgcctgcgcgaaggcggcgcgctcgattgcgccttcgaggccgccggcagccaggccagcctcgacgccgccctggccagcctgcgcaagggtggcgagctggtgctggtgagcctgatgggcgaggtcaggctggacgccttcgacctggtcaaccgcgaactgcgcctgctcggcagcgtcggctaccgcgacgcctacccggagctgatcgccctgctcgccgatggccgcctcgacctggcccgcgcagtgacccgcagcgtgcccctggagcaggccgtcgagcacggtttcgaggccctgctgcgcgacaaatcgcagctcaaggtgctggtcaatcccaacccggccctggccgacgcctga

SEQ ID NO: 7878 - DNA, 780 bp, Pseudomonas aeruginosa
  CDS (1)...(780)
atgaaacacgcacgcatccgctaccagggccgggttcaccaggtcaccgtggaagacgccaacgccgtccgcctggccgacggcaccctgctcgccgaggaccgggtggagtggctgccgccggccaccgggagcatgttcgccctcggcctgaactacgccgaccatgccgccgaactgtcgttcaaggcgcccagcgaaccgctggcgttcctcaagtcgccgggcacctacaccggccaccgccaggtcagctggcgtccggacaacgtcgactacatgcactacgagtgcgaactggtggcggtgatcggcaagccggcgcgcaacgtccgccgcgaggacgccctcggctacctggccggctacacggtgtgcaacgactacgcgatccgcgactacctggagaactactaccggcccaacctgcgggtgaagaaccgcgacgccaccaccccggtggggccgtggatcgtcgacgcggccgaggttcccgagccgaaccggctgaccctgcgcacctgggtcaacggcgagctgcgccaggaaggcagcaccgcggacatgatcttcgacattccctacctgatcgaatacttctccagcttcatgaccctgcagccgggcgacatgatcgccaccggcaccccggaaggcctgtccgacgtggtccccggcgacgaagtggtggtggaggtggagggcgtcggtcgcctggtcaaccgaatcgtcagcgaggccgaattcttccgcgcccgcgcacaggagcacgcagaatga

SEQ ID NO: 7879 - DNA, 807 bp, Pseudomonas aeruginosa
  CDS (1)...(807)
atggacctgcccgtcaatcgcttcaagcaacgcctgcgcagcggcgaggcgcagatcggcctgtggctcggcctggccgatccctactgcgcggagctggccgccaacgccggcttcgactggctgctgctggacggcgagcacgcgcccaacgacctgcgcagcctgctcggccagttgcaggcgctggcgccctaccccggccagccggtgatccgcccggtgcagggcgacactgcgctgatcaagcaattgctcgacatcggcgcgcagaccctgctggtaccgatggtcgacagcgccgcccaggccgaagggctggtgcgcgccgtgcgctatccgccggcgggcgtacgcggggtcggcagtgcgctggcccgggcctcgcgctggaacagcgtggcggagtacctgaaccacgccgacgagcagatgtgcctgctggtccaggtggaaaacctggagggcctggccaacctcgacgcgatcgccgccgtcgagggcgtcgacggcgtgttcatcggtccggccgacctcagcgcagccatgggccatcgcggcaatccaggccatcccgaggtgcaggcggccatagaggacgccatccaccgcatccgcacggccggcaaggccgccggcatcctctccgccgacgagacactggcgcggcgctacctggagctgggctgcgcgttcgtcgcggtgggcgtggacaccagcctgctgatgcgttcgctgcgcgagctggcggggcgcttcaagggcggcgcgccggcgccgtccgccagttcctcggtctacggctga

SEQ ID NO: 7880 - DNA, 1239 bp, Pseudomonas aeruginosa
  CDS (1)...(1239)
gtgtccgtcccgacccatcagcaagacctgatcgccctgctcgaagagcgtggcttcgtccaccagtgcaccgaccgcgacggcctcgccgcgcacctggccgccggtccggcaaccgcctacctgggcttcgacgccaccgccgacagcctgcacgtcggccacctacagggcctgatgctgatgcgctggctacagaaggccgggcaccgcccgttgctgctgatcggtggcgcgaccacccggatcggcgatccgagcttccgcgattcgagccggccgatcctcaccgaggcgcagatccaggccaacatcgacggcatcgcccgggttttctcgcgctacgtcgaactgcacgacgacagcctggtgaacaacgccgaatggctggacggcgtcggctacctggagttcctcgaccgggtcggccggcacttctcgatcaaccgcctgctgaccttcgacgccatcaggcagcgcctggaccgcgagcattcgctgtcgttcctcgagttcggctacaccctgctgcaggcctacgatttcgtcgaactgtcgcgccggcgcggctgcaccctgcaactcggcggcgccgaccagtgggcgaacatcatcaacggcgtggagctgtcgcgacgccagggcggcgcccagctgttcggcctgaccatgccgctgctggccaccagtgacgggcgcaagatgggcaagtcggcgcagggtgcggtatggctcaacgccgagcgcctggcgccgttcgacttctggcagttctggcgcaactgcgatgatcgcgacgtcggtcgcttcctcgccctgttcagcgaactgccgatggatgaggtgcgccgcctgggcgccttgcagggcgccgagctgaacgaagcgaaggtggtcctggccaatgccgccaccgccctggcgcacggcgagcacgccgcgcgatccgccgccgatgccgcgcgcggggtgttcgccgacggtacgcgggacagcggcctgccggtgatgaagctatcccgcgcgcgcctggcgcagggactgtcgctgaccgacctgctgctggaacacgcgatccagccctcccgcagcgcggtccgccgcctcgccgccggcggcggcctgcgcctggacggcacgccggtcagcgatccggacacgccgctggcgggcgaggtcgacgggctgcgcttgagcctgggcaagaagcagcatttgcacctgcgactcgaggattga

SEQ ID NO: 7881 - DNA, 1092 bp, Pseudomonas aeruginosa
  CDS (1)...(1092)
atgaacagttccccgcaagccaacgcggcgatgcgcgccgccgtctggcacggccgccacgatatccgcgtggaagacgtgccgctcccggccgagccgccgcccggctgggtgcagatccgcgtgcactggtgcggcatctgcggctccgacctgcacgaatacctggccggcccggtattcatccccgtggaggcgccgcacccgctcaccggcctcaaggatcaatgcatcctcggccacgagttcagcggcgaaatcgtccgcctcggcaacggcgtgaccggcttcgccgtcggccaggcggtcgccgcagacgcctgccagcattgcggcacctgctactactgccggcatgggctgtacaacatctgcgagaacctggccttcaccgggctgatgaacaacggcgccttcgccgaatacgtcaacgtaccggccaacctgctctacgccctgccggccggatttcccagcgaggccggcgcgctgatcgagccgctggcggtgggcatgcacgcggtgaagaaggccggcagcctgctcgggcagaacgtggtggtggtcggcgccggcaccatcggcctgagcaccatcatgtgcgcgcgcgccgccggcgcggcacaggtgatcgccctggagatgtcctcggcgcgcaaggccaaggccctggaggtcggcgccagccaggtgctcgacccctcgcggtgcgacgccctaggcgaaatccgcgccctcaccggcgggcttggcgccgacgtcagcttcgaatgcatcggcaacaagcacaccgccaagctggccatcgatgccatccgcaaggccggcaaatgcgtgcttgtgggaatcttcgaggagcccagtgaattcaatttcttcgagctggtttccaccgagaagcagttgctcggggccctcgcctacaacggcgagttcgccgacgtgatcgccttcatagccgacggccgcctcgacatcgcaccgctggtgaccggtcgcatcggcctggaagaaatcgtcgagcgcggtttcgaagagttggtgaacaacaaggagcacaacgtgaagatcatcgtctcgccgggcggctga

SEQ ID NO: 7882 - DNA, 1023 bp, Pseudomonas aeruginosa
  CDS (1)...(1023)
atgcaagcgtccccgatgcgccgccggcgcctgcgcgcctggggcctgctcgccggcgcgctgctgctcgcgctggcggccctggccagcctggcgctgggctcgcggccggtgcccctggcggtcaccctggatgccctgcaagccgtcgatccgcacgatgatcgccacctggtggtacgcgaactgcgcctgccgcgcaccctggtggcgctgctggccggtgcggcactgggagtggccggcgcgctgatgcaggcgctgacgcgcaatccgctggccgaacccggcctgctgggaatcaacgccggcgcggcgctggcggtgatcgtcggggtcgcgctgttcgacctggcgagcatgggccagtacctcggttgcgccttcctcggcgccggcctggccggcatcgccgtattccttctcggccaggcccgcgagaccggcaccaacccggtgcgcctggtgctggcgggtgccggcttgtcggtgatgctcgcctcgctgaccgggatcatcgtgctgaacgccccgccggaagtcttcgaccgcttccgccactgggccgccggctcgctttccggcagcggcttcgccctgctcggatggccgggcctggccatcggcgccgggctggccgccgccttcgccctcgccgccaggctcaatgccctggccctgggccaggagattggccaggcgctcggcgtcgacctgcgcctgacctggttgctcgcctgcctggcggtgatgctgctggccggcgcggcgaccgccctggccgggccgatcgccttcgtcggcctggtcgccccgcacctcgcgcgactgctggccggaccggaccagcgctggatcctgcctttctcggcgctgatcgccgccggcctgctgctcggcgccgacatcctcgggcggctgctggcggcgccgacggagatcgccgccggaatcgtcgctttgctgctcggcggaccggccttcatcgtcctggtcaggcgcttccgcctgagccgcctgtga

SEQ ID NO: 7883 - DNA, 819 bp, Pseudomonas aeruginosa
  CDS (1)...(819)
atgtcgtccaccatccaccccctcccgtccttcggtctcggcaccttccgccttactggccaggtcgtcgtcgactcggtgcgcagcgccctcgaactgggctatcgcgccatcgataccgcgcagatctacggcaacgaggcggatatcggccgcgcgatcgccgagagcggcgtaccgcgttccgagctgttcctcaccaccaaggtctgggtcgacaactacgcccgcgaaaagctgctcgccagcctgcgcgagagtctggagaaactgcgcaccgaccggttggacctggtcctgatccattggccggcacccggcaacggcgtcgagctgggggagtacatggcggcgctggcggaagccaagtccctgggcctgacccggcggatcggcgtctccaacttcaacatcgaactgacccgccaggccatcgccgcggtcggtgcgggcgagatatccaccaaccagatcgaactcagcccttacttgcagaaccgcgcgctgaccgcctacctcgaggagcagggcatcgcggtcacctcgtacatgaccctggcctacggcaaggtgctgaaggacccgacgctggccgggatagccgccaggcaccgggccacggtcgcccaggtggcgctggcctgggcgatgcaactgggctacgcggtgattccgtcctcgacccgccgcgagaacctcgccagcaacctgctggcgcgcgacctgcgcctggacgccgaggacatggcgcgcatcgccggcctcgagcgtaacggccgcgaggtcagtccgcagggcctggcgccggcctgggactga

SEQ ID NO: 7884 - DNA, 1644 bp, Pseudomonas aeruginosa
  CDS (1)...(1644)
atggccaaggcagccgatgtggttgtgcaatgcctggaaaacgagggcgtgcagtacgtcttcggaattcccggcgaggagaatctcgacctgctggagtccctgcgcaagtcgcagatccggctggtgctcacccgccacgaacaatcggccggcttcatggccgccacctatgggcgcctcaccggcaagaccggggtcagcctgtcgaccctcggcccaggcgccaccaacctggtgaccgccggcgcctacgcctacctgggcggcatgccgatgctgatgatcaccgggcagaagccgatcaagaagtccaagcagggccgcttccagatcctcgacgtggtcggcatgatgcagccgctgaccaagtacacccaccaactggcctccgccgacaacattccctcgcgggtccgcgaggcgttccgcctggccgaggaagagaagcccggcgcggtgcacctggagctgccggaggacatcgccgccgagcagaccgacagcctgcccatcccgccgagcctgagccgccggccgctggcggaatacaaggcgatctgcgccgcggtggagaagctgcgcgccgcgcgcagcccgatcctggtgatcggcgccggggccaaccgcaagatgaccgccaaggtcctcaagcaactgatcgacaagaccggcattcccttcgtcaccacccagatgggcaagggcgtggtcgacgagcgtcacccgcgcttcctcggcaacgccgcgctgtccgccggcgacttcgtgcatcgcgcggtggaggcggccgacctgatcgtcaacgtcggccacgacgtgatcgagaagccgccgttcttcatggttcgcggcggtaccgaggtgatccacgtgaacttccgttccgccgaggtggacccggtgtatttcccgcagatcgaagtggtgggcgacatcgccaacgccatctggcagatcggcgaggcgctggacgataccgcgcactgggacttcacccgcctgctggcgatccgcgaggccaacgaggcgcaggtcgccgaaggcgccgacgacccgcgcttcccgctctacccgcagcgcctggtggccgacgtgcgccgggcgttgccgtcgcagggaatcgtcgccctggacaacggcatgtacaagatctggttcgcccgcaactacaaggcacacatgcccaacaccgtgctgctggacaacgccctcgccaccatgggcgccggcctgccctcggcgatggccgcgcacctggtctacccggaccggccgatcgtcgcggtgtgcggcgatggcggcttcatgatgaacagccaggaactggaaaccgcggtgcggctgaagatgaacctgacggtgatcatcctgcgcgacaacggctacgggatgatccgctggaagcaatcgaacatgggcttcgccgacttcgggctggactacggcaacccggacttcgtgcactacgccgaggcctacggcgcccacggccaccgggtcgacagcgccgagggcttcctgccgctgctggagcgctgcctgggcacgcccggggtgcatgtgatcgattgcccggtggattactcggagaacgaccgcatcctcaacgtcgagttgcgcgaacgcgccctggcggtctga

SEQ ID NO: 7885 - DNA, 1041 bp, Pseudomonas aeruginosa
  CDS (1)...(1041)
atgggacaggacaagttgaaggtcgccgttctcttcggcggcagcagtgaggaacgggacgtctccatcgccagcggcgcgcaggtgatccaggctttgcgcagcgccggccaccaggtgctggcggtggataccgccagcggcctgctcggcgcggaggaagagcgccgcctgctggcgagcaaggtcaaggaggtcccgccggactccgactcgctggcgatcatccgcagcggcaagcagagcctgctgagcgccggcgaactggctggggtcgacgtgttcttcctcgccctgcacggcggcaccggcgaggacggcaccctgcaggcgctgctggatgccggtggtttcgcctataccggcagcggccacctggccagcgccatggcgatggacaaggacgtggccaagcgcctgttcctcgccgccggggtggagaccgccagttggctgatggcgccggcctcggaagaggaggtgcgcgagcaactgggcttccccctggtggtcaagccgaacagccagggctccaccgtggggctgtccatcgtgcattcccaggccgaattgcagccggccatcgagctggccgggcgctatggcgacgaggtgatgctggagcgcttcgtcgccggccgcgaggtcaccgtcggggtgctcgacgaccaggcgctgccggtgggcgagattctcctcggcggccaggaggtcttcgactacgagcacaagtaccaggccggcgcggtgcgcgaggtgtttcccgccgacctgccgccggcgatcgccgccgaggcccagcgtctggcgctgaaggtacaccgggcgctgaagctgagcggctacagccgcaccgacttccgcctcgacgaacagggccggctctggtgcctggaggtcaataccctgccgggcatgaccgccaccagcctgctgccgcaggccgcggcggcggccgggatcggtttcgccgaactctgcgagcggatctgccggctcggcatcgagcgctgcaagggcgcgcgcaaggcgcgttcctga

SEQ ID NO: 7886 - DNA, 1056 bp, Pseudomonas aeruginosa
  CDS (1)...(1056)
atgactgaccgcttcacgcgcctgctcggtatccagcagccgatcatccaggcacccatgctcggcgtctccacgccggcgctggccgccgccgtatccaacgccggcgggctcggttcgatcgccatcaccggtagcgccgccgagaagggccgggcgctgatccgcgaggtgcgcgggctgaccgacaagccgttcaacgtcaatctgttctgccaccgcccgggtcaggccgacccggcccgcgagcgcgcctggctggactacctgaagccgctgttcgccgagttcggcgccgagccgccggtgcggctgaagaacatctacctgagtttcctcgaagacccgaccctgctgccgatgctgctggaagagcggccggcggcggtcagcttccatttcggcgcgccgccccgcgaccaggttcgcgcgttgcaggcggtgggcatccgcgtactggtctgtgccaccacgccggaggaagcagccctggtggaggccgccggcgccgatgcggtggtcgcccagggcatcgaggccggtggccatcgcggggtgttcgagccggagcgcggcgacgccgccatcggcaccctggcgctggtccgcctgctggcggcgcgcggttcgctaccggtggtggctgccggcgggatcatggacggacggggcatccgcgccgccctggagctgggcgcgagcgccgtgcagatgggcaccgccttcgtcctctgtccggagtcctcggccaacgccgcctaccgcgaggcgctgaaggggccgcgcgcggcgcgcaccgcgctgaccgtgaccatgtccgggcgcagcgcccgcggcctgcccaaccggatgttcttcgatgccgccgcgcctggagtgccgcccttgccggactatccgttcgtctacgacgcgaccaaagcgttgcagaccgccgctctggctcgcggcaaccatgatttcgccgcccagtgggccggccagggcgcggcgctggcgcgggagctgccggccgccgaactgctgcgcacgctggtcgaggaactgcgcggctga

SEQ ID NO: 7887 - DNA, 498 bp, Pseudomonas aeruginosa
  CDS (1)...(498)
atggcccgtggggttaacaaagtcattctggttggtaacgtcggtggtgacccggaaacccgctacatgcccaacggcaatgcggtgaccaacatcaccctcgccaccagcgagagctggaaggacaagcagaccggccagcaacaggagcgcaccgaatggcaccgcgtggtgttcttcggccgcctggcggagatcgccggcgagtacctgcgcaagggttcccaggtctacgtcgaaggcagcctgcgcacccgcaagtggcagggccaggacggtcaggatcgctacaccaccgagatcgtggtcgacatcaacggcaacatgcagttgctcggcggccgcccctccggcgacgattcgcagcgcgccccgcgcgagcccatgcagcgcccgcagcaggccccgcagcagcagtcgcgtccggccccgcagcagcaaccggcgccgcaaccggcccaggactacgacagcttcgacgacgacattccgttctaa

SEQ ID NO: 7888 - DNA, 2838 bp, Pseudomonas aeruginosa
  CDS (1)...(2838)
gtggataagatcctgattcgtggggcgcgtacccacaacctgaagaacgtcgacctcacactgccacgcgacaaactgatcgtgatcaccggtctttccggttccggcaagtcttccctggctttcgacacgctctatgcggaaggccagcggcgctacgtggaatccctctcggcctacgcccggcagttcctgtcgatgatggagaagccggacgtggacaccatcgaagggctgtcgccggcgatttccatcgaacagaagtccacttcccacaacccacgctccaccgtgggtacgatcaccgagatctacgactacctgcgcctgctttatgcccgcgtcggtaccccgcgctgcccggaccacgacatcccgctggaggcgcagaccgtcagccagatggtcgaccaggtcctggccctgccggaaggcagcaagctgatgctgctggcgccggtgatccgcgagcgcaagggcgagcacctggcggtgttcgacgagatgcgcgcgcagggcttcgtccgcgcccgggtcgacggcaagctctacgaactcgacgaagtgccgaaactggataagcagaagaagcacagcatcgatgtggtggtggaccgcttcaaggttcgcgcggacctccagcaacgcctggccgagtcgttcgagaccgccctgtccctggccgacggtatcgccctggtagcaccgatggacgaggacgaggatgtcgaggagatcatcttctcggcgcgcttcgcctgcccggtctgcggccactctatcagcgagctggaacccaagctgttctccttcaacaacccggccggcgcctgtccgacctgcgacggcctcggcgtgaagcaattcttcgacgcgcgccgggtggtcaacggcgagttgaccctggccgagggcgcgatccgcggctgggaccggcgcaacgtctattacttccagatgctcggttcgctggcccagcattacggcttcagcctggaagaacccttcgacgaactcggcgccgagcaccagaaggtggtgctctacggctccggccgggaaaacgtcgacttccgctatctcaacgaccgcggcgacatcgtcaagcgttcgcatcccttcgaaggcatcctgccgaacctggagcggcgctaccgcgagaccgagtcggccacggtccgcgaggagctggccaagttcctcagcacccagccctgcccggattgccacggtacccgcctgcgccgcgaggcgcggcatgtgtgggtcggcgaccggacgctgccggcgatcaccgcgatgccggtcggcgaagcctgcgagtatgccgccggactcagcctgaccggccgccgtggcgagatcgcggcgaagatcctcaaggaaatccgcgaccgcctgcaattcctggtcaacgtcggcctcgactacctgaccctcgaccgcagcgccgacaccctgtccggcggcgaagcccagcgcatccgcctggccagccagatcggcgccggcctggtgggagtgatgtacatcctcgacgaaccctcgatcggcctgcaccaacgcgacaacgagcgcctgctcggcaccctcacccacctgcgcaacctcggcaacacggtgatcgtggtcgagcacgacgaggacgcgatccgactcgccgactacgtcgtcgacatcggtccgggcgccggcgtgcacggcggccaggtagtggcggaaggtacgcccgaccaggtgatgaaccaccccgactcgctgaccggcaagtacctttccgggcgcaagaaaatcgcggttccggccaagcgcaccccgcgcgacaagaagaagctgctgaagctgaaaggcgcccggggcaacaacctgcagaacgtcaacctggaaatcccggtcggcctgttcacctgcatcaccggggtctcgggctccggcaagtcgacgctgatcaacaacaccctgttcccgatcaccgccaccgcgctgaacggcgcgactaccctggaagtggcgccgtatgactcgttcgacggcctgcagcacctggacaaggtggtcgacatcgaccagagcccgatcggtcgtaccccgcgctccaacccggcgacctataccggcctgttcacgccgatccgcgaactgttctccggcgtgccggaggcccgctcgcgcggctacggtcccggccgcttctcgttcaacgtcaagggcggccgttgcgaggcctgccagggcgacggcgtgatcaaggtggagatgcacttcctgccggacatctacgttccctgcgatgtctgcaagggcaagcgctacaaccgcgagaccctggagatccgctacaagggcaagagcatccacgaggtgctggagatgaccatcgaggaagcccgcgagttcttcgacgccgtccccgccctggcgcgcaagctgcagacgctgatggacgtcggcctgtcctacatcaagctgggccagagcgcgaccaccctctcgggcggcgaggcgcaacgggtcaagctgtcccgcgagctgtccaagcgcgataccggcaagaccctgtacatcctcgacgaaccgaccaccggcctgcatttcgccgacatccagcaactgctcgacgtgctccaccgcctgcgcgaccacggcaacaccgtggtggtgatcgagcacaacctggacgtgatcaagaccgccgactggctggtcgacctcggccccgagggcggctccaagggtggccagatcatcgccaacggtacgccggagcaggtggccgagatgccccagtcgcacaccggccacttcctcaagccgttgctggaacgcgatcgcgcctga

SEQ ID NO: 7889 - DNA, 1002 bp, Pseudomonas aeruginosa
  CDS (1)...(1002)
atgcagagttcggtaaatgagttcctgaccccccgccacatcgatgtgcaggtggtcagtcaaacccgcgccaagatcacgctcgagcctctcgagcgtggttttggtcacaccctgggcaacgcgctgcgtcgcatcctgttgtcctccatgcctggctgcgcagtggtcgaggccgagatcgacggcgtactccacgagtactcggcgatcgaaggtgtgcaggaagatgtaatcgagatcctgctgaacctgaaaggtctggccatcaagctgcacggtcgtgatgaagtgacgctgaccctggctaagaagggctcgggtgttgtgactgctgccgatattcagctggatcacgatgttgagatcatcaacggtgaccacgttatcgccaacctggcagacaacggcgcgctgaacatgaagctgaaggtagctcgtggccgtggctacgagcctgccgacgcacgtcagagcgatgaagacgaaagccgcagcatcggccgtctgcagctcgacgcatcgttcagcccggtccgtcgtgtctcctacgtggtggaaaacgcccgtgtcgagcagcgcaccaacctggacaaactggtcctggacctggaaaccaacggcactctggatcccgaagaggctatccgtcgcgccgctaccatcctgcaacagcagctggcagcgttcgtggacctcaagggcgacagcgaacccgtcgttgaagagcaggaagacgagatcgatccgatcctcctgcgcccggtcgatgacctggaactgaccgtacgttcggccaactgcctgaaggcggaaaacatctactacatcggtgacctgatccagcgcaccgaagtggaactgttgaaaacgccgaacctgggcaagaagtccctgaccgaaatcaaggacgttctggcttcccgtggtctgtccctcggtatgcgcctcgataactggccgccggcaagtcttaagaaagacgacaaggccactgcctga

SEQ ID NO: 7890 - DNA, 621 bp, Pseudomonas aeruginosa
  CDS (1)...(621)
atggctcgttacattggtcccaagtgcaaactgtctcgccgtgaaggcaccgacctgttcctgaagagcggcgcccgcgccctcgactcgaagtgcaaggctgaaaacgttcctggccagcatggccagcgtcgtggccgtctgtccgactacggtctgcagctgcgtgaaaagcagaaagtacgtcgcatctacggcgtgctggagcgtcagttccgcggttactaccaggaagcttcccgtcgcaagggttctaccggtgagaacctgctgcaactgctcgagtgccgcctggacaacgtcgtataccgcatgggcttcggttccactcgttcggaatcccgccagctggtatcccacaaggccatcaccgtcaacggtcagaccgtcaacatcccttcctaccaagtgaaggccggtgacgtcgtagctgttcgcgaaaaatcgaagaaccagctgcgtatcgctcaggctctggaactctgtggccagcgcggtcgcgtcgagtgggtcgaagtcgacctcgacaagaaggctggtaccttcaagagtgctccggctcgcagcgacctgtccgctgatatcaacgaaaacctgattgtcgagctctactccaagtaa

SEQ ID NO: 7891 - DNA, 390 bp, Pseudomonas aeruginosa
  CDS (1)...(390)
atggcaaaacctgctgctcgtccccgtaagaaagtcaaaaagacagtggtcgatgggatcgcccacatccacgcgtctttcaacaacaccatcgtgaccatcaccgaccgtcagggcaacgcactgtcctgggcgacctccggtggttccggtttccgcggctcgcgtaagagcaccccgttcgctgcccaggtagcggccgagcgtgccggccaggctgccctggaatacggtctgaagaacctggacgtcaacgtcaagggcccgggcccgggccgcgagtccgccgttcgcgctctgaatgcttgcggctacaagatcgccagcatcaccgacgtaaccccgatcccgcataacggctgccgtccgccgaaaaagcgtcgcgtgtaa

SEQ ID NO: 7892 - DNA, 357 bp, Pseudomonas aeruginosa
  CDS (1)...(357)
atggcccgtattgcaggcgtcaacattccggataacaagcacactgttatctcgctgacctacatctatggtgttggtcgcactactgctcagagcatctgcgcagccaccggcgtaaacccggctgccaagatcaaggacctgagcgacgagcagatcgatcagctgcgtaacgaagtcgcgaagatcaccaccgaaggtgacctgcgtcgcgaaatcaacatgaacatcaagcgtctgatggacctcggttgctaccgcggtctgcgtcatcgtcgcggtctgccggttcgcggtcagcgtaccaagaccaacgcgcgtacccgcaagggcccgcgtaagccgatccgcaagtaa

SEQ ID NO: 7893 - DNA, 1329 bp, Pseudomonas aeruginosa
  CDS (1)...(1329)
atggctaagcaaggtgctctctctgcgctaagcaacggcggtctgtccgagctctgggcacgtctgcgtttcctgttcctggcgatcatcgtctatcggatcggcgcgcacatcccagttccgggcatcaaccccgatcgcttggcggcactgttccggcagaacgaggggaccattcttagcctcttcaacatgttttccggcggcgcgctggagcgcatgagtatctttgcactggggatcatgccgtacatctcggcatcgatcatcatgcagctcatgaccgctatcagcccgcagctggagcagttgaagaaagagggtgagtctgggcgtcgcaagatcagccagtacacccgctacggtactgtagtcctggcactggtccaggccatcggcatgtccgttggcctgggcagccagggcgtagccttctccaacgacttcggcttctacttcgtggctgtcaccaccttcgtggctggtgccatgttcatgatgtggctgggcgagcagatcaccgagcgcggtgtcggcaacggcatctcgatgttgatcttcgctggtatcgttgcaggcctgccgcgcgccatcggtcagtctttcgagtctgcccgtcaaggtgacatcaacatcttcgccctgatcggcgtcggcctgctggccgtggcgatcatcgcgttcgtggtgttcatcgagcgtggccagcgtcgcatcgcggtgcattacgccaagcgccagcaaggccgcaaggtgtttgcagcgcagaccagccatctgccgttgaaggtgaacatggcgggtgtgattcccgcgattttcgccagcagtatcctgctgttcccggcgtccctgggctcctggttcggtcagtcggaaggcttgggttggttgcaggacgtcgcgcaagcgatcgctccggggcagccgctgaacatcttgctgttcactgcagggatcgttttcttctgcttcttctatacagcgctgatgttcaacccgaaggacgtggcggagaacctcaagaagtccggtgcatttattccgggcatccgtccgggcgaacagtccgctcgctacatcgatggcgtgctgacccgtttgaccatgttcggtgctctgtacatgacggctgtctgcctgctgccccagttcctggtggttgcggcgcacgtgccgttctatcttggcgggacctcgctgttgatcgtggtcgtggttgtcatggactttatggcccaggtgcaatctcacctcgtttctcaccagtatgaatccctgatgaagaaagccaacctgaagggctacggcagcggcatgctgcgctga

SEQ ID NO: 7894 - DNA, 192 bp, Pseudomonas aeruginosa
  CDS (1)...(192)
atgaaagcgaatgaacttcgtgaaaaatccgttgagcagctgaacgagcaactgctcggcctgctgcgcgaccagttcaatctgcgcatgcagaaagcaactggccagttggggcagtctcacctgctctcgcaggttaagcgcgacatcgctcgcgttaaaactgtgctcaatcagcaagcaggtaagtga

SEQ ID NO: 7895 - DNA, 822 bp, Pseudomonas aeruginosa
  CDS (1)...(822)
atggcaatcgttaagtgcaaaccgacttccgctggtcgtcgctttgtcgtcaaggtggtgaatcaggagctgcacaaaggcgctccctacgcaccgctgctggaaaagaaatccaagtctggcggccgtaacaacaacggtcgtatcaccacccgtcatatcggtggtggtcacaagcagcactaccgtctggtcgacttccgtcgcaacaaggatggcatccctgccatcgttgagcgcgtcgaatacgatccgaaccgcactgcacacatcgctctgctgaagtatgcagacggcgagcgtcgctacatcatcgcccccaagggcgttgctgcaggtgaccagctgatctccggtatcggtgcgccgatcaaggcaggcaacagcatgcctctgcgcaacatcccggtgggtagcactgttcatggtatcgagctgaagccgggtaaaggcgctcagatcgctcgctccgctggcgcttccgcccagctggtcgcgcgtgaaggtgcgtacgtaaccctgcgtctgcgctccggtgaaatgcgtaaagtcctggctgagtgccgtgcgaccctgggcgaagtctcgaactccgagcacagcctgcgttcgctgggtaaagccggtgctacgcgctggcgtggtgttcgcccgaccgttcgcggcgtggcgatgaacccggtcgaccacccgcatggtggtggtgaaggccgtacctctgctggtcgtcatccggtatcgccgtggggtcttcagaccaagggtaagaagactcgctcgaacaagcgtaccgataacatgatcgtccgccgccgcaagtaa

SEQ ID NO: 7896 - DNA, 300 bp, Pseudomonas aeruginosa
  CDS (1)...(300)
atgaaccaggaacgcgtattcaaagtgctgcttggtccgcacatctccgagaaagccacgggtctcgcggacggcaagagccaattcgttttcaaggttgccaccgatgcaaccaagctggaaatcaagaaggccgtagaaagcctgttcagcgtgaaggtacagcgcgtcactaccctgaacgtcaagggtaagaccaagcgcaccgctcgcggtctgggcaagcgtaacgactggaaaaaagcgtacatcgctctccagccgggccaagatctcgatttcgccaccagcgctgagtaa

SEQ ID NO: 7897 - DNA, 1194 bp, Pseudomonas aeruginosa
  CDS (1)...(1194)
gtggctaaggaaaaattcgaacgtaacaaaccgcacgtcaacgtcggcaccatcggtcacgttgaccatggcaagaccactctgaccgctgcactgaccaaggtctgctccgatacctggggtggttccgctcgtgctttcgatcagatcgacaacgcgccggaagaaaaggcccgcggtatcaccatcaacacctcgcacgttgaatacgattccgctgttcgtcactacgcccacgttgactgccccggtcacgccgactacgtgaagaacatgatcaccggtgctgcccagatggacggcgcgatcctggtttgctcggctgccgacggccccatgccgcagacccgcgagcacatcctgctgtcccgccaggtaggcgttccctacatcgtcgtgttcctgaacaaggccgacatggtcgacgacgccgagctgctggaactggtcgagatggaagttcgcgatctgctgaacacctacgacttcccgggcgacgacactccgatcatcatcggttccgcgctgatggcgctggaaggcaaggatgacaacggcatcggcgtaagcgccgtgcagaagctggtagagaccctggactcctacattccggagccggttcgtgccatcgaccagccgttcctgatgccgatcgaagacgtgttctcgatctccggccgcggtaccgtggtaaccggtcgtgtagagcgcggcatcatcaaggtccaggaagaagtggaaatcgtcggcatcaaggcgaccaccaagactacctgcaccggcgttgaaatgttccgcaagctgctcgacgaaggtcgtgctggtgagaacgttggtatcctgctgcgtggcaccaagcgtgaagacgtagagcgtggccaggtactggccaagccgggcaccatcaagccgcacaccaagttcgagtgcgaagtgtacgtgctgtccaaggaagaaggtggtcgtcacaccccgttcttcaagggctaccgtccgcagttctacttccgtaccaccgatgtgaccggtaactgcgaactgccggaaggcgtagagatggtaatgccgggcgacaacatcaagatggttgtcaccctgatcgctccgatcgccatggaagatggcctgcgcttcgcgatccgcgaaggcggccgtaccgttggcgccggcgtggttgccaagatcatcgagtaa

SEQ ID NO: 7898 - DNA, 471 bp, Pseudomonas aeruginosa
  CDS (1)...(471)
atgccaagacgtcgtgtagcggccaagcgtgaagtgctggctgatccgaaatacggaagccagatcctggccaagttcatgaaccacgtgatggaaagcggcaagaaagccgttgccgagcgtatcgtttacggtgcgctggacaaggtgaaggaacgcggcaaggccgatcccctggaaaccttcgaaaaagctctcgatgccatcgctccgctggtcgaagtgaagtcccgccgcgtaggtggtgcgacttaccaggttccggtcgaagtccgtccgtcccgtcgtaatgccctggccatgcgttggctggtggacttcgcccgcaagcgtggcgagaagtccatggctctgcgcctggctggcgagctgctggatgccgctgaaggcaagggcgcagcagtcaagaagcgtgaagacgtgcaccgtatggcagaggccaacaaggccttctcgcactaccggttctaa

SEQ ID NO: 7899 - DNA, 4074 bp, Pseudomonas aeruginosa
  CDS (1)...(4074)
atggcttactcatacactgagaaaaaacgtatccgcaaggactttagcaagttgccggacgtcatggatgtgccgtatttgctggccatccagctggattcctatcgcgaattcctgcaggctggcgcaaccaaggagcagttccgcgatgtcggtctgcacgcggccttcaagtccgttttcccgattatcagctattccggcaatgctgccctggaatacgtcggctaccgtctgggtgagccggcattcgatgtcaaggagtgcgtgctgcgcggcgtgaccttcgccgtaccgctgcgcgtgaaagttcgcctgatcatcttcgaccgcgagtcgtcgaacaaggcgatcaaggacatcaaggaacaagaagtctacatgggggaaatccccctgatgaccgagaacggtaccttcatcatcaacggtaccgagcgtgtcatcgtctcccagctgcaccgttccccgggcgtgttcttcgaccacgaccgtggcaagacccacagctccggcaagctgctgtactccgcgcggatcattccttaccgcggttcctggctggacttcgagttcgatccgaaggactgcgtgttcgtccgtatcgaccgtcgccgcaagctgccggcctcggtactgctgcgcgcgctcggctacagcacggaagagatcctcaacgccttctacgcgaccaacgtcttccacatcaagggcgagaccctgaacctggaactggtcccgcagcgcctgcgcggtgaagtcgcgagcatcgacatcaaggatggcagcggcaaggtgatcgtggagcaggggcgtcgtatcactgcccgccacatcaaccagctggaaaaggctggcgtgagccagctggaagtgccgttcgactacctgatcggccgtaccatcgccaaggcgatcgtgcatccggctaccggcgagatcatcgccgagtgcaacaccgagctgaccctcgacctcctggccaaggtggccaaggcccaggtcgtgcgcatcgagaccctgtacaccaacgacatcgactgcggtccgttcatctccgacaccctgaagatcgacaacaccagcaaccagctggaagccctggtcgagatctaccggatgatgcgtccgggcgagccgccgaccaaggaagctgccgagaccctgttcggcaacctgttcttcagcgccgagcgttacgacctgtcggccgtaggccggatgaagttcaaccgccgtatcggtcgtaccgagatcgaaggtccgggcgtcctgagcaaggaagacatcatcgatgtgctcaagaccctcgtcgacatccgtaacggcaagggcatcgtcgatgacatcgaccacctgggcaaccgtcgtgtccgttgcgtcggcgaaatggccgagaaccagttccgcgtgggcctggtgcgtgtcgagcgcgcggtcaaggaacgcctgtccatggccgaaagcgaaggcctgatgccgcaagacctgatcaacgccaagccggtggctgccgcgatcaaggagttcttcggttcgagccagctgtcgcagttcatggaccagaacaacccgctttccgagatcacccacaagcgccgcgtctccgcgctcggcccgggcggtctgacccgtgagcgtgcgggcttcgaggttcgtgacgtacacccgacccactacggccgcgtgtgcccgatcgaaacccctgaaggtccgaacatcggtctgatcaactccctggcgacctacgcccgcaccaacaagtacggcttcctcgagagcccgtaccgcgtggtcaaggacagcctggtaaccgacgagatcgtgttcctgtcggcgatcgaagaagccgaccacgtcatcgcccaggcttcggcgaccctcaacgagaagggtcaactggtggacgagctggtggccgtgcgtcacctgaacgaattcaccgtgaaggcgccggaagacgtgaccctgatggacgtgtcgccgaagcaggtcgtttccgtcgctgcctcgctgattccgttcctcgagcacgatgacgccaaccgcgcactcatgggctcgaacatgcagcgtcaggccgtgccgaccctgcgtgccgacaagccgctggtgggtaccggcatggagcgcaacgtggcgcgcgactccggcgtctgcgtcgtggctcgccgtggcggtgtgatcgactcggtcgatgccagccgtgtcgtggttcgcgtggcggatgacgaagtcgagaccggcgaagcgggtgtcgacatctacaacctgaccaagtacactcgttccaaccagaacacctgcatcaaccagcgtccgctggtgagcaagggtgacgtggtcgcgcgcggcgacatcctggccgacggtccgtccaccgacatgggcgaactggccctgggccagaacatgcgcgtagcgttcatgccctggaacggcttcaacttcgaagactccatctgcctgtccgagcgcgtggtccaggaagatcgtttcaccacgatccacatccaggaactgacctgcgtcgctcgtgacaccaagctcggcccagaggaaatcaccgcggacatcccgaacgtgggcgaggccgcgctgaacaagctggacgaagccggtatcgtctacgtcggcgccgaagtgcaggccggcgacatcctggtcggcaaggtcactccgaaaggcgagacccagctgactccggaagagaagctgctgcgcgcgatcttcggtgagaaggcgtccgacgtgaaggacacctccctgcgtgtgccgaccggcaccaagggtaccgtcatcgacgttcaggtcttcacccgcgacggcgtcgagcgcgattcccgcgcgctgtccatcgagaagatgcaactcgaccagatccgcaaggacctgaacgaagagttccgcatcgtcgaaggcgcgaccttcgagcgtctgcgtgccgccctggtcggtgccaaggctgaaggtggcccggcgctgaagaagggcacggagatcaccgacgactacctcgacggtctcgagcgcggccagtggttcaagctgcgcatggccgacgacgccctgaacgaacagctggagaaggcccaggcctacatcagcgatcgtcgccagctcctggacgacaagttcgaggacaagaagcgcaagctgcagcagggcgacgacctggctccgggcgtgctgaagatcgtcaaggtctacctggcgatcaagcgtcgcatccagccgggcgacaagatggccggccgtcacggtaacaagggtgtggtctcggtgatcatgccggtggaagacatgccgcacgatgccaacggcaccccggtcgacatcgtcctcaacccgctgggcgtaccgtcgcgtatgaacgtcggtcagatcctcgaaacccacctgggcctcgcggccaaggggctgggcgagaagatcaaccgcatgctcgaagagcagcgcaaggtcgccgaactgcgtaagttcctgcacgagatctacaacgagatcggcggtcgcgaggaaaacctcgacgagctgggcgacaacgagatcctcgcgctggccaagaacctgcgcggtggcgtaccgatggcgaccccggtgttcgatggcgccaaggaacgcgagatcaaggccatgctgaagctggccgacctgccggaaagcggccagatgcgtctgttcgacggccgtaccggcaaccagttcgagcgtccgaccaccgtcggctacatgtacatgctcaagctgaaccacctggtggacgacaagatgcacgcccgttccaccggctcgtacagcctggttacccagcagccgctgggtggtaaggcacagttcggtggtcagcgcttcggtgagatggaggtgtgggcgctggaagcctatggcgcggcgtacaccctgcaggaaatgctgacggtcaagtcggacgacgtgaacggccggaccaagatgtacaagaacatcgtggacggcgatcaccgcatggaggccggcatgcccgagtccttcaacgttctgatcaaagagatccgttcgctcggcatcgacatcgaactggaaaccgaataa

SEQ ID NO: 7900 - DNA, 696 bp, Pseudomonas aeruginosa
  CDS (1)...(696)
atggctaagctgaccaagcgccagaaggcgattgccgagaaagtagttgccggcaagcagtacagcttcgaagaggccgccaagctgctggccgagctgtccaccatcaagttcaaggagtccgtggacgttgccgtgaacctcggcgtcgatccgcgtaaatccgaccaggtcgttcgtggcgccaccgtcctgccgaacggcaccggcaagagcgtccgcgttgccgtcttcacccaaggtccggctgccgaagccgctctggctgccggcgccgacaaggtgggtatggacgagctggctgccgaaatgaaaggcggcgacctgaactacgacgtcgtcatcgcttccccggatgccatgcgtgtcgtcggtcagctgggccagatcctcggcccgcgtggtctgatgccgaacccgaaagtcggcaccgtgactccggacgtcgctaccgccgtgaagaatgccaaggctggtcaggtacgtttccgtaccgacaagaacggcatcatccacagctccgtcggtaaggtcgatttcgagccggccaagctgcagcagaacgttgaagcgctgctggccgacctgaagcgcctgaagccgtcctcgtcgaaaggcgtgtacgtcaagcgcgtgaccctgagcaccaccatgggtccgggcctgcagatcgacctggcttccctggaagcctaa

SEQ ID NO: 7901 - DNA, 432 bp, Pseudomonas aeruginosa
  CDS (1)...(432)
atggctaagaaaatccaggcttatatcaagctgcaagtaaaggccggtcaggccaacccgtcgccgccggtcggccctgccctgggtcagcacggcgtgaacatcatggaattctgcaaggcgttcaacgccaagacccaaggccaagagccgggcctgccgactcctgtgatcatcaccgtttacagcgaccgtagcttcaccttcgaaaccaagagcaccccggctgccgtcctgctgaaaaaagcagctggcatcaccagcggctccgctcgtccgaactcccagaaagtcggtaccgttacccgtgcccagctggaagagatcgccaagaccaagcaggctgacctgaccgctgctgatctggacgctgctgtacgtaccatcgctggctccgcgcgcagcatgggcctgaacgtggagggtgtgtaa

SEQ ID NO: 7902 - DNA, 534 bp, Pseudomonas aeruginosa
  CDS (1)...(534)
gtggctaagcgttggtacgttgtgcatgcatactcgggctacgagaagcatgtcatgcgctcgctgatcgagcgtgtcaagcttgctggcatggaagaagagttcggcgagattctggttcccaccgaagaagtggtggagatgcggaacggccagaagcgcaagagcgagcgcaaattcttccctggctatgtgctggttcagatggaaatgaacgaaggtacctggcacctggtgaaggataccccgcgtgtcatgggcttcatcggcgggactgccgacaagccggctccgatcaccgatcgtgaggctgatgcaatcctgcgtcgcgtggccgatagcggcgacaagcccaagccgaagaccctgttcgagccgggcgagaccgttcgtgtcatcgatggtcctttcgccgacttcaatggtgtcgtcgaagaagttaactacgagaagagccggatccaagtggccgtgctcatctttggccgctctaccccggtggagctggagttcagtcaggtcgaaaaggtctaa

SEQ ID NO: 7903 - DNA, 369 bp, Pseudomonas aeruginosa
  CDS (1)...(369)
atgaatgccaaggcagaagccaaagaatcacgttttgatctcttgaaatggctcttggttgccgttctggttgtggttgccgttgtgggcaatcagtacttttcggctcaaccaatcctgtatcgcgttctcggtattctcgttctggcggtgatcgctgctttcctggctctgcaaacggccaaggggcaggccttctttagtcttgctaaggaagcgcgcgtcgagattcgcaaggtcgtatggccgagtcgtcaagaaacaactcagaccacgctgatcgtggtcgcggtagtgctggtaatggcgctgctgctgtgggggctcgattccctgctgggttggttggtttccatgattgtaggttaa

SEQ ID NO: 7904 - DNA, 1194 bp, Pseudomonas aeruginosa
  CDS (1)...(1194)
atggctaaagaaaaatttgaacggaacaagccgcacgtcaacgtcggcaccatcggtcacgttgaccatggcaagaccactctgaccgctgcactgaccaaggtctgctccgacacctggggtggttccgctcgtgctttcgatcagatcgacaacgcgccggaagaaaaggcccgcggtatcaccatcaacacctcgcacgttgaatacgattccgctgttcgtcactacgcccacgttgactgccccggtcacgccgactacgtgaagaacatgatcaccggtgctgcccagatggacggcgcgatcctggtttgctcggctgccgacggccccatgccgcagacccgcgagcacatcctgctgtcccgccaggtaggcgttccctacatcgtcgtgttcctgaacaaggccgacatggtcgacgacgccgagctgctggaactggtcgagatggaagttcgcgatctgctgaacacctacgacttcccgggcgacgacactccgatcatcatcggttccgcgctgatggcgctggaaggcaaggatgacaacggcatcggcgtaagcgccgtgcagaagctggtagagaccctggactcctacattccggagccggttcgtgccatcgaccagccgttcctgatgccgatcgaagacgtgttctcgatctccggccgcggtaccgtggtaaccggtcgtgtagagcgcggcatcatcaaggtccaggaagaagtggaaatcgtcggcatcaaggcgaccaccaagactacctgcaccggcgttgaaatgttccgcaagctgctcgacgaaggtcgtgctggtgagaacgttggtatcctgctgcgtggcaccaagcgtgaagacgtagagcgtggccaggttctggccaagccgggcaccatcaagccgcacaccaagttcgagtgcgaagtgtacgtgctgtccaaggaagaaggtggtcgtcacaccccgttcttcaagggctaccgtccgcagttctacttccgtaccaccgacgtgaccggtaactgcgaactgccggaaggcgtagagatggtaatgccgggcgacaacatcaagatggttgtcaccctgatcgctccgatcgccatggaagatggcctgcgcttcgcgatccgcgaaggcggccgtaccgttggcgccggcgtggttgccaagatcatcgaataa

SEQ ID NO: 7905 - DNA, 1257 bp, Pseudomonas aeruginosa
  CDS (1)...(1257)
gtggcggtgccggccgacgcctcgccgctgcgcaagctggcgctgttcgtcggccccggcctgctggtctcggtcggctacatggaccccggcaactgggccaccgccatcgaggcgggctcgcgcttcggctacgcgctgctgttcgtagtggtgctggcgagcttttccgggatgctcctgcaaagcctctgttcgcgcctggggatcgccaccggccgcgacctcgcgcagctctcccgggagcgctaccgccctggcgtggcgcgtggccaatggctgctggcggaactgtcgatcgtcgccaccgaccttgccgaggtgctcggcgcggcgctggccttccacctgctgctgggcgtctcgattaccaccggggtggtcctcaccgccttcgataccctgatcgtgctggccctgcagggcgccaacttccgccgcctggaggccatagtgctggggctgatcgcgaccatcggcgcgtgtttcttcgtcgaactggtgctgatcggcccctactggccggatgtcgccgccggcttgcggccgtcctgggacacgctgagcagccaggagccgctgtacctggcgatcggcatcctcggcgcgacggtgatgccgcacaacctctacctgcattcgtccgtggtgcagacccgggtcagcggcgacgacgcggcgagcaaacgctcggcgatccgcttttcccggctcgacaccatcggctcgctgtccctggcgctgctggtcaatgcggcgatcctgatcctcgccgccgcggctttccacggtagcggccataccgaggtggtggagatccaggacgcctaccacctgctcgacccgttggtgggcggcgccctggccagcttcctgttcggcttcgccctgctggcggcggggcaaagctcgaccttcaccggcaccattgccgggcaggtggtgatggagggtttcctccgggcgaagattccctgctggcagcggcgcctgatcacccgcggcctggccctggtgccggccttgatcggcgtgctctggctgggcgaagccgcggtaggcaagctgctggtgctcagccaggtggtgctcagcctgcaattgccgttcgccctgtggccgctgattcgcttcagcagcgaccggggcctcatgggggagttcgtcaacccgcgctgggtcagcgcgctggcctggtcgttgttcggcctgatctcggcggcgaacctgaccttgctgtatttctggttcggctga

SEQ ID NO: 7906 - DNA, 1221 bp, Pseudomonas aeruginosa
  CDS (1)...(1221)
atggctcgacatcgacacatcgtggcctggctcgaggaggtcgccgacgacctgcgtagcctgcgccaggacatccacgcccatcccgaactgggcttcgaggagcgacgcaccgccgcgctggtcgccgaatgcctgcgcggctggggctacgaagtgcacgaagggatcggccgcaccggcgtggtcggcgtcctccgccagggcgacggcacgcggcggctcggcctgcgggcggacatggatgcgctgccgatcgtcgaggccacggggctcggctacagcagctgccacggcgggcgcatgcacgcctgcggccacgacggacacaccgcgatgctgctcggcgcggcacgctacctggcggcgacgcggcgtttcgacggtaccctggtactgatcttccagcccgccgaggaaggccagggcggcgccgaggcgatgctcgccgacgggctgctggagcgctttccctgcgatgcgctgttcggcatgcacaacatgccgggactggaggccgggcacctgggcttccgcgcgggaccgatgatggcttcccaggacctgctgagcgtcaccctggagggcgtcggtggacacggttcgatgccgcacctgagcgtcgatccgttgctcgccgcgtcgagcgcggtgatggccctgcagagcgtggtggcgcgcaacgtcgatccgcagaaggccgcggtggtcacggtcggcgcattgcaggccggcgaggcggccaacgtcataccccagcgcgccgtgctgcgcctgagcctgcgggcgctcgacggccaggtgcgcgagcaggtgctgcagcgggttcgccagatcatcgagttgcaggccgccagctatgggtgccaggccagcatcgagcactacccggcctatccggtgctggtcaacagcgtcgaggaaaccgagttcgcccgccaggtcggggtcgagctggccggcgcggagcaggtcgacggcgacacgccgaagctgatgggcagcgaggacttcgcctggatgctacagcgctgccccggcagctacctgttcatcggcaacggcagaggacggccgatggtgcacaacccggcctatgacttcaacgacgacatcctggtccggggcgcggcctattggggcgcgctcgccgagacctggctggccgcccccgcggcgtccggccttcgactgactgccgccaataacggcgcggcctga

SEQ ID NO: 7907 - DNA, 294 bp, Pseudomonas aeruginosa
  CDS (1)...(294)
atgaagcttcgtcctctgcatgatcgcgtcgttatccgtcgcagcgaggaagagaccaagaccgcaggcggcatcgtgctgccgggttccgccgccgagaagccgaaccgcggtgaagtggtagccgtaggtaccggtcgtgtactggacaacggcgaagtgcgcgctctggcagtgaaggtgggcgacaaggtggtcttcgggccttactccggcagcaacgccatcaaggtcgatggcgaggaactgctggtgatgggcgagtccgaaatcctcgccgtcctggaagactga

SEQ ID NO: 7908 - DNA, 2751 bp, Pseudomonas aeruginosa
  CDS (1)...(2751)
atgtttgcgcctttgttgaagaaactctttggaagcaagaacgagcgtgatgtaaagcgcatggccaaggctgtacaggccatcaatgcgctcgagccccagatggtggcgctctccgacgagcagttgaaggcgaaaacggctgaattccagcagcgctacgccaagggcgaaacgctcgaccaattgctgcccgaagccttcgccgtggttcgcgaggctggcaagcgggtgatgggcatgcgccacttcgatgtccagctgatcggtggcatgaccctgcacgacggcaagatcgccgaaatgcgtaccggcgagggcaagaccctggtgggcaccctgccggtctacctcaacgcgctgtccggcaagggcgtgcacgtggtcacggtgaacgactacctggcgcgccgcgacgccaactggatgcgcccgctgtacgagttcctcggcctcagcgtcggcgtggtcactcccttccagccgccggaagacaagcgcgccgcctacgccgccgacatcacctacggcaccaacaacgaattcggcttcgattacctgcgcgacaacatggccttcagcctggacgacaagttccagcgcgagctgaacttcgccgtggtcgacgaagtggactcgatcctcatcgacgaggcgcgtaccccgctgatcatctccggccaggccgaagacagctccgagctgtacatcaagatcaacaagctgatcccgcgtctcaagcgccaggttgaagaggtcgagggcaagccgaccgaggaaggccactacagcatcgacgagaagacccgccaggtcgaactcaacgagcagggccaccagttcatcgaggacctgctgagccagaacggcctgctcggcgaaggcgagagcctctactcggcgcacaacctgagcctgctgacccacgtctacgcagcgctgcgcgcgcacaccctgttccaccgcaacgtcgagtacatcgtccagggcgaccagatcctcctgatcgacgagcacaccggccgcaccatgcctggccgacgcctgtccgagggcctgcaccaggccatcgaggcgaaggaaggcttgccgatccaggccgagagccagaccctggcctccaccaccttccagaactacttccgcctgtacaacaagctggccggcatgaccggcaccgccgataccgaggccttcgagttccgccagatctacggtctcgacgtggtggtgatcccgacccaccggccgatcgcgcgcaaggacttcaacgacctggtctacctgacccaggaagagaagtacgcggcgatcatcaccgacatcaagcagtgccaggccctcggccggccgatcctggtcggcaccgcgtcgatcgagagttccgagtacgtttccaagctgttgcaagaggcaggcatcgagcacaaggtgctcaacgccaagtaccacgagaaggaagccgagatcatcgcccaggctggcgcgcccggttcggtgaccatcgccaccaacatggccggccgcggtaccgacatcctcctcggcggcaactgggaagtcgaagtcgcggccctggagaaccccaccgaggagcagatcgcccagatcaaggccgaatggcagaagcgccaccagcaggtgatcgaggcgggcggcctgcacgtgatcgcctccgagcgccacgaatcccgccggatcgacaaccagttgcgcggccgtgccggtcgtcagggcgacccgggttccagccgcttctacctgtcgctggaagacaacctgatgcggatcttcgcctccgaccgggtgaagaacttcatgaaggcgctgggcatgcagtccggcgaggcgatcgagcaccgcatggtgaccaacgccatcgagaaggcccagcgcaaggtcgaagggcgcaacttcgacatccgcaagcaactgctggaattcgatgacgtagccaacgagcagcgcaaggtgatctaccacatgcgcaataccctgctgtcggcagaggacgtgggcgagaccatcaaggaattccgcgaggaaaccctcagcgccaccatcaaccagcacattccgccgcagtcgctgcccgagcagtgggacatcgaaggcctggaggctgcgctgtacagcgacttcgccgtgcgcctgccgatccagcagtggctggacgaagacgacaagctgtacgaggaaaccctgcgtagcaagatcctcgagcagatcgtcgccgcctactacgagaaggaagagctggccggcgccgaagccctgcgcgccttcgagaagcagatgctgctgcgggtactggacgacctgtggaaggaccacctgtcgaccatggaccacctgcggcacggcatccacctgcgtggctacgcgcagaagaatccgaagcaggaatacaagcgcgagtccttcaccctgttccaggagctgctggactcgatcaagcgcgacaccatccgcgtgctgtcccacgtccaggtccgtcgcgaagacccggccgaagaggaggcccgcctgcgtcgcgaggcggaggaactggccaagcgcatgcagttccagcacgccgaggctccctcgatggagcaggccgtggccggcgaggaagaagagcttcccgagggcccggctccggtcgtgccgctcgagcctgtgcgcaacgagcagaagatcggccgcaacgagccttgcccgtgcggttccggcaagaaatacaagcactgccacgggcagctggactaa

SEQ ID NO: 7909 - DNA, 1185 bp, Pseudomonas aeruginosa
  CDS (1)...(1185)
atgtttgaactggtcgataacatcgcacaaaccgccgtcataaaagtgatcggtgtaggtggtggtggcggcaacgccgtcaatcacatggccaagaacaacgtcgagggcgtcgagttcatctgcgccaacaccgacgcacaagcgctgaagaacatcgcggcgcgcaccgttctgcaactcggcccgggcgtcaccaaggggctgggtgccggcgccaatccggaagtcggtcgtcaggcggctctggaagatcgcgagcgcatttccgaagtgctggaaggcgccgacatggtcttcatcaccaccggcatgggtggcggcaccggtaccggcgccgcgccgatcatcgccgaagtggcgaaggaaatgggcatcctcaccgtcgcggtggtgacccgcccgttcccgttcgaaggtcgcaagcgcatgcagatcgccgacgagggcatccgcgcgctggccgagagcgtcgattcgctgatcaccatcccgaacgagaagctgctgaccatcctcggcaaggacgccagcctgctggccgccttcgccaaggccgatgacgtgctggccggtgccgtgcgcggtatctccgacatcatcaagcgtccgggcatgatcaacgtcgacttcgccgacgtgaagaccgtcatgagcgaaatgggcatggcgatgatgggtaccggctgcgccagcggtccgaaccgtgcccgcgaggccaccgaggcggcaatccgcaacccgctgctggaagacgtcaacctgcagggcgcgcgcggcatcctggtgaacatcaccgcgggtccggacctgtccctgggcgagtactccgatgtcggcaacatcatcgaacagttcgcttccgagcacgccactgtgaaggtgggcaccgtgatcgacgcggacatgcgcgatgagctgcacgtcaccgtagtcgccaccggcctgggcgcgcgcctggagaaaccggtgaaggtcgtcgacaacaccgtgcagggcagtgcagcccaggcagccgctccggcccagcgcgagcagcagtcggtgaactaccgcgacctcgaccgtcctaccgtgatgcgcaaccagtctcacggcagcgcggcgaccgcggccaagctgaacccgcaggatgacctggattacctggatatcccggcgttcctgcgtcgtcaggccgattga

SEQ ID NO: 7910 - DNA, 1443 bp, Pseudomonas aeruginosa
  CDS (1)...(1443)
gtggttaaagaaccgaatggcgtcacccggaccatgcgccgtatccgccgcatccatttcgtcggcatcggcggcgccggtatgtgcgggatcgccgaagtgctgctgaacctcggctacgaggtatccggctcggacctcaaggcctcggcggtgaccgagcgcctggagaagttcggcgcgcagatcttcatcggccaccaggcggaaaacgccgacggcgccgacgtgctggtggtgtccagtgccatcaaccgggccaacccggaagtggcatcggccctggaacggcggattccggtggtgccgcgtgcggagatgctcgccgagctgatgcgctaccggcacggcatcgcggtagccggcacccacggcaagaccaccactaccagcctgatcgcctcggtgttcgccgccggcggcctggacccgaccttcgtcatcggcggccggctgaacgccgccgggaccaacgcccagctcggcgccagccgctacctggtggccgaggccgacgagagcgacgccagcttcctgcacctgcaaccgatggtcgcggtggtcaccaatatcgacgccgaccacatggcgacctacggcggcgacttcaacaagctgaagaagaccttcgtcgagttcctccacaacctgccgttctacggactggcggtgatgtgcgtggatgatccggttgtgcgtgagatcctcccgcagatcgcccgcccgaccgtgacctacggcctcagcgaagacgccgacgtgcgcgcgatcaacatccgccaggaaggcatgcgcacctggttcaccgtgttgcgcccggagcgcgagccgctggacgtctcggtgaacatgcccggcctgcacaacgtgctgaattccctggcgaccatcgtcatcgctaccgacgagggcatctccgacgaagccatcgtccaggggctgtccggcttccagggcgtaggccggcgcttccaggtctacggcgagctgcaggtcgagggtggcagcgtgatgctggtggacgattacggccaccatccgcgcgaagtcgccgcggtgatcaaggcgatccgtggcggttggccggagcgtcgcctggtgatggtctaccagccgcatcgctatacccgtacccgcgacctgtacgaagacttcgtgcaggtgctgggcgaagccaacgtgctgctgttgatggaggtctatccggccggcgaagagccgatcccgggagccgacagccgccagctgtgccacagcatccgccagcgcggccagcttgacccgatctacttcgagcgcgacgccgacctggcgccgctggtcaagccgctgctgcgcgctggcgacatcctgctttgccagggcgctggcgatgtcggcggcctggccccgcaactgatcaagaacccgctgttcgccggcaagggagggaagggcgcatga

SEQ ID NO: 7911 - DNA, 1074 bp, Pseudomonas aeruginosa
  CDS (1)...(1074)
atgaaaggtaatgtcctgatcatggcgggtggcaccggcggacacgtgttcccggcgctcgcctgtgcgcgggagttccaggcgcgcggctatgccgtgcactggctggggacgccgcgcggcatcgagaatgacctggtacccaaggccggcctgccgttgcacctgatccaggtcagcgggctgcgcggcaagggcctgaagtcgctggtcaaggcgccgctggaactgctcaagtcgctgttccaggcgctgcgggtgatccgccagctgaggccggtctgcgtgctcggcctgggtggctatgtcaccggcccgggcggcctggctgcgcgcctcaacggcgtgccgctggtgatccacgagcagaacgccgtggccggcaccgccaaccgcagcctggcgccgatcgccaggcgcgtctgcgaggcattcccggataccttcccggccagtgacaagcgtctgaccaccggcaatccggtgcgcggcgagctgttcctcgacgcgcacgcccgcgcgccgctgaccggccgtcgggtcaatctgctggtgctcggcggcagccttggcgcggaaccgctgaacaagctgttgccagaggccctggcgcaggtgccgctggaaatccgtccggcaatccgccatcaggccggtcgtcagcatgccgagattaccgccgagcgttatcgcacagtggcggtcgaagcggacgtcgcgcccttcatcagcgacatggccgcggcctatgcctgggccgacctggtgatctgtcgcgccggcgcgctgaccgtcagcgagctgacggcggcgggattgcccgccttcctggtgccgttgcctcacgcgatcgacgatcaccagacccgcaatgccgaattcctggtacgcagcggcgccggccgcctgctgccgcaaaagtctaccggcgcggccgaactggccgcgcagctgtccgaggtcctgatgcatcccgaaaccctgcgctccatggcagaccaggcacgcagcctggcgaaacccgaggctacccggacggtggtcgatgcctgcctggaggtggcccgtggttaa

SEQ ID NO: 7912 - DNA, 1347 bp, Pseudomonas aeruginosa
  CDS (1)...(1347)
atgagcctgatcgcctccgaccacttccgcatcgttgtcggcctcggcaagagcggcatgtccctggtgcgctacctggcgcgccgcggcttgcctttcgccgtggtcgatacccgagagaacccgccggagctggccaccctgcgtgcccagtatccgcaggtggaagtgcgttgcggcgaactcgacgccgagttcctctgctccgcccgcgaactctatgtcagccccggcttgtcgctgcgcacccctgcgctggtacaggccgccgcgaaaggcgtgcgcatctccggtgacatcgatctcttcgcccgcgaggcgaaggccccgatcgtcgccatcaccggttccaacgcgaagagcaccgtgaccaccctggtgggcgaaatggcggtggccgcggacaagcgtgtcgccgtcggcggcaacctcggcaccccggcgctcgacctgctggccgacgacatcgagctgtacgtgttggagctgtcgagcttccagctggaaacctgcgatcgcctcaacgccgaggtggcgaccgtgctgaacgtcagcgaagaccatatggatcgctacgacggcatggctgactaccacctggccaagcaccggatcttccgcggtgcccgccaggtcgtggtgaatcgcgccgatgccctgacccgaccgctgatcgccgataccgtgccgtgctggtcgttcggcctgaacaagccggacttcaaggctttcggcctgatcgaggaagacggccagaagtggctggcgttccagttcgacaagctgctgccggttggcgaactgaagatccgtggcgcccacaactattccaacgcgctcgccgcgctggcgctgggccatgcggtcggcctgccgttcgacgccatgctcggcgcgctgaaggcgttttccggcctggctcatcgctgccagtgggtacgcgagcggcagggcgtgagctactacgacgattccaaggccaccaacgtcggcgccgccctggcggcgatcgaggggctgggtgccgacatcgacggcaagctggtgctgctcgccggcggagacggcaagggcgccgatttccatgacctgcgcgagccggtcgcgcgcttctgccgggcggtggtactgcttggccgtgacgccgggctgattgcccaggcactgggcaacgcggtaccgctggtgcgcgtcgcaacgctggacgaagcagtccggcaggccgccgagctggcccgcgaaggcgatgcggtgctgttgtcgccggcctgcgcgagcctggacatgttcaagaacttcgaagaacgcggacgcctgttcgccaaagccgtagaggagctagcgtga

SEQ ID NO: 7913 - DNA, 1083 bp, Pseudomonas aeruginosa
  CDS (1)...(1083)
atgctcctgctgctggccgaatacctgcaacagttctacaagggcttcggcgtcttccagtacctgaccctgcgcggcattctcagcgtgctcaccgcgctgtcgctgtcgctgtggctggggccctggatgatccgtaccttgcagatccgccagatcggccaggccgtgcgcaacgacggtccgcagtcgcacctgtcgaagaagggcaccccgaccatgggcggcgccctgatccttaccgccatagccatcagcacgctgctgtgggcggatctttccaaccgctacgtgtgggtagtgctggtcgttaccctgctgttcggtgccatcggctgggtggacgactaccgcaaggtgatcgagaagaactcccgtggcctgccgagccgctggaagtacttctggcagtcggtgttcggcatcggcgccgccgtgttcctctacatgactgccgaaaccccgatcgagaccaccctgatcgtgccgatgctgaagagcgtcgagatccagttgggcatcttcttcgtggtcctgacctacttcgtcatcgtcggctcgagcaatgcggtgaacctcaccgacggtctcgacggcctggcgatcatgccgacggtaatggttgccggcgcgctgggcatcttctgctacctgtcgggcaacgtgaagttcgccgagtacctgctgattcccaacgtaccgggcgccggcgagctgatcgtgttctgcgccgcgctggtcggcgccggcctcggcttcctctggttcaacacctatccggcgcaggtcttcatgggcgacgtcggcgcgctggcgctgggcgccgcgctgggcaccatcgcggtgatcgtgcgccaggagatcgtgctgttcatcatgggtggggtgttcgtcatggaaaccctctcggtgatgatccaggtcgcttccttcaagctgaccggacgccgcgtcttccgtatggcgccgatccatcaccatttcgaactgaaaggctggccggagccgcgcgtgatcgtgcgcttctggatcatcaccgtgatcctggtgctgatcggcctcgccaccttgaagctgcgttga

SEQ ID NO: 7914 - DNA, 1377 bp, Pseudomonas aeruginosa
  CDS (1)...(1377)
atgcttgagcctcttcgcctcagccagttgacggtcgcgctggacgcccgcctgatcggcgaggacgccgtcttttcggcggtttccaccgacagtcgcgccatcgggcccggccaactgttcattgccctgagtgggccgcgtttcgacggccacgactatctcgccgaggttgccgccaagggcgcggtggctgcgctggtggagcgcgaagtcgccgacgcgcccctgccgcaattgctggtgcgcgatacccgtgcggccctggggcgactgggcgcgctgaaccggcgcaagttcaccggcccgctggcggccatgacgggctccagcggcaagaccacggtcaaggagatgctcgccagcatcctgcgtacccaggccggcgatgccgagtcggtgctggctacccgtggcaatctgaacaacgacctcggcgtaccgctgaccctgctgcaactggcgccgcagcaccgtagcgcagtgatcgaactgggcgcctcgcgcatcggcgagatcgcctacacggtcgagctgacccgcccgcacgtggcgatcatcaccaatgccggaaccgcccatgtcggcgagttcggcggaccggagaagatcgtcgaggcgaagggcgagatactcgaagggctggccgccgacggcaccgccgtactgaacctggacgacaaggccttcgacacctggaaggcccgtgccagcggccgtccgttgctgactttctccctcgaccggccccaggccgatttccgcgccgccgatctgcagcgcgatgcgcgcggctgcatgggcttcaggctgcagggcgtagcgggtgaagcgcaggtccagctcaacctgctggggcggcacaatgtcgccaatgccctggctgccgccgctgccgcccatgcactgggcgtgccgctggatgggatcgtcgccgggctgcaggcgctgcagccggtcaagggccgcgcggtagcgcaactgaccgccagcgggctgcgtgtgatagacgacagctacaacgccaaccccgcgtcaatgctggcggcgattgatatactgagcggcttttccgggcgcaccgtcctggtcctcggagacatgggcgaactcggttcctgggccgagcaggcccaccgcgaggtgggcgcctacgccgctggcaaggtgtccgcgctctatgcggtcggaccgctgatggcccacgccgtacaggcgttcggcgccacgggccggcacttcgccgaccaggccagcctgatcggggcgctggccaccgaacaaccgacaaccaccattttgatcaagggttcccgcagtgcggcgatggacaaagtcgtcgcggcgctgtgcggttcctccgaggagagtcactaa

SEQ ID NO: 7915 - DNA, 1464 bp, Pseudomonas aeruginosa
  CDS (1)...(1464)
atgcctatgagcctgaaccaactgtttccccaggccgagcgcgatctgctgatccgcgagctgaccctggatagccgcggcgttcgtccgggcgacctgttcctggcggtgccgggcgggcgccaggatggtcgtgcgcacatcgccgatgccctggccaagggcgcggctgccgtggcttacgaggcggaaggcgccggagagttgccgcccagcgatgcgccgctgatcgcggtgaaggggctggccgcgcaactgtcggcggtcgccgggcgtttctacggcgagccgagccgcgggctggacctgatcggcgtcaccggcaccaacggcaagaccagcgtcagccaactggtggcccaggccctggatctgctcggcgagcgctgcggcatcgtcggcaccctcggcaccggtttctacggcgccctggagagcggccggcacaccacgccggacccgctcgcggtgcaggccacgctggccacgctgaagcaggccggcgcccgcgcggtagcgatggaagtgtcttcccacggcctcgaccagggccgcgtggcggcgctcggtttcgatatcgcggtgttcaccaatctgtcccgcgaccacctcgactatcacggttcgatggaagcctatgccgccgccaaggccaagctgttcgcctggccgggcctgcgctgccgggtgatcaacctggacgacgatttcggccgtcgactggccggcgaggagcaggactcggagctgatcacctacagcctcaccgacagctcggcgttcctctattgccgcgaagcgcgcttcggcgacgccggcatcgaggcggcgctggtcactccgcacggcgagggcctgctgcgcagcccgttgctcggccgcttcaacctgagcaacctgctggcggcggtcggtgcgttgcttggcctgggttatcccctgggcgatatcctccgcactttgccgcaactgcaggggccggtcggccgcatgcagcgcctgggaggcggcgacaagccgctggtggtggtggactacgcgcatactcccgacgccctggaaaaagtcctggaggccctgcgtccgcacgcggccgcgcgcctgctgtgcctgttcggctgcggtggcgatcgcgatgccggcaagcgtccgctgatggctgcgatcgccgaacgcctggcggatgaggtgctggtcaccgacgacaacccgcgcaccgaggccagtgcggcgatcatcgccgatatccgcaaaggcttcgctgccgctgacaaggttaccttcctgccgtcgcgcggtgaggcgatcgcccatctgatcgcttccgctgcggtggatgacgtggtgctcctggccggcaagggtcacgaggattatcaggagatcgacggcgtacgccatccgttctccgacatcgagcaggccgagcgcgccctggccgcctgggaggtgccgcatgcttga

SEQ ID NO: 7916 - DNA, 942 bp, Pseudomonas aeruginosa
  CDS (1)...(942)
atgaatgccacctaccgccatatcaccgttctgctcgaggaggccgtttccgcactggccccgcgggaggacggctgctatctggacggtaccttcggaagagggggccatagtcgagccttgctcgagaaactgggcgccgggggacgcctgctcggattcgacaaagatccccaggccatccagacaggaaaagcattggcggccgaagacggccgcttcgtcattgtgcagcgctcgttcgccgaactgggcgatgaggtgcgcgcacgcggtctcgaagggcgggtcgatggcgtcctgctcgaccttggcgtgtcgtcgccgcaactcgacgatcccgagcgcggcttcagcttcctcaacgatggtccgctggacatgcgcatgaatcccggccagggcatcagcgcagcggagttcatcgccaacgccaccgaagaggaaatcgcccgggtcttcaaggaatatggcgaagagcgcttcgccaagcggatggcccgcgccatcgtgcagcgccgtcaggagcggccgttcgaacgaactgccgatctcgccgaagtgatcacggttgccaaccccgcctgggagaagggcaagaatccggcgacccgcgcattccagggcctgcgcatccatgtgaacaatgagctgggcgatctcgagcgtggccttgacgccgcgctcgaatcgctggccgtcggtggccggctggtggtgatcagtttccattccctggaagaccgcatcgtcaagctgttcatgcgcaagcacgccaagggcgaggcggacaacctgccgcgcgacctgccgatccgttccaaggtcttcgagccgcgcctgaagctgctgggcaagccgcagtacgcttcggaagaagaactcaaggccaacccgcgctcgcgcagcgcggtcatgcgcgtggcggagaagctgagatga

SEQ ID NO: 7917 - DNA, 849 bp, Pseudomonas aeruginosa
  CDS (1)...(849)
gtgtcagcaggcactctgttcgtagtggcgaccccgatcggcaatctcgacgacatcagcccgcgcgccctgcgggtgctgcgggaggtggccctggtggctgcggaggatacccgccattcgatccggctgttccagcacttcggcatcgagacgccattggcggcctgccacgagcacaacgagcgcgaggagggcgggcgcttcatctcccggctgcagggtggggaggacgtcgcgctgatctcggacgccggtaccccgctgatttccgatcccggcttccacctggtgcgccaggcacaggcgctgggtatccgggtggtcccggtgccgggctcctgcgcgctgatcgcggcgctgtcggcggcgggattgccgtcggaccggttcatcttcgaaggtttcctgcccgccaaggctgcgggacgacgcagccgcctccaggcggtacaggaagagccgcgcacgctgattttctacgaggcgccccatcgtctgctggaaagcctggcggacatgcgcgacgtgttcggcggggagcgccgtgcggtgctggcgcgggagctgagcaagaccttcgagaccattcgcagcctgccgttggccgaactgcacgattgggtcgcgtcggacagcaaccagcagcgcggcgagtgcgttgtgctggtggcggggtggcaggcgccggaaggcgaggagtcgatcggtgcggaggcgctcagggtgctcgacctgctgcttgccgagctgccgttgaagaaagccgcggcgctggcggcggaaattaccggggtgcgaaaaaaccttttgtatcaacaggctttgcaacgccaagggaagagttga

SEQ ID NO: 7918 - DNA, 393 bp, Pseudomonas aeruginosa
  CDS (1)...(393)
atgtcggcgactcaaaattacggcactggccgtcgtaagaccgctaccgctcgcgtcttcctgcgtccgggtactggcaagatttccatcaacaaccgtggtctcgatcagttcttcggtcgtgaaaccgctcgcatggtcgtgcgtcagccgctcgagctgaccgagaccgtcgagaagttcgacatcttcgttaccgtcgttggcggtggcgtaagcggtcaggccggtgcgatccgtcacggcatcacccgtgccctgatcgagtacgacgaaaccctgcgtagctcgctgcgcaaggccggctacgtgactcgcgatgcccgtgaagtcgagcgtaagaaagtcggtctgcgtaaagcgcgtaagcgtccgcagtactccaagcgttaa

SEQ ID NO: 7919 - DNA, 1347 bp, Pseudomonas aeruginosa
  CDS (1)...(1347)
atgactactcgtatcctgaccggcatcactcctaccggcactccgcacctgggcaactacgccggcgccatccgcccggcgatcctcgccagccgtcggagcgacgtggattcgttctacttcctggcggactaccacgccttgatcaagtgcgacgatcccgctcgtatccagcgctcgcgcctggaaatcgccgcgacctggctggccggcggcctggacgtcgagcgtgcgaccttctaccggcagtcggacatccccgagattcccgagctgacctggttgctcacctgcgtcagtgccaagggcctgctcaaccgcgcgcatgcctacaaggccgcggtggaccgcaatgtcgaggccggcgaagacccggacgccggcgtgaccatgggcctctacagctatccggtgctgatggccgcggacatcctgatgttcaacgcgcacaagattccggtcggccgcgaccaggtgcagcacgtggagatggcccgcgacatcggccagcgtttcaaccacctgttcggcaacggccgcgagttcttcgtcctgcccgaagcggtgatcgaggaaaacgtcgccaccctgccgggcctggacgggcgcaagatgtccaagagctacgacaacaccatcccgctgttcagcccgtccaggcagctcaaggacgccatcgcacgcatcgtcaccgactcgcgcgcgccgggcgagccgaaagacccggacagttcgcacctgttccttctttactcggccttcgccagcgccgaacaggtcgccgcgttccgccaggaactgctcgaaggcctggcctggggcgaagccaagcagcgcctgttccagttgctcgacaacgaactgggcgaggctcgcgagcgttaccaggcgctgatcgccaagccggacgatatcgaggacattctcctcgcaggtgccgccaaggcgcgccgcatcgccaccccattcatcgccgagttgcgcgaggcagtcggcctgcgctccctgcgcgagccgctgaaaagtgccgagagcggcaagaagaaggccgccaaggctgcgcgcctggtcagcttccgcgacgacgacggcagcttccgcttccgcctgctggacgccgccggcgaacagctactgctgtcccgcgccttcgccgacggcaaggccgccggtgcggtgagcaagcgcctgctggctggcgagactgccgacctgcgggccgagggcaatgcctttggcctgtggctggatggcgaggcggtggcgcagagcccggccttcgccgacgccgccgcccgtgacgccgccatcgagcgcacccgcgaagcgctggcaccgcaggagtag

SEQ ID NO: 7920 - DNA, 1266 bp, Pseudomonas aeruginosa
  CDS (1)...(1266)
atggataaactgattattaccggcggtaaccgcctcgatggcgaaatccgcatttccggcgcgaagaactcggcgctgccgatcctggccgcgaccctgctggccgatactccggtcaccgtctgcaacctgccgcacctgcacgacattaccaccatgatcgaactgttcggccgcatgggcgtgcagccgatcatcgacgagaagctcaacgtcgaagtcgatgccagcagcatcaaaaccctggtcgcgccgtacgaactggtgaagaccatgcgtgcctcgatcctggtgctgggcccgatgctggcgcgcttcggcgaggccgaagtggccctgccgggcggttgcgcgatcggttcgcgtccggtcgacctgcatatccgcggtctcgaggccatgggcgcgcagatcgaggtcgaaggcggctacatcaaggccaaggcgccggccggcggcctgcgtggcggtcacttcttcttcgataccgtcagcgtgaccggcaccgagaacctgatgatggccgccgcgctggccaacggccgtaccgtgctgcagaacgccgctcgcgagccggaggtggtcgacctggccaactgcctgaacgccatgggcgccaacgtccagggcgctggctccgataccatcgtcatcgaaggcgtgaagcgcctcggcggtgctcgctacgacgtactgcccgaccgtatcgagaccggcacctacctggtggccgcggccgcgaccggtggccgggtgaagctgaaggataccgacccgaccatcctcgaggcggtcctgcagaagctggaagaggccggtgcccacatcagcaccggcagcaactggatcgagctggacatgaagggcaaccggccgaaggcggtcaacgtgcgtaccgcgccgtacccggcgttccccaccgacatgcaggcccagttcatctccatgaacgcggtagccgaaggcaccggcgcggtcatcgagacggtcttcgagaaccgcttcatgcatgtttacgaaatgaaccgcatgggcgcgcaaatcctcgtcgaaggcaacaccgccatcgtcaccggcgtacccaagctcaagggcgctccggtcatggcgaccgacctgcgcgcatccgcgagcctggtgatcgccggcctggtggccgaaggcgacaccctgatcgatcgcatctaccacatcgaccgtggctacgagtgcatcgaagagaaactccagctgctcggcgccaagatccgccgcgtaccgggctag

SEQ ID NO: 7921 - DNA, 726 bp, Pseudomonas aeruginosa
  CDS (1)...(726)
atggcaacgctcaaagcccagcacctggccaaaagctataaaggccggcaagtcgtccgcgacgtcagcatgtccatcgatagcgggcagatcgtcggcctgctcggtccgaacggtgccggcaagaccacctgcttctacatgatcgtcggcctggtccaggccgaccagggcgtggtccgcatcgacgagcagaacgtcacccacctgccgatgcacgggcgcgcccgggccggcatcggctacctgccgcaggaagcctcgatcttccgcaagctgtcggtatccgacaacatcatggcgatcctcgagacccgcagcgacctcgatcgcaacggtcgcaaggaagccctggaaggcctgctgcaggaattccacatccaccacatccgcgacaacctcggcatgagcctgtccggcggcgaacgacgccgggtggaaatcgcccgcgccctggccagcgcgccgaaattcatcctcctcgacgagcccttcgccggcgtggacccgatctcggtcggcgacatcaagcagatcatccatcacctcaaggcgaagggtatcggcatcctcatcaccgaccacaacgtccgcgagaccctggacatctgtgaaacggcgtatatcgtcaatgatgggcagttgatcgcggaaggggatgccgagagcatcctcgcaaacgacctggtcaaggaagtctacctggggcacgagttccgcctctga

SEQ ID NO: 7922 - DNA, 861 bp, Pseudomonas aeruginosa
  CDS (1)...(861)
atgcgcctgatcatcgtcagcggccgctcgggctcgggcaagagcaccgccctgaacgtcctcgaagacaacggcttctattgcatcgacaaccttcccgccagcctgcttcccgacctggcgcagcgcgccctgttgcacacggagctactgcagccacaggtggcggtgtcgatcgacgcccgcaacctgcccagccagttgcagcgcttccccgaactgttgcaggaagtgcgggacaaccacatcaactgcgatgtgctgtatctcgacgccgacgacgagacgctgctcaaacgattctcggaaacccgccggcgccacccgctgaccaccgacacccgttcgctggcggaggcgattggcgacgagagccaattgctcggaccgatcgccgacctcgccgacctgaagctggacaccaccagcctcaacctctatcagttgcgcgacaccatcaaactgcgcctgttgaacaagccggaacccggcaccgcgttcctcgtcgaatcctttggcttcaagcgcggcatgccagtcgacgccgacctggtgttcgatgtgcgctgcctgccgaacccctactggaagcccgagttgcgcgatcattcggggctggagccggaagtccgcgagtatctggccgcccagccggacgtcgaggaaatgtaccaggacatcgtcggctacctgaacaaatggttgccgcgcttcgccgccagtaaccgctcatatgtaacagttgcgataggctgtaccggcgggcaccatcgttcggtctacctcgccgagcggattggcgctgcactcagggattccctgaagaacgtgcagattcgccaccgcgatctcagcagctag

SEQ ID NO: 7923 - DNA, 291 bp, Pseudomonas aeruginosa
  CDS (1)...(291)
atggcgcttgaacgctccgacgtggaaaaaatcgcccatctcgcccgcctgggcctgagcgaggccgatcttccgcgcaccaccgagaccctgaacaacatcctcggcctgatcgaccagatgcaggcggtcgacaccagcggcgtcgaaccgctcgcccatccgctggaagccacccagcgcctgcgcccggacgcggtcaccgagaccgatcaccgcgacgcctaccagaccatcgcccccgccgtggaagaaggtctgtacctggttccgaaagtcatcgagtcataa

SEQ ID NO: 7924 - DNA, 1455 bp, Pseudomonas aeruginosa
  CDS (1)...(1455)
atgctgcatcaattgaccctcgccgagatcgcccgcgccctcgccgacaagcaattttccgccgaagagctgacccgcaccctgctcggtcgcatccggcagctggatccccagctcaacagtttcatcagcatcaccgacgacctggccatcgcccaggccaaggcagccgacgaacggcgcgccaacggcgagaacggcgccctgctcggcgcgccgatcgcccacaaggacctgttctgcacccagggcgtacgcaccagctgcggttcgaagatgctcgacaacttcgtctcgccctacgacgccaccgtggtcgagaagctcaccgccgccggcgccgttaccctcggcaagctgaacatggatgaattcgccatgggctcgtcgaaccagtccagccactacggcgcggtgaagaacccctggagcctcgaccgcgtgccgggcggctcctccggcggttccgccgcggcagtcgccgcgcgcctgctgccggccgccaccggcaccgataccggcggctcgatccgccaaccggcggcgctgaccaacctcaccgggatcaagccaacctacggccgggtttcccgctggggcatgatcgcctacgcttccagcctcgaccagggcggcccgctggcgcgcaccgccgaggactgcgcgctgatgctgggggtgatggccggattcgatccgaaggactcgaccagcgtcgaacagccggtggacgactacctggccgccctgcagaagccgctgagcggcctgcgcatcggcctgccgcgggaatacttcggcgccggcctcgacagccgcatcgccgacgcggtgctggccgtggtcgaggagctgaagacgctcggcgccacggtgaaggacatttccctgccgaacatgcagcacgccatcccggcctactacgtaatcgcgccggccgaggcgtcctccaacctgtcgcgcttcgacggcgtgcgctatggctatcgttgcgacgccccgcagaacctggaagacctgtacaagcgctcgcgcgcggaaggcttcggcagcgaagtgaagaaccgcatcatggtcggcacctacgcactctcggccggctactacgatgcctattacctgcaggctcagaagattcgccggctgatcaagaacgacttcgtcagcgcctttgccgaagtggacgtgatcctcggcccgaccacgccgaacccggcctggaagatcggcgagaagaacgacgacccggtttcccagtacctggaagacatctacaccatcaccgccaacctcgccggcctgccggggctgtccatgcccgccggcttcgtcgacggcctgccggtgggtgtccagttgctcgcgccctacttccaggaaggccgcctgctcaacgtcgcgcaccagtaccagcaggtcagcgactggcacacccgcaccccggccggcttctaa

SEQ ID NO: 7925 - DNA, 1446 bp, Pseudomonas aeruginosa
  CDS (1)...(1446)
atgcaatgggaaaccgtgatcgggctggaaatccacgcacagctcgccacccaatcgaagatcttctccggcagctcgaccgccttcggcgccgcgccgaatacccaagccagcctggtcgacctggccatgccgggcaccctgccggtgctcaacgaggaggccgtacgcatggcctgcctgttcggcctggcgatcgacgcacggatcgaccggcagaacgtgttcgcccgcaagaactacttctaccccgacctgccgaagggctaccagaccagccagatggaccatcctatcgtcggcaagggccatctcgacatcaccctggaagacggcaccaccaagcgcatcggcatcacccgcgcgcacctggaggaggacgccggcaagagcctgcacgaagacttccagggcatgagcggcatcgacctgaaccgcgccggcacgccgttgctggagatcgtttccgagccggacatccgcagcgccaaggaagccgtggcctacgtcaaggcgatccacgccctggtgcgctacctgggcatctgcgacggcaacatggccgagggctcgctgcgctgcgactgcaacgtctcggtacgaccgaagggccaggccgaattcggcacccgcgccgagatcaagaacgtcaactccttccgcttcatcgagaaggcgatcaaccacgagatccagcgccagatcgagctgatcgaggacggcggcaaggtagtccaggaaacccgcctgtacgacccgaacaaggacgagacccgctccatgcgcggcaaggaagaagccaacgactaccgttacttcccctgtcccgacctgctgccggtggtcatcgagcccgagtacctggcgaagctgcgcgagcaactgccggaactgccggtgcagaagcgcgaacgcttcgagagccagtacggcctgtccgcctacgatgccagcgtgctgtccgccagccgcgagatggccgactacttcgagaaggtccagggcatctgcggcgacgccaagctggcggccaactgggtgatggtcgagctgggcagcctgctcaacaaggacggcctggagatcgagcagtccccggtgtccgccgagcaactgggcggcatgatcctgcgcatcaaggacaacaccatctccggcaagctcgccaagatggtcttcgaagccatggccaacggcgagggttccgccgaccagatcatcgaggccaagggcctgaagcaggtcaccgacagtggcgccatcgagaagatgctcgacgaggtgctggcggccaacgccgagcaggtcgagcagtaccgcgctgccgacgaggccaagcgcggcaagatgttcggcttcttcgtcggccaggcgatgaaggcctcgaaaggcaaggccaacccgcagcaggtgaacgagttgctgaagaaaaagctcgaagcgtga

SEQ ID NO: 7926 - DNA, 1614 bp, Pseudomonas aeruginosa
  CDS (1)...(1614)
atgcgtagaaacgccgtcatccgctccgcgatcattccctcgctgctcggcgcagcgctggtcgccgccgttccccaggccttcgccagcaacctgatcttctgctcggaaggcagcccggccggcttcgatcccgcccagtacaccaccggtaccgatttcgacgccgcggcggaaaccgtcttcaaccgcctgacccagttcgagcgcggcggcaccaaggtccttcccggcctcgcggaaagctgggacgtcagcgacgacggcaagacctataccttccacctgcgcaagggcgtgaagttccacagtaccgactacttcaagccgacccgcgaattcaatgccgacgacgtgctgttcaccttcgaacgcatgctcgacaaggatcatccgttccgcaaggcctaccccaccgagtttccctacttcaccgacatgggcctggacaagaacatcgccagggtcgagaagctcgacgagcatacggtgaagttcaccctcaacgaggtcgacgcggccttcatccagaacctggcgatgcccttcccatcgatccagtccgccgaatacgccgcgcaactgctcaagcagggcaaggccagcgacatcaaccagaagccgatcggcaccggcccgttcgtgttcagccgctaccagaaggatgcgcagatccgcttcaagggcaacaaggactactggaagccggacgaggtgaaggtcgacaacctgatcttcgccatcaacaccgacgcctcggtgcgcgcgcagaagctcaaggccggcgagtgccagatcaccctcaacccgcgccccgccgacctcgacgcgctgaagaaggacccgaacctgaacctgccgtcgcaggccggcttcaacctcggctacatcgcctacaacgtcacccacaagccgttcgacaagctggaagtacgccaggcgctggacatggcggtgaacaagaaggccatcatcgacgccgtctaccagggcgccggccagttggcgagcaacggcatgccaccgacccagtggtcctacgacgagaccatcaaggacgcgccctacgatccggccaaggccagggagctgctgaagaaggccggcgtcgccgagggcaccgagatcaccctgtgggccatgccggtacaacgcccctacaaccccaacgccaagctgatggcggaaatgctgcagaacgattgggcgaagatcggtatcaaggcgaagatcgtcacctacgaatggggcgaatacatcaagcgcgccaagggcggcgagcatgacgccatgctgatcggctggagcggcgacaacggcgacccggacaactggctcggcaccctctacggctgcgacgcggtggacggcaacaacttctccaaatggtgcgacgccggctacgacaagctggtcaaggatgccaagcgcaccaccgaccagggcaagcgcaccgagctgtacaagcaggcccagcacatcctcaaggaacaggtgccgatcaccccgatcgcccactccaccgtgtaccagccgatgcgcaagacggtacacgacttcaggatcagtcccttcggcctgaactcattctacgaggtcagcgtcggcaagtag

SEQ ID NO: 7927 - DNA, 1308 bp, Pseudomonas aeruginosa
  CDS (1)...(1308)
atgtcccatcgcatcgtgatcgtcggcggcggcgccggcgggctggagctcgccacccgtctcggccgcaccctgggtaaacgcggcaaggcccaggtcaccctggtcgacgccaacctcacccacatctggaaacccctgctgcacgaagtcgctgccggctcgctcaactcctccgaggacgagctgaactacgtcgcccaggcgaagtggaaccacttcgaattccagctcggccgcatgcagggcctggatcgcgccggcaagcgggtccgcctggccgcactggtggacgagaatggcgttgaactggttcccgagcgcgacatcgcctacgacaccctggtgatcgctgtcggcagcaccaccaacgacttcggcaccgagggcgctgcggaacattgcattttcctcgatacccgcgcccaggccgaacgcttccaccgacaactactcggccagtacctgcgtgcgcataccgggcacgacgcgaacaacaacgcagtgagtatcgccatcatcggcgccggcgccaccggcgtcgaactggctgcggaactgcaccacgccgcgcagatgctggccgcctacgggctcgaccggatccgcccggaagacctgcacatcagcctggtcgaagccggcccgcgggtgctgccggcgctgcccgagcgtatcagccagccggtacaccagaccctgagcaagctcggcgtacgggtgatgaccggctccgcggtgagcaaggtagatgcggacggcctctggaccggcgacggcgaattcgtcccggcgacgctcaaggtgtgggcggcgggcatccgggctccggccttcctcaaggaactcgacggcctggaaagcaaccgtatcaaccaactggtggtccgcccgaccctgcagaccacccgcgacgacgacatcttcgccttcggcgactgcgccgcctgtccccagccggcgcaaccgggagagcaaccgcgcaacgtgccgccacgcgcccaggccgcgcaccagcaggcctcgctgctggtgaaatcgctacgtgcccgtctcgaaggcaagccgctgggcgaatatcactaccgcgactacggttcgctgatctcgctgtcgcgcttcagcgcggtcggcaacctgatgggcaatctgatgggtagcgtcatgctcgaaggctggctggcgcggatgttctacgtatcgctataccgcatgcaccagatggcgttgtacggtccgctgcgcaccgcgatgctgatgcttagcggccgcctgcgcagcaccgagccacgcctcaagctgcactga

SEQ ID NO: 7928 - DNA, 963 bp, Pseudomonas aeruginosa
  CDS (1)...(963)
atgtccgatatgattcaacgcgcggccgaggtgccgttcgagctgggtggccagcgtctcgaccagatcgccgcccagctttttcccgaacactcccgctcccgtctggccggctggatcaaggacggacgcctgaccgtcgacggcgccgtgctgcgcccgcgcgacatcgtccacagcggcgcgcaactggtcctggaggccgagcaggaagcccagggcgagtggctcgcacaggacatcgagctggaaatcgtctacgaggacgagcacatcctggtgatcgacaagcccgccggcctggtggtccatccggctgccggccatcaggacggcaccctgctgaatgccttgctctaccatgtcccggacatcgccaatgtgccgcgcgccgggatcgtccaccgcctggacaaggacacgaccggcctgatggtggtggccaagacgctggaggcccacaccaagctggtggcgcaactgcaggcacggtcggtcagccgcatctatgaggcgatcgtgatcggcgtgatcacctccggcggcaccatcgatgcgccgatcggacggcatggcgtgcagcggcagaagatggcggtggtcgacgccggcaaggtggcggtcagccattaccgcgtgctggaacgcttccgtgcgcacacccatacccgggtcaagctggagaccgggcgtacccaccagatccgcgtgcacatgagccatatcggctatcccctggtcggcgatccggtctacggtgggcgcttcaggattcccccggtggccagccagaccctggtccagactcttcgcgagttcccccggcaggcgctgcacgcgcgcttcctcgaactggatcacccggccaccggcgtgcgcatgaagtgggagtcgccgctgccggaagacttcctctggctgctcagcctgttgcgccaggatcgcgaggcgttcgtcggatga

SEQ ID NO: 7929 - DNA, 2832 bp, Pseudomonas aeruginosa
  CDS (1)...(2832)
atgaccgactacaaagcgacgctaaaccttccggaaaccgccttcccaatgaaagccggcctgccccagcgcgagccggaaaccctgaagttctggaacgacatcggtctgtaccagaagctgcgggccattggcggcgaccgtccgaagttcgtcctgcacgatggccctccgtacgccaacggcagcattcacatcggtcacgcggtcaacaagattctcaaggacatcattgtccgctccaagaccctggcgggctacgacgcgccctatgtcccgggctgggattgccacggcctgcccatcgagcacaaggtcgagaccacccacggcaagaatcttccggcggacaagacccgcgaactgtgccgcgaatacgcggccgagcagatcgaagggcagaaggccgacttcattcgcctgggcgtgctcggcgagtgggacaacccctacaagaccatgaatttcgccaacgaggcgaacgaaatccgcgccctcgcggaaatggtcaagcaggacttcgtgttcaagggcctgaagccggtcaactggtgcttcgactgtggttcggcgctggccgaggccgaggtcgagtacgccgacaagaagtcgccgaccatcgacgtcggcttcccggtggcggatgccgacaagctggccgcggccttcggcctggcggccctggacaagccggcgcagatcgtcatctggaccaccacgccctggaccatcccggccaaccaggcgctgaacgtgcatccggagatcgactacgcgctggtcgatgccggcgatcgctacctggtgctggccgaggccctggtcgagtcctgcctggcgcgctaccagcgcgagggcaaggtggtcgccaccgccaagggcgaggcgctggaactgatcaacttccgccatccgttctacgagcgcctgtcgccggtctacctggccgactacgtggccctcgacgccggcaccggtatcgtccactcatcgccggcctacggcgaagacgacttctacacctgcaagcgctacgggatgagcaacgacgacatcctcagcccggtgcagagcaacggcgtctacgtcgactcgttgccgttcttcggcggtcagttcatctggaaggccaaccccaacgtggtggccaagctggaagaggtcggcagcctgctggcccacgaaaccatcaatcacagctatatgcactgctggcggcacaagacgccgctgatctatcgcgccaccgcgcagtggttcgtcggcatggacaagcagcccaggcagggtgcttccctgcgcgagcgagcgctggaagccatcacccagaccgaattcgtcccgggctggggccaggcgcgtctgcacggaatgatcgccgggcgtcccgactggtgcatctcgcgccagcgcaactggggcgtaccgatcccgttcttcctgcacaaggccagtggcgaactgcatccacgcaccgtggagctgatggaagaggtcgcgcagcgagtcgagaaggaaggcatcgaagcctggttcaagctcgacgccgccgagctgctcggcgaggaggccgcgcagtacgagaagatcaacgacaccctggacgtctggttcgactccggcaccacccattggcacgtgctgcgtggttcccaccggatcggccatgccagcggcccggtcgccgatctctacctggaaggttccgaccagcaccgcggctggttccactcctcgctgctgaccggctgcgcgatcgacaaccatgcgccgtaccgccagttgctgacccacggtttcaccgtcgacgagtccggccgcaagatgtccaagtcgctgggcaacaccgtggtgccgcagaccgtcatcgataccctgggcgccgacatcctgcgcctgtgggtggcttcgaccgattactcgggcgagatcgcggtatcccagcagattctccagcgtagcgccgatgcctaccggcggatccgcaataccacgcgcttcctgctgtccaacctgaacggtttcgatccggccacggatctgctgccgccccaggaaatgctggccctggatcgctgggcggtcgatcgcgccctgctcttgcagcgcgagatcgaagaggcgtaccgcgagtaccgcttctggaacgtctattccaaggtgcacaacttctgcgtacaggagctgggcgggttctacttggacatcatcaaggaccgccagtacaccaccggcgccaacagcgtcgcccggcgctcctgccagaccgcactgttccacatcgccgaggccctcgtacgctggatcgccccgatcctggcgttcaccgccgaggaagtctggaagttcctgcccggcgagcgcgccgagtcggtaatgctcgccacctggtacgacggcctcaacgaactgccggccgacgtgacactgaatcgccagtactgggaacaggtcatggcggtgaaggccgcggtcaacaaggagctggagaaccagcgcgcggccaaggccgtgggcggcaacctgcaggccgaggtcaccctgtatgcggaagacgcgctgcaggcccaattggccaagctgggcaacgagctacgcttcgtcctgatcacctcgaccgcgaccctggcgccgctgtcggcggctccggccgacgcggtggacagcgaagtcgccggcctcaagctgaaagtggtcaagtcgacccacgccaagtgcggtcgttgctggcaccatcgcgaggacgtcggtcagcacgctgcgcatcctgacctgtgcggtcgctgcatcgagaacatcgaaggcagcggcgaggttcgccactatgcctga

SEQ ID NO: 7930 - DNA, 1221 bp, Pseudomonas aeruginosa
  CDS (1)...(1221)
atgaaattcgtcgatgaagtatcaatccacgtgaaagccggtgacggcggcaatggcctcatgagctttcgtcgcgagaagttcatcgaaaagggcggtcccaacggcggcgacggtggcgacggcggttccatctatctggaagccgacgtcaacctgaacaccctggtcgactatcgctacacccgccgtttcgatgcccagcgcggcgagaacggcggcagcaaggactgcaccggggccaagggcgacgacctgatcctgccggtgccggtcggtaccaccgtgatcgacgccaatacccaggaaatcatcggcgacctgaccgagcccggtcagcggctgatggtcgctcagggcggctggcacggcctcggtaacacccgtttcaaatccagtaccaatcgggcgccgcgccagaccaccccgggcaagccgggtgaggcgcgcgacctcaagctggaactgaaggtgctggccgacgtcggcctgctgggactgccgaatgccggcaagagcactttcatccgtgcagtgtccgcggccaagccgaaggtggccgactatccgttcaccaccctggtgccgaacctcggcgtggtcagtgtcggtcgctacaagagcttcgtggtcgccgacattcccggcctgatcgaaggtgccgccgaaggcgccgggctgggcatccgcttcctcaagcatctggcgcggacccgcatcctcctgcatctggtggacatggcgccgctggacgaaagcgatccggccgatgccgccgaggtcatcgttcgcgagctgggtcgcttcagtccggcgctgaccgagcgcgagcgctggctggtgctgaacaagatggaccagatcctcgatccggccgagcgcgaggcgcgcaagcaggcggtgatcgagcggttgggctgggaaggcccggtctatgtgatctccgccctggagcgcgatggcaccgaggcgctcagccaggacatcatgcgctatctcgacgagcgtaccctgcgcctggaagaagatccgcagtatgccgaggaactggccgaactcgaccggcgtatcgaggacgaggcgcgggcccgtctgcaggccctggacgatgcgcgcgcgctgcggcgttcgggtctgaagaacgccggtgcggtggatgacgatgatttcgatgatgaggaagacgacggcgacggtccggagatcttctacgttccctga

SEQ ID NO: 7931 - DNA, 258 bp, Pseudomonas aeruginosa
  CDS (1)...(258)
atggcacacaaaaaagctggcggttctacccgcaacggccgcgactcagaaagtaaacgccttggcgtgaaactgttcggcggccaggctgtaaaggctggcaacatcctggttcgtcagcgcggcaccaaattccacgccggttacggcgttggcctgggcaaggaccacaccctgttcgcgaaagtggacggcgtggtcaagtttgagaccaaaggcgcctttggtcgcaaatacgtgagcatcgttgctgcctaa

SEQ ID NO: 7932 - DNA, 312 bp, Pseudomonas aeruginosa
  CDS (1)...(312)
atgtacgcagtgattgttaccggtggcaagcagcacaaagtcaccgaaggcgaattcctcaaggtcgagaaactcgacgtcgctaccggcgaagcgatcgatttcgaccgcgtcctgctggttgccaatggcgaagacgtgaaaatcggcctgccggtcgtcgaaggtgcgaaggttaccgctgaagtggtttcccacggccgtcacgacaaggtccgcatcatcaagttccgccgtcgtaagcaccacatgaagcgtcagggccaccgccagtggttcactgaaatcaagatcaccggcattcaggcctaa

SEQ ID NO: 7933 - DNA, 969 bp, Pseudomonas aeruginosa
  CDS (1)...(969)
atgcaaccccaggccttctaccgcgtggtggcggaagatttcaccgccgtcgacgggatcatccgtcgccaactcacctcccgcgttcccctggtggaaaagatcggcgactacatcatctccgccggcggcaagcgcctgcgtccgctgctggtcctgctcgccggcaagaccctgggctacaagggcgacgacctctgcctgctggccgccaccatcgaattcctgcacacctccactctgctgcacgacgacgtcgtcgacgcctccggcctgcgccgcggccgctccaccgccaatgccctgtggggcaacgcgccgagcgtgctggtaggcgacttcctttatgcccgctccttcgaaatgatggtcgagctgggttccatgccggtcatgcgcatcatatcccaggccacccgggtgatcgccgagggcgaagtgctgcaattgtccaaggtacgcgacgccagcactaccgaagagacctacatggaagtgatccgcggcaagaccgcgatgcttttcgaggcctcgacccacagcgccgccgcgctgtgccaggccggcgaggaacagtccgaggcactgcgccgcttcggcgactacctgggaatcgccttccagctggtggacgacctgctcgactaccgcggcgacgccgcgaccctcggcaagaacgtcggcgacgacctcgccgaaggcaagcccaccctgccgctgatcgtcaccatgcgcgacggcaccgaggaacaggccgcgctggtacgcaaagccatccagcaaggtggcagccaggacctggagagcgtctgtgccgccgtcgaggcagccggcgccctggactataccgccaacctcgcccgcgactacgccgcccgcgccatcgcctgcctggatacgctgccggacaacgaataccgctccgccctggtcgaactcagcgaattcgctgtcgcccgaacccactga

SEQ ID NO: 7934 - DNA, 687 bp, Pseudomonas aeruginosa
  CDS (1)...(687)
ttgatctccctgcaggggatcggcaagggctacctcctgggggggcagccgctgcagatactgaaagacgtctgcctggacatctttcccggagaaagctgcgcgatcgtcggcgcgtcgggctcgggcaagagcaccctgctgaatatcctcggcctgctcgaccgcccggacagcggcgcctaccgcttcgccgagcacgacatcttcagcgtcgacggggaccgactggcggcgatccgcaaccgcctgatcggcttcgtcttccagagcttcaacctgttgccgcggctgaacgcgctggacaacgtcgcgctgcccctgagctatcgagggatgccgcgccgcgaggcactggagcgggccgaggcgatgctcgcccgggtcggcctggccgagcgcgccggccatcgtccggcggacctctccggcggccagcggcagcgcgtcgccatcgctcgcgcgctggtcggcgagccggcgctgatcctcgccgacgaaccaaccggcaacctcgacgcgagcaccgcgaaagaagtgctggagctgcttctcacgctcaaccgcgagcgccaggtgaccctggtggtggtcacccacgatcccggcctggcggcccgtctcgggcgccaactgacagtacggcatggcgaggtgcacgaggacctggcggaggcctgccggtga

SEQ ID NO: 7935 - DNA, 1665 bp, Pseudomonas aeruginosa
  CDS (1)...(1665)
ttggctcagtacgtctacaccatgcatcgggtcggcaagatcgttccgcccaagcgtgaaatcctcaaggacatctccctgtcgttcttccccggcgccaagatcggcgtgctcggcctgaacggcgcgggcaagtccaccctgctgcggatcatggccggcgtcgacaccgagatcgaaggcgaggcccggccgatgccggggatcaacgtcggctacctgccgcaggagcccaagctggacccgcaggccaccgtgcgcgacatcgtcgaagaggccgtcggccagatcaagcaggcccaggcgcggctggacgaggtctatgccgcctatgccgagccggatgccgacttcgacgccctggccgccgagcaggccaagctggaggcgatcctgcaggcatccgacggacacaacctggaacgccagctggaagtcgccgccgacgccctgcgcctgccgccgtgggatgccaaggtcgagcacctgtccggcggcgaaaagcgccgcgtagcgctgtgccgtctgctgctgtcggctcccgacatgctgctgctggacgaaccgaccaaccacctggacgccgactcggtggcctggctggagcatttcctgcacgacttccccggcaccgtggtggcgatcacccacgaccgctacttcctcgacaacgtcgccggctggatcctcgaactcgaccgtggccatggcatcccgttcgaaggcaactactccggctggctggaatccaaggccgcccgcctggcccaggaagccaagcaggaagcctcccacgccaaggccatgaaggccgagctggagtgggtacgccagggcgccaagggccgccaggccaagtccaaggcgcgcctgcagcgcttcgaggaactgcagtcgcaggaattccagaagcgcagcgagaccaacgagatctacatcccggccgggccgcgcctgggcgacaaggtcatcgaactgcacaacgtgaccaagggctacggcgaccgcgtgctgatcgacaacctgtccctgagcattcccaagggcgctatcgtcggtgtgatcggcggcaacggcgcgggcaagtcgaccctgttccgcatgctcaccggcaaggagcagccggactccggcaccatcgagatcggcgagaccgtgcagatcgccagcgtcgaccagagccgtgacagcctggaaggcaacaagaccgtgtgggagcaggtttccgacggtttcgagcagatcaagatcggcaactacgaagtcccctcgcgcagctatgtcggtcgcttcaacttcaagggcgccgaccagcagaagttcgtcaaggacctctccggcggtgagcgtggccgtctgcacctggccctgaccctgaagcagggcggcaacgtgctgctgctcgacgaaccgtccaacgacctcgatgtggaaaccttgcgcgcgctggaagaagcgctgctggacttccccggcgctgccatcgtgatctcccacgaccgctggttcctcgaccggatcgccacccacatcctctcctacgaggacgatggcaaggtgaccttcttcgaaggcaactacaccgagttcgaggccgaccgcaagaagcgcctgggcgatgctgcgtcccagccgcaccgcgtgcgctacaagaaactggcgtaa

SEQ ID NO: 7936 - DNA, 1254 bp, Pseudomonas aeruginosa
  CDS (1)...(1254)
atgttcagccgtgatttgaccctcgcccgctacgatgccgaactctttgccgcgatggagcaggaagcccagcgccaggaagagcacatcgagctgatcgcctccgagaactacaccagcccggcggtgatggaagcccagggttcggtgctgaccaacaagtacgccgaaggttatccgcacaagcgctactacggcggctgcgagtacgtcgatatcgtcgagcaactggccatcgaccgcgccaagcaactgttcggcgccgattacgccaacgtccagccgcacgccggctcccaggccaacgccgcggtctacctggccctgctgtcggccggcgacaccatcctcggcatgagcctggcccatggcggccacctgacccacggcgccagcgtctcctcctccggcaagctgtacaacgccgtgcagtacggcatcgacgccaatggcctgatcgactacgacgaagtcgagcgcctggccgtggagcacaagccgaagatgatcgtcgccggcttctccgcctattcccaggtcctcgatttcgcccgcttccgcgccatcgccgacaaggtcggcgcctacctgttcgtcgacatggcccacgtcgccggcctggtcgccgctggcgtctacccgaacccggtgccgttcgccgacgtggtcaccaccaccacccacaagaccctgcgcggtccgcgcggtggcctgatcctggcgcgcgccaacgaggagatcgagaagaagctcaactccgcggtattccccagcgcccagggcggtccgctggagcacgtgatcgcggccaaggcggtgtgcttcaaggaagccctgcagccggagttcaagacctaccagcagcaggtcctgaagaacgcccagagcatggcccaggtcttcctggaccgcggtttcgacgtggtttccggcggcacccagaaccacctgttcctgctctccctgatcaagcaggacatcaccggcaaagacgccgacgccgccctcggccgcgcgttcatcaccgtgaacaagaactcggtcccgaacgacccgcgctcgccgttcgtcacctccggcctgcgcatcggtaccccggccgtgaccacccgcggcttcaaggaagccgagtgccgcgagctggccggctggatctgcgacatcctcgagaacatgggcgacgagtccgtggtcgacggcgtacgcgagaaggtcaaggcgatctgcgccaagttcccggtctacggcaactaa

SEQ ID NO: 7937 - DNA, 1362 bp, Pseudomonas aeruginosa
  CDS (1)...(1362)
atggccaaggccaagcgcatgtacggctgcaccgagtgtggcgcgaccttcccgaaatgggccggccagtgcgcggactgcggggcctggaacaccctggtggagaccgtcgtcgaggccgcgccgagcggctccggccgcggcggctgggccggccagcaggccaacctgaagaccctggcggaggtcagcgtcgaggaaatgccgcgcttcacgaccggctccaccgaactggaccgggttctcggcggcggcctggtggacggttcggtggtgctgatcggcggcgatcccggcatcggcaagtcgaccattctcctgcagaccctttgcaacctggccagccgcgtcccggcgctgtacgtcaccggcgaggaatcccagcagcaggtggcgatgcgcgcgcggcgcctgtcgttgccggaagacaagctcaaggtgatgaccgagaccagcatcgaaaccatcatcgccaccgcgcgccaggagcagccgcgggtgatggtgatcgactcgatccagaccatcttcaccgagcagttgcaatcggcgccgggtggcgtcgcccaggtccgcgagagcgccgcgatgctggtgcgctatgccaagcagagcggcacggcgatcttcctggtcggccacgtgaccaaggaaggcgccctggccggcccgcgggtgctcgaacacatggtcgacaccgtactgtatttcgagggcgaatcagacggccgcctgcgcctgctgcgggcggtgaagaaccgcttcggcgcggtcaacgaactgggagtgttcggcatgaccgacaaaggcctgaaggaagtgagcaacccttcggcgatcttcctcacgcgggcccaggaagcggtgcccggcagcgtggtgatggccacctgggaaggctcgcggccgatgctggtggaggtccaggcgctggtcgacaccagtcacctggcgaatccgcggcgggtgaccctgggcctcgaccagaaccgcctggcgatgctgctggcggtgctgcaccggcacggcggtatcccgacctacgaccaggacgtgttcctcaacgtggtgggtggggtcaaggtgctggaaaccgcctccgacctggcgttgatggcggcggtgatgtccagcctgcgcaaccgcccgctgccgcacgacctgctggtgttcggcgaggtcgggctgtccggcgaggtgcgtccggtgccgagcggccaggagcgcctgaaggaagccggcaagcatggtttcaagcgtgccatcgtacccctcggcaacgcgccgaaggaggcgccggcgggattgcaggtgatcgccgtgacgcgcctcgagcaggccctggacgccctcttcgagtga

SEQ ID NO: 7938 - DNA, 1464 bp, Pseudomonas aeruginosa
  CDS (1)...(1464)
atgactgacctgaacaccagccagggccagcaattgcggcgggtgctcaagccgcgccacctgaacatgatcgccatcggcggctccatcggcaccgggctgttcgtcgcctccggggccacagtggccaccgccgggcccggcggtgcgctgctttcctacgcactgatcgggctgatggtgtacttcctcatgaccagtctcggcgagatggccgcctacatgcccgtttccggctcattctgtacctatggcagccggttcgtcgaagatggcttcggtttcgccctcggctggaactactggtacaactgggcggtgaccatcgccgcggagctggtggcggcgcaactggtgatgagtttctggttccccgaggtgccgggcatctactggagcgcgatcttcctgggcatcatgttcggcctcaacgtgatttccgcgcgcggcttcggcgagagcgaattctggttcgccctgatcaaggtagtcacggtggtgatcttcatcggcgtcggcctggcgaccatcttcggcatcatgcatggcgtggagtcgcccggcttcagcaacttcaccatgggcgacgcgcccttcgtcggcggcttccaggcgatggtcggggtggcgatgatcgccggcttctcgttccagggcaccgaactgatcggcatcgccgccggtgaatcggaaaatccgcggaagaacatcccgatcgccattcgccaggtgttctggcgcatcctgatgttctacatcctggcgatcttcgtgatcggcatgctgattccctacaccgacccgaacctgctgaagaacgatgccagcgacatcagcgtgtcgcccttcaccctgctcttcgagcgcgccggcttcgccgcggcggccggggtgatgaacgcagtgatcctctcggcgatcctctccgccggcaactccggcatgtacgcctcgacccggatgctctacaacctcgccctcgagggcaaggcaccgcgcctgttctcccgcgtctcgcgcagcggcgtgccacgcaacgcgctgtacgccactaccctggtcggcgccctgtgcttcctcacttcggccttcggcgacagcaccgtctacacatggctgctgaacacctcgggcatgtgcggcttcatcgcctggctgggcatcgccatctcccactatcgcttccgcaagggttacctggcccagggcggccgcctggaagacctgccctaccgggccaagctgttccccttcgggccgctgttcgccttcgccctgtgcatggtcatcaccctcgggcagaactaccaggcgctggtgggcgaacgcatcgactggatcggcctcctcgccacctatatcagcctgccgctgttcctggcgatctggctgggataccgctggaagaagcgcgcacgcttcgttcgctaccacgaaatggacgtcagcccgaccaatacctga

SEQ ID NO: 7939 - DNA, 639 bp, Pseudomonas aeruginosa
  CDS (1)...(639)
atgcccgtacatgagatccgccaccccctcatccgccacaaactgggcctgatgcgccgtgccgatatcagcaccaagaacttccgcgaactggcccaggaagtcggcgccctgctgacctacgaagcgaccaaggacctgcccctggaacagtacgaaatccccggatgggccggcccggtgacggtggagaagatctccgggaagaagatcaccgtggtgccgatcctgcgcgccggcatcggcatgctcgacggcgtgctcagcctgattcccggcgccaaggtcagcgcggtcggcgtcgcccgcaacgaagagaccctggaagcacgcacctacctggaaaaactggcgccggacatcgccgagcgacgctcgctgatcatcgacccgatgctcgccaccggtggctcgatggtcgccaccatcgacctgctgaagaaggccggcagcaaggaaatccgcgccatggtgctggtcgccgcccccgagggcatcgaggcggtacgcaaggcccacccggacgtgatcatctataccgcctcgatcgacgagaagctcgacgagaacggctacatcattccgggcctgggcgacgccggcgacaagatcttcggtaccaagcagaaggaagcctga

SEQ ID NO: 7940 - DNA, 918 bp, Pseudomonas aeruginosa
  CDS (1)...(918)
atgcacattctcttgaccggcggtaccggcctgatgggtcgccgcctgtgcgcccgctggcgacaggccggacaccggctgaccgtgttcagccggcggccgcagcaggtggaatcgctgtgcggcgtcggcgtgcgcggcatcgatcgtttcgacgagtacggcgaccagccgctcgacgcggtggtcaacctggccggcgagccgatcgcggacaaaccctggagccacaagcgcaaggcgctgctgtgggaaagccgggtacgccttaccgagcgcctggtggaatggctggacgctcgtgagcagcgcccggaccttctgttatcgggttctgcggtgggttggtatggcgacagcggcgagcgcccggtgaccgaggagggggcggcggccggcgaggatttcgctagcgagctatgcctagcctgggagcagatcgcccgcgaggcggagaagctcggcacccgtgtcgtgctgttgcgcaccggcctggtgctggcccccgagggcggcttcctcgggcgcctgttgccgctctaccggctcggcctgggcggaccgctgggtgacggccggcaatggatgccgtggattcatatcgaggatcaaatcgagctgatcgattttcttttgcggcggcccgatgccagcggtccctataatgcgtgcgctcccaacccggtgcgcaaccgcgatttcgccaaggccctgggccgggcgctgcacaagccggcgcggataccgacccccgggttcgtcctgcgcctcgggctgggagaaatgtccggattgctgctcggcggccagcgagccttgccgcaacgcttgcaggacgccggctaccgttttcaattcaccgacctggacgtggcgctggccgatgtcctggacgcccgacgaaaggatcaggcatga

SEQ ID NO: 7941 - DNA, 798 bp, Pseudomonas aeruginosa
  CDS (1)...(798)
atggcggttgagtcggccgcggtcggcgttttcgattccggggtcggcgggctcagcgtattgcgtgagattcgtgcgcgcctgccatccgaatcgttgctctacgtcgccgacaacgcccatgtgccctacggcgagaagagcgcggagtacatccgcgaacgctgcgagcggatcggtgatttccttctggagcagggcgccaaggctctggtactggcctgcaataccgcgacggctgcggctgcggcggaattgcgcgaacgttatccgcaggtgccgctggtggccatggagcctgcggtgaagccggccgcggcggccacccgcaacggtcgggtcggcgtcctggccaccaccggaactctgaagagcgcgcgtttcgccgccttgctcgaccgcttcgccagcgacgtacaggtcttcacccagccctgcccggggctggtcgagcgcatcgaagccggcgatctctatgggccgcaaacccgggcactgctggaacgcctgctggcgcccatcctcgaacagggctgcgatacgctgatcctcggctgtactcattatcccttcgtcaaacccctgctggccgagctgatcccggcggagatggcggtgatcgatacgggagcggctgtcgcccggcagctggagcgcgtattgtcggcgcgggcgctactggcctctggccaggccgcgacgccgcgtttctggaccagcgcgctgccggaggagatggaaaggatcctgccgatcctctggggaagcccggaaagcgtaggaaaattagtcgtttag

SEQ ID NO: 7942 - DNA, 942 bp, Pseudomonas aeruginosa
  CDS (1)...(942)
gtgtccaagatgatggtcttcacggggaacgctaaccccgatcttgcacgacgcgtcgtgcgtcagctgcacattcctcttggcgatgtttcagttggcaaattctccgatggcgaaatcagcgtcgaaatcaacgaaaacgtccgcggcaaggacgtattcctgattcagccgacctgcgcgccgaccaacgacaacctgatggaactggtggtgatggccgatgccttccgccgctcctcggccactcgtatcaccgctgtcatcccctacttcggctatgcccgccaggatcgccgtccgcgttccgcccgcgtggccatcagcgccaaggtagtggccgacatgctgaccgtcgtcggggtcaaccgtgtcctcacggtcgacctgcacgcggatcagatccagggcttcttcgatatcccggtagacaacatctacggttcgcccgtgctggtggacgatatcgaagaccagcgcttcgagaacctgatgatcgtctccccggacatcggcggcgtggtgcgcgcgcgcgccgtggccaagtccctgggcgtggatcttgcgatcatcgacaagcgtcgtcccaaggccaaccagtccgaagtgatgcacatcatcggtgacgtcgaaggccgtacctgcgtactggtagacgacatggtcgataccgccggcaccctcggtcacgccgccaaggccctgaaagagcacggcgccgccaaggtcatcgcctactgcacccacccggtgctgtccggccgtgccatcgagaacatcgagaaatccgtactggacgagctggtggtgaccaacaccatcccgctgtccgccgctgcccaggcctgtggccgcatccgccagctggacatcgctccggtcgttgcggaagccatgcgccggatcagcaacgaagaatcgatcagcgcgatgttccgctga

SEQ ID NO: 7943 - DNA, 1101 bp, Pseudomonas aeruginosa
  CDS (1)...(1101)
atgggattcaactgcggcatcgtcggcctgcccaacgtcggcaagtccaccctgttcaacgccctgaccaaatccggtatcgcggcggaaaacttcccgttctgcaccatcgagccgaacagcggcatcgtgccgatgcccgacgcgcgcctgaacgccctggccgagatcgtcaagcccgagcgcgtactgcccaccacaatggaattcgtcgacatcgccggcctggtggcgggcgcctccaagggtgagggcctgggcaacaagttcctcgccaacatccgcgagaccgacgccatcgcccacgtggtgcgctgcttcgaagacgacaacgtgatccacgtgtccaacagcgtcgaccccaagcgcgacatcgagatcatcgacctcgaactgatcttcgccgacctcgacagctgcgagaagcaactgcagaaagtcgcccgcaacgccaagggcggcgacaaggaagccctggcccagaaggccctgctggaaaagctcatcccccacttcaccgagggcaagccggcgcgttcgctgctgaagaacctcggtgacgaggagaagcgcctggtgcgcagcttccacctgctgaccagcaagccggtgatgtacatcgccaacgtcgccgaggacggcttcgagaacaacccgcacctggatgtggtgaaggccatcgccgaggaagaaggcgcggtggtggtgccggtgtgcaacaagatcgaagccgagatcgccgagctggaagacggcgaagagaaggacatgttcctcgagtccctcggtctcgaggaacccggcctgaaccgtgtgatccgtgccggctacggcctgctcaacctgcagacctacttcaccgccggggtgaaggaagtccgcgcctggaccgtccgcgtcggcgccaccgccccgcaggccgccggcgtgatccacaccgacttcgagaaaggcttcatccgcgccgaagtggtcgcctacgacgacttcatccagttcaagggcgaacagggcgccaaggaagccggtaaatggcgcctggaaggcaaggactacatcgtcaaggacggcgacgtgatgcatttccgcttcaacgtgtaa

SEQ ID NO: 7944 - DNA, 453 bp, Pseudomonas aeruginosa
  CDS (1)...(453)
atgagcgatgcgatttccttccgcccgatgaccgaggcggacctcgatgccgtgctgaaaatcgaatatgccgccttcagtcacccctggacccgtggcatcttcagcgaaggcctgaagaactaccattgctggctgatgttcgagggtagccagcaggtcggccatggcgtcatccagatcatcctcgacgaggcgcacctgctgaatatcacggtgaagcccgaaagccaggggcgtggcctcggtctgcgcctgctcgaacacctgatgcgcgaggcggccggccaccaggctcgcgaatgcttcctcgaagtgcgcgcttccaaccaggccgcctaccgcctctacgaacgctacggtttcaacgagatcggccgccgtcgcgactactaccccgccgtcggcgggcgcgaagacgccctggtcatggcctgtaccctgttcgactga

SEQ ID NO: 7945 - DNA, 1017 bp, Pseudomonas aeruginosa
  CDS (1)...(1017)
atgcgcgttttctacgataaagactgtgacctctcgatcatccagggcaagaaagttgccatcatcggctacggctcccagggccacgcccatgcctgcaacctgaaggactccggcgtcgacgtcaccgtgggcctgcgtagcggctccgccaccgtggccaaggccgaagcgcacggtctgaaggttgccgacgtgaagaccgccgtcgccgcagccgacgtggtcatgatcctcaccccggacgagttccagggccgcctgtacaaggaagagatcgagccgaacctgaagaagggcgccaccctggccttcgctcacggcttctccatccactacaaccaggtcgtcccgcgcgccgacctcgacgtgatcatgatcgcgccgaaggcaccgggtcacaccgtgcgttccgagttcgtcaagggcggtggcatccctgacctgatcgccatctaccaggacgcttccggcaacgccaagaacgtcgccctgtcctacgcctgcggcgtcggcggcggtcgtaccggtatcatcgaaaccaccttcaaggacgagaccgaaaccgacctgttcggtgagcaggccgttctctgcggtggttgcgtcgagctggtcaaggccggtttcgaaaccctggtcgaagccggttacgcgccggaaatggcctacttcgagtgcctgcacgagctgaagctgatcgtcgacctgatgtacgaaggcggcatcgccaacatgaactactccatctccaacaatgccgaatacggtgagtacgtaaccggtccggaggtgatcaacgccgagtcccgtgctgccatgcgcaacgccctgaagcgcatccaggacggcgagtacgcgaaaatgttcattaccgaaggtgcggccaactacccgtcgatgactgcctaccgccgcaacaacgccgctcacccgatcgagcagatcggcgagaagctgcgcgcgatgatgccgtggatcgcagccaacaagatcgtcgacaagagcaagaactaa

SEQ ID NO: 7946 - DNA, 492 bp, Pseudomonas aeruginosa
  CDS (1)...(492)
atgcgacacatcatttccctgctgctggaaaacgagccaggcgcattgtcccgcgtggtcggcctgttctcccaacgcaactacaacatcgaaagcctgaccgtggcgccgaccgaggacccgaccctgtcgcgtctgacgctgaccaccgtggggcacgatgaggtgatcgagcagatcaccaagaacctcaacaagctgatcgaagtggtcaagctggtggatctgtcggaaagcgcccatatcgagcgcgagctgatgctggtgaaggtcaaggccacgggcgcccagcgcgccgaggtcaagcgcaccaccgatatcttccgtgggcagatcgtcgacgtcaccagtagcgtctataccgtgcaactggcgggtaccagcgacaaactggacagcttcatccaggccatcggcactgcgtcgatcctggaagtggtccgcagtggcgtcactggcatcgcccgtggcgacaagactctgagcatctga

SEQ ID NO: 7947 - DNA, 1725 bp, Pseudomonas aeruginosa
  CDS (1)...(1725)
gtggagcttttatctggcgctgaaatggtcgtccgctcgttgcgcgacgaaggcgttaagtacatctacgggtacccgggtggtgccctcctgcatatctacgacgcgctcttcaaggagcacgacgtgacccacatcctggtgcgccacgaacaggcggctacccatatggccgacggctacgcccgcgccaccggcaagcccggtgtcgtgctggtgacttccggcccgggcgcgaccaacgccatcaccggtatcgccaccgcatacatggactccatcccgatggtgatcctgtcgggccaggtgccgagcaacatggtcggtaccgatgcgttccaggaaaccgacatggtcgggatctcccggccgatcgtgaagcacagcttcatcatcaagcatccctcggaaattcccgaggtgatcaagaaggccttctacctggcgcagtccggtcgtccggggccggtggtcgtggatattccgaaggacatgggcgacccgacgcagaaattcgaatattcctatccgaagaaggtcaagttgcgttcgtacagcccggccgttcgcggtcactcgggacagatccgcaaggccgccgagatgctcctggccgccaagcgcccggtggtctattccggcggcggcgtgatcatgggcaatgccgcggcgccgctgaccgagctggcgcagatgctcaacctgccggtgaccaacaccctgatgggcctcggcgggtatcccggcgcagaccgccagttcctcggcatgctcgggatgcatggcagcttcaccgccaacctggcgatgcatcacagcgacgtgatcctcgcggtcggcgcgcgtttcgacgaccgggtcatcaacggtgcggcgaagttctgcccgaacgccaagatcatccacatcgacatcgatccggcgtcgatttccaagaccatcaaggccgacatcccgatcgtcggcccggtggacagcgttctcaccgaaatggtcgcgatcgtcagggaaatcggcgagaccccgaaccaggatgcccaggctgcctggtggaagcagatcgacgagtggcgtggtaaccgtgggttgttcccgtacgacaagggcgacggcagcatcatcaagccgcagaccgtcatcgagacgctctacgaggttacccatggcgatgccttcatcacctccgatgtcggccagcaccagatgttcgcctcgcagtactacaagttcaacaagcccaatcgctggatcaactccggcggtctcggcaccatgggcttcggcttcccggcggcgatgggcatcaagctcaacttcccggacgacgatgtcgcctgcgtgaccggcgagggcagtatccagatgaatatccaggaactgtctacctgcctgcagtacgacctgccggtgaagatcgtcaacctgaacaatggtgccctgggcatggtccgccagtggcaggacatgcagtacaacagccgttattcgcattcctacatggaatccctgccggacttcgtcaagcttgccgaagcctacgggcatgtcggcatgcgcatcaccgacctgaaggatctgaagccgaagatggaggaggcgttcgccatgaagaatcgcctggtcttcctcgacatccaggtggacgccagcgaacacgtctatccgatgcagatccgtgacggcgcgatgcgcgacatgtggctgagcaagacggagcgtacctga

SEQ ID NO: 7948 - DNA, 2325 bp, Pseudomonas aeruginosa
  CDS (1)...(2325)
atgacgcgtccccgatccccccgttcccgtaacagcaaagcacgcccggcacccggcctgaacaaatggctcagctgggctctcaagctcggcctcgtcggcctggtgctcctcgccggcttcgccatctatctcgatgccgtggtgcaggagaaattctccggccggcgctggaccatcccggcgaaggtctatgcccgcccgctggagctgttcaacggcctgaagctgagcagggaagacttcctgcgcgaactcgacgccctcggctaccgtcgcgagcccagcgtgagcggccctggaaccgtatcggtggcggccagcgcggtcgaactcaatacccgtggcttccagttctacgaaggcgcggaaccggcccagcgcgtgcgcgtgcgcttcaacggcaactacgtcagcgggctgagccaggccaacggcaaggaactggcggtggcgcgccttgagccgctgctgatcggcggcttgtatccggcgcaccatgaggatcgcatcctggtcaagctcgaccaggtgccgacctacctgatcgacaccctggtcgcggtcgaggatcgcgacttctggaaccaccatggtgtgtcgctgaaatccgtggcgcgggcggtgtgggtcaacaccacggccggccagttgcgccagggcggcagcaccctgacccagcagttggtgaagaacttcttcctgagcaatgagcgcagcctgagccgcaagatcaacgaagcgatgatggcggtgctgctggaactgcactacgacaagcgcgacatcctcgagtcctatctcaacgaggtgttcctcggccaggatgggcaacgagcgatccatggcttcggcctggccagccagtatttcttcagccagccgttggccgagctcaagctcgaccaggtggcgctgctggtcggcatggtcaaggggccgtcctacttcaacccgcggcgttacccggatcgtgcgctggcgcggcgcaacctggtgctcgacgtgctcgccgagcagggcgtggcgacccagcaggaagtcgacgccgccaagctgcgcccgctcggcgtgacccggcagggcagcatggccgacagctcctatccggccttcctcgacctggtcaagcgccagttgcgccaggactaccgcgacgaggacctgactgaggaagggctgcgcatcttcaccagcttcgatccgatcctgcaggagaaggccgagacctccgtcaacgaaacgctcaagcgtctcagtgggcgcaagggggtcgaccaggtcgaggcggcgatggtcgtgaccaatccggaaaccggtgagatccaggccctgatcggcagtcgcgacccgcgcttcgccggcttcaaccgggccctggacgcggtgcggccgatcggttcgctgatcaagccggcggtctacctgaccgctctcgagcggccgagcaagtacaccctgaccacctgggtacaggacgagcccttcgcggtgaaaggccaggacggccaggtctggcgaccgcagaactacgaccggcgctcgcatggcacgatcttcctgtaccagggcctggcaaactcctacaacctgtccaccgccaagctcggcctcgacgtcggtgtgcccaacgtgctgcagaccgtcgcccggctgggtatcaaccgtgactggccggcctatccgtcgatgctgctgggcgccggttcgctcagtccgatggaggtcgccaccatgtaccagaccatcgccagcggcggcttcaacacgccgttgcgggggatccgcagcgtcctcactgccgacggccagccgctcaagcgctatccgttccaggtcgaacagcgcttcgactcgggcgccgtctacctggtgcagaacgccatgcagcgggtcatgcgcgaaggcaccgggcgttcggtgtacagtcaattgccgtcgtcgctgaccctcgccggcaagaccggcaccagcaacgactcgcgcgatagctggttctccggtttcggcggcgacctccaggctgtggtctggctcggtcgcgacgacaacggcaagacgccgcttaccggcgccaccggtgccttgcaggtgtgggccagcttcatgcgcaaggcgcatccgcaatcgctggaaatgccgatgccggagaacgtggtgatggcctgggtcgacgcgcagaccgggcagggctcggcggcggattgcccgaatgccgtacagatgccctatattcgtggcagcgagcccgcccagggcccaggctgcgggagccagaaccccgccggcgaggtgatggactgggtacgtggctggctgaattga

SEQ ID NO: 7949 - DNA, 801 bp, Pseudomonas aeruginosa
  CDS (1)...(801)
atgcctgatgtaaccctgaccaccctgcaagggttgaagcagagcggcgagaagatcgccatgctgacctgctacgacgccaccttcgcccacaccgccagccaggccggcgtggacgtgcttctggtcggagattcgctcggaatggtattgcagggtcacgacagcaccctgccggtcagcaacgaggaaatggcctatcacacggcctgcgtgaaacgcggtaacaaaggttccctgatcgtcaccgacctggccttcgaatccagccattccgtggcccagacccttgccgacgcggtccgcctgatgcaggccggcgcacacatggtcaagctggagggtggggtctggctggcggagccgatcgcccgcctggcacagatgggcgtgccggtctgcgcgcatctcggcctgaccccgcaggcggtcaacctgttcggcggcttcaaggtccagggccgccaggaaacccaggcgcgccagttgcgcgccgatgccatcgccctggagcaggccggcgccgccatgctgctgctggagtgcgtgcccagcgtgctggccgaagagatcacccaggcggtgaagatcccggtgatcgggattggcgccggtgcggcgaccgatggccaggtgctggtcatgcacgacatgctcggtctctcgctgaccggccgctcgcccaagttcgtcaaggatttcatgcaaggccaggagagcatcccggccgccatcgcggcctatgtccgcgccgtcaaggacgtgtccttccccgccgccgaacacggattcaacgcatga

SEQ ID NO: 7950 - DNA, 1938 bp, Pseudomonas aeruginosa
  CDS (1)...(1938)
atgttcgagatcagcgtccacccggtgccggacgccgtccgccagcgtgcctacctgaacgacgacgactaccagcgcctgtaccgccaatccgtcgagaaccccgacgagttctggggcgagcaggccaaggccttcctcgattggttcaagccctggcacagcgtccaccacggcgacctgaggaaaggccaggccacttggttcaagggcggccagttgaacgtcgcctacaactgcatcgatcgccacctggaacgccgcggcgaacagatcgcgatcgtctgggaaggcgacaaccccagcgaatccgcgcacatcacctaccgcaagctgcaccacaacgtctgccgcctggctaacgtgctgaagagccgcggcgtggaaaagggcgaccgggtctgcatctacatgccgatgattcccgaggccgcctacgccatgctcgcctgcgcccgtatcggggcggtgcactcggtggtgttcggcggcttctcgccggactcgctgcgcgaccgcatcctcgatgccgactgccgcaccgtgatcaccgccgacgagggcgtgcgcggcggcaagtacatcccgctgaagcagaatgtggaaaaggcactgaaggactgcccggacgtctctaccgtggtggtggtcgagcgcacccagggcgacataccctgggtcgaaggccgcgacatctggtaccacgaggcgctccacgcggcctcagccgactgcccggcggaagcgatggacgccgaggacccgctgttcatcctctatacctccggcagcaccggcaagccgaagggcgtgttgcacaccaccgggggctacctgctcggcgcggcgatgacccacaagtacgtgttcgactaccacgatggcgacgtctactggtgcaccgccgacgtcggctgggtcaccggacacagctatatcgtctacggcccgctggccaacggcgccaccaccctcatgttcgagggcgtgcccaactacccggacgcctcgcgcttctggcaggtgatcgacaagcaccaggtgaatatcttctacaccgcgccgaccgcgatccgcgcgctgatgcgcgaaggcgacgccccggtccgccagacctcgcgcagcagcctgcgcctgctcggctcggtgggcgagccgatcaacccggaggcttgggagtggtactaccaggtggtcggcgagaagcgctgccccatcctcgatacctggtggcagaccgagaccggcagcatcctgatcaccccgttgcccggcgccactgcgctaaagccaggctcggctacccgcccgttcttcggcgtgcaacccgtgctgctcgacgagaaaggcaaggaaatcgacggcgcgggcagcggcgtactggcgatcaaggccagttggccgagtcagatccgcagcgtctacggcgaccaccagcggatgatcgacacctacttcaagccctaccccgggtattacttcagcggcgacggcgcgcgccgcgacgaggacggctactactggatcaccggccgggtcgacgacgtgatcaatgtctccggacaccggatcggcaccgccgaggtcgagagcgcgctggtcctgcacgatgcggtggccgaggcggcagtggtcggctgcccgcatgacgtgaagggccaggccatctacgcgttcgtcaccctgatggccggcagtcagcccagcgaggcgctacaacaggaattgctggccctggtcggcaaggagatcggcagcttcgccaagccggatcacctgcaatgggcgcccagcctgccgaagacccgctccggcaagatcatgcggcgtatcctgcgcaagatcgcctgcaacgagctggacagtctcggcgatacctcgaccctggccgatccgggagtggtgcaggggttgatcgacaaccgcctcaaccgctga

SEQ ID NO: 7951 - DNA, 198 bp, Pseudomonas aeruginosa
  CDS (1)...(198)
atgaattccgatgtgatcaaaggtaagtggaagcaactcaccggcaagatcaaggagcgttggggcgatctgaccgacgacgatctccaggctgccgacggacatgccgaatacctggtcggcaagctgcaggaacgctatggctggtccaaggaaagggccgaacaggaagttcgcgacttcagcgaccgcctgtga

SEQ ID NO: 7952 - DNA, 2106 bp, Pseudomonas aeruginosa
  CDS (1)...(2106)
gtgaacccggtaaccaagcaattccagttcggtcagtcgaccgtcactctcgagaccggccgtatcgctcgccaggccaccggcgccgtactggtcaccatggacgacgtcagcgtgctggtcaccgtggtcggcgccaagtcgccggccgaaggccgcgacttcttcccgctgtccgtgcactaccaggaaaagacctacgccgcaggccgtatccccggtggtttcttcaagcgtgaaggacgtccttccgagaaggaaaccctgacctcgcgcctgatcgaccgtccgatccgtccgctgttccccgaaggtttcatgaatgaagtgcaggtcgtctgcaccgtcgtctccaccaacaagaagtccgatccggacatcgccgcgatgatcggcacctccgccgccctggcgatctccggcattccgttcgccggcccgatcggcgccgcccgcgtcggtttccatccggaaatcggctacatcctcaaccccacctacgagcaactgcagagttccagcctcgacatggtcgtggccggtaccgaagacgccgtgctgatggtggagtccgaggccgacgaactgaccgaagaccagatgctcggtgccgtgctgttcgcccatgacgagttccaggcggtgatccgtgccgtcaaggagctggccgccgaagctggcaagccggcctgggactggaaagccccggcggaaaacaccgtgctggtcaacgccatcaaggcagagctgggcgaagcgatctcccaggcctataccatcaccatcaagcaggaccgctacaaccgtctgggcgagctgcgcgaccaggccgtggccctgttcgccggcgaggaagagggcaagttcccggcttccgaggtcaaggacgtattcggcctgctggaataccgcaccgttcgcgagaacatcgtcaacggcaagccgcgtatcgacggtcgtgacacccgtaccgtgcgtccgctgcgcatcgaagtcggcgtgctcggcaagacccacggttccgcgctgttcacccgtggcgaaacccaggccctggtcgttgcgaccctcggcaccgcgcgtgatgcccagctgctggataccctggaaggcgagcgcaaggacgccttcatgctgcactacaacttcccgccgttctcggtaggcgagtgcggccgcatgggcagcccgggtcgtcgtgaaatcggccatggccgtctggcccgtcgtggcgtcgccgccatgctgccgacccaggacgagttcccctacaccattcgcgtggtttccgagatcaccgagtccaacggttccagctcgatggcctccgtgtgcggcgcctccctggcgctgatggatgccggtgtgccggtcaaggcgccggtcgccggtatcgccatgggcctggtcaaggaaggcgagaagttcgccgtcctgaccgacatcctcggtgacgaggaccacctgggcgacatggacttcaaggttgccggtaccgacaagggcgtcaccgccctgcagatggacatcaagatcaacggtatcaccgaagagatcatggagatcgccctgggccaggccctggaagctcgcctgaacatcctcggccagatgaaccaggtcatcgccaagccgcgcgccgagctgtccgagaacgccccgaccatgctgcagatgaagatcgactcggacaagatccgcgacgtcatcggcaagggcggcgcgaccatccgtggtatctgcgaagagaccaaggcctcgatcgacatcgaggacgatggcagcgtgaagatctacggcgaaaccaaggaagccgccgaggccgccaagctgcgcgtcctggcgatcaccgcggaagccgagatcggcaagatctacgtcggcaaggtggagcgcatcgtcgacttcggtgccttcgtcaacatcctgccgggcaaggacggcctggtgcacatctcgcagatcagcgacaagcgcatcgacaaggtcaccgacgtgctgcaggaaggccaggaagtgaaggtcctggtgctcgacgtggacaaccgtggccgcatcaagctgtcgatcaaggacgtggctgccgccgaagcttccggcgtgtaa

SEQ ID NO: 7953 - DNA, 270 bp, Pseudomonas aeruginosa
  CDS (1)...(270)
atggcactgagcgttgaagaaaaagcgcagatcgttaacgaatacaagcaagctgaaggcgacaccggttccccggaagtgcaggtagccctgctgtccgccaacatcaacaagctgcaggatcacttcaaggccaacggcaaggatcaccattcccgccgtggtctgatccgtatggttaaccagcgccgtaagctgctggactacctgaagggcaaagacgtgtctcgctacactgccctgatcggccgtctgggtctgcgtcgctaa

SEQ ID NO: 7954 - DNA, 1482 bp, Pseudomonas aeruginosa
  CDS (1)...(1482)
atgagcaaagaagtactgctggttgttgagtcggtatccaacgaaaagggcgtaccggccggcgtgattttcgaggcgctggagctggctctggcgaccgccaccaagaaacgtttcgaggacgaggtcgacctgcgcgtcgagatcaatcgtcataacggcagctacgagactttccgtcgttggcacgtcgtcgccgacgaggactaccaggaccccgccaccgagatcaccgtcgaggacgtccaggagcagaagccgggcgcgaaggtcggcgaggtcatcgaagaaaagatcgaatccatcgagttcggccgcatcgctgcgcagactgccaagcaggtcatcgtgcagaaggtccgcgaggccgagcgcgcccaggtggtcgatgcctaccgcgagaaggtcggcgagatcatttccggtaccgtgaagaaggtcacccgcgacaacgtcatcgtcgatctcggcaacaacgccgaggcgctgctggcccgcgaccagatcattccacgcgagaccttccgcgttggcacccgcgtgcgtgccctgctgaaggagatccgtaccgagaaccgcggtcctcagctggtcctgtcgcgtaccgcgccggaaatgctgatcgagctgttccgcatcgaagtaccggaaatcgccgagcagttgatcgacgtgatggccgccgcccgtgacccgggctcgcgcgccaagatcgccgttcgttccaaggacaagcgcatcgacccgcagggcgcctgcatcggtatgcgcggttcgcgcgtccaggcggtatccggcgagatcggtggagagcgggtggacatcgtcctgtgggacgacaacccggcgcaattcgtgatcaacgccatggctccggccgaggtggcggcgatcatcgtcgacgaggatacccataccatggatatcgccgtcgccgaggacaatctggcgcaggctatcggccgcagtggccagaacgtccgtctggccagccagttgaccggctggaccctgaatgtgatgaccgaggcggatatccaggccaagcaacaggccgagaccggggatatcctgcagcgcttcgtcgacgagctggatgtcgacgaggaactggcccaggtactggtggaagagggcttcacgactcttgaggaaatcgcctacgtaccgatggaagagatgctcagcatcgatggcttcgacgaagacatcgtcaacgagctgcgctcccgtgccaaggatcgcctgctgaccaaggccattgcgaccgaagagaagctcgccgacgcacaaccggcagaagacctgctcagcctcgatggcatgagcaaggagctggccctggacctggcgctgcgtggcgtaaccacccgtgaagatctggccgagcaatcgatcgacgatctgctcgacatcgacggcatggacgaagagcgtgccggcaagttgatcatggccgcccgggcccattggttcgagtaa

SEQ ID NO: 7955 - DNA, 756 bp, Pseudomonas aeruginosa
  CDS (1)...(756)
atgcgtcgacccttggtggccggtaactggaaaatgcacggtacgcattccagtgtggccgagttgatcaaaggcttgcgtcagctggcgttgccgagcggagtcgatgtggctgtgatgccgccttgcttgttcatcagccaggtcatccagggcctggccggcaaggcgatcgatgtaggtgcgcagaacagcgccgtcgagccgatgcaaggcgcgctgaccggtgagactgctcccagtcagttggcggatgtcggttgtagcatggtccttgtgggccactcggagcgtcgcctgattctcggcgagagtgacgaggttgtgagtcgcaagtttgccgcggctcagtcgtgcggcctggtgccggtgctgtgtgtcggggagacccgggcggagcgcgaggcgggcaagacgctggaggttgtcgcaaggcagctgggaagcgtgatcgacgagttgggtgttggagcttttgctcgcgcagtcgtggcttacgagccggtctgggcgatcgggaccgggttgaccgcgtcccccgcgcaagcccaggaagtgcacgcggcgatccgcgcgcaactggcagcggaaaatgccgaggtcgcaaaaggtgtgcgactcctttacggcggcagtgtaaaggcggcaagtgcagccgagttgttcggcatgccggatatcgatggggggctggtaggtggagcctccctcaatgcggatgagttcggcgcgatctgtcgtgccgcgggaagctga

SEQ ID NO: 7956 - DNA, 1338 bp, Pseudomonas aeruginosa
  CDS (1)...(1338)
atgagcagaaaatacttcgggactgacggtatccgtggtcgtgttggcgagtttccgattactccggacttcgttctcaagctgggctgggcggtgggcatggccttccgccggcagggcaactgccgggtcctgatcggcaaggacacgcgcagctcgggttacatgttcgagtcggccttcgaggccgggctctccgcttccggcgccgataccctgttgctgggaccgatgcctacccccggcatcgcctacctgacgcggactttccacgccgaggccggggtggtgatcagcgcttcgcacaatccccacgacgacaacggcatcaagttcttctccgggcaggggaccaagctgccggacgacgtcgagctgatgatcgaggaactgctcgatgcgccgatgaccgtggtggagtccgcccgtctcggcaaggtttcgcggatcaatgacgcggcggggcgctacatcgaattctgcaagagcagcgtgccgaccagcaccgacttcaacggtctcaaggtcgtgctcgactgcgccaacggcgctacctacaagatcgctcccagcgtcttccgggaactgggcgcggaagtgacggtgctggcggccagcccgaatggcctgaacatcaacgacaagtgcggttccactcacctggatggcctgcaggctgcggtggtcgagcaccatgccgacctcggcatcgccttcgacggcgacggcgaccgggtgatgatggtcgaccataccggtgcggtcgtggatggcgacgaactgcttttcctcatcgcgcgcgacctgcaggaaagcgggcggctgcaaggtggtgtggtcggcaccctgatgagcaacctcggcctggagctggctttgcaggaactgcatatcccgttcgtgcgggcgaaggtcggcgatcgctatgtgatggccgaactgctggctcggaactggatgctgggaggggagaattcggggcatatcgtctgctgccagaacaccacgacgggcgatgccatcatcgcggcgctacaggtgctgatggcgctcaagcatcgcggccagaccctggcagaggcgcgccaggggattcgcaagtgcccccaggtgttgatcaatgtgcgcttcaagggcgaaaacgatccgctcgagcacccctcggtgaaggaggccagcgtccgcgtcaccgagcaaatgggcggtcgcggtcgtgtcctgctgcgcaaatccggcacagagccgttggtccgggtgatggtcgagggcgacgaggaagctagcgttcgtgcccacgccgaacagctggcaaaaattgtttctgaggtatgtgcttga

SEQ ID NO: 7957 - DNA, 852 bp, Pseudomonas aeruginosa
  CDS (1)...(852)
atgagcaatccgcaatacccgacccgactgccttgcggcagtcgggttcttgatttggcccgcccacatgtcatgggcatcctcaatgtcacccccgattccttttccgacggcggccgttacgaccggctggacgatgccctgcggcatgccgagcgcatggtgctggaaggcgcaacgctcatcgacgtcggcggcgagtcgacccgtcccggtgcgcgcagcgtttctccgacggaggagctggagcgggtcgctccggtagtcgaacgcatcgcccgcgaactggacgtcgtgatttcggtggatacctccacgcctgcggtcatgcgcgaaactgcgcgtctcggagcgggtctgatcaacgacgtccgttcgctgcagcgcgacggtgcgttggatgctgcggtggatagcggcctggcggtctgcctcatgcacatgcgtggagaaccgcagaccatgcaggatgcgcctgcctaccaggatgtggtggcggaagtcggcgcgttcctgcaggagcgtgtggatgcctgcgtggcggccggaatcgaccgcgagcggctgttgctggatccgggtttcggttttgccaagacactggagcacaacctggtgctgttcaggcatctgcaggcgctccatggtctgggcctgccgttgttggtcggcgtttcgcgcaagagcatgatcggcaaggtactggggcgggaggtggacgaacgcctctacggcagtctcgcgctggcggccctggcgctggccaagggcgcacggataattcgagtgcatgacgtggcggcgaccgtcgacgtgatgcgaatgatctccgccgttgaaatggcggattga

SEQ ID NO: 7958 - DNA, 1920 bp, Pseudomonas aeruginosa
  CDS (1)...(1920)
atggcaaagaatctgattctgtggctgatcatcgcggcggtactggtgaccgtgatgaacaatttctcgagcccgagcgagccacagacgctgaactactcggacttcatccagcaggtcaaggatggcaaggtcgagcgagtgaccgtggatggctatgtcatcaccggcaagcgtagcgacggcgataccttcaagaccatccgcccggcgatccaggacaacggcctgatcggcgacctggtcaacaacaacgtcgtggtcgagggcaagcagcccgaacagcagagcatctggacccagttgctggtcgccagcttcccgatcctggtgatcatcgccgtcttcatgttcttcatgcgccagatgcagggtggcggcggcggtcgcggcggcccgatgagcttcggcaagagcaaggcgcgcctgctgtccgaggaccaggtcaagaccaccttcgctgacgtcgccggctgcgacgaggccaaggaggaggtcagcgagctggtcgagttccttcgcgatccgggcaagttccagcgcctgggcggccgtatcccgcgcggcgtgctgatggtcggcccgcccggcaccggcaagaccctgctggccaaggccatcgccggcgaagccaaggtgccgttcttcaccatttccggttccgacttcgtcgagatgttcgtcggcgtgggcgcctcccgtgtccgcgacatgttcgaccaggccaagaagcacgcgccgtgcatcatcttcatcgacgagatcgacgccgtcggccgccatcgcggcgccggcctgggcggcggtcacgacgagcgcgagcagaccctcaaccagttgctggtggagatggatggcttcgagatgaacgatggcatcatcgtcatcgctgccaccaaccgtccggacgttctggacccggcgctgctgcgtccgggccgcttcgaccgccaggtggtggtcggcttgccggatatccgcgggcgcgaacagatcctcaaggtgcacatgcgcaaggtgccgctgggcgaccatgtcgatcctgccgtcatcgcccgcggtacgcccggtttctccggcgccgacctggccaacctggtcaacgaggcctcgctgttcgccgcgcgctccaacaagcgcatcgtcgacatgcgcgagttcgagctggccaaggacaagatcatgatgggcgccgagcgcaagaccatggtcatgtccgagaaggagaagcgcaacaccgcctaccacgaggccggccacgccatcgtcggtcgcctggtgccggagcatgacccggtctacaaggtgtccatcattccgcgcggacgtgccctgggcgtgaccatgttcctccccgaggaagatcgctacagcctgtccaagcgcgcgctggaaagccagatctgctcgctgttcggcggccgtatcgcggaagagatgaccctcggcttcgaaggcgtcaccactggcgcttccaacgacatcatgcgtgctacccagttggcgcggaacatggtgaccaagtggggtctgtccgagaaactcggcccgctgatgtacgcggaggaggagggcgaggtgttcctcggccgtagcgccggcagccagcacgccaatgtgtcgggcgagaccgccaagatgatcgaccaggaagtccggcgcatcatcgacgactgctacggtaccgccaagcgactgctcgacgagaaccgcgacaagctggagatgatggccgacgcactgatgaagtacgagaccatcgactccgaccagatcgacgacatcatggccggtcgcgtgccgcgcgagccgcgtgactggcagggtggttcgggtaccggcaccccgccggccaacctggaagagtcgggccgccgcgagaacacccctcccatcggtgggccggccggcgagcactga

SEQ ID NO: 7959 - DNA, 807 bp, Pseudomonas aeruginosa
  CDS (1)...(807)
atgcgacgtatagccgtagtgggcgccgccgggcgcatgggcaagaacctgatcgaggccgttcagcagaccggcggtgccgccgggctgacggcggcggtggatcgtccggatagcaccctggtgggggcggacgccggcgagctggccggtctcggccggatcggcgtgccgctgtccggggacctgggcaaggtctgcgaggagttcgacgtcctgatcgacttcacccatccctccgtaaccctgaagaacatcgagcagtgccgcaaggcgcgccgggcgatggtcatcggcaccaccggcttcagcgccgacgagaagctgctgctggccgaggcggcgaaggatatcccgatcgtcttcgctgccaacttcagcgtcggcgtgaacctttgcctgaagcttctggataccgcggcacgggtgttgggcgacgaagtggatatcgagatcatcgaggcccatcaccggcacaaggtcgatgcaccgtccggcaccgccttgcgcatgggcgaggtggtagcccaggcgctcggccgggacctccaggaagtggcggtctacggacgcgaggggcagaccggcgcgcgggcgcgggaaaccatcggcttcgccaccgtgcgcgccggcgacgtggtgggcgaccacaccgtgctgttcgccgccgagggcgagcgcgtggagatcacccacaaggcttccagccgcatgaccttcgcccgtggcgcggtgcgtgcggcgctgtggctggagggcaaggagaacggcctgtacgacatgcaggatgtgctcggcctacgctga

SEQ ID NO: 7960 - DNA, 1914 bp, Pseudomonas aeruginosa
  CDS (1)...(1914)
atgggcaaaatcattggcatcgacctgggtaccaccaactcctgcgtggctatcctggagaacggtaacgtcaaggtcatcgagaacgccgagggcgcgcgtaccaccccctcgatcatcgcctacaccaacgatggcgaaaccctggtgggccagccggccaagcgccaggcggtcaccaacccgcagaacaccctgtatgcggtgaagcgcctgatcggccgtcgcttcgaagagaacgtggttcagaaagacatccagatggtgccgtacagcatcgtcaaggccgacaacggcgacgcctgggtggaagtgaagggccagaagatggcgcctccgcagatttccgccgaagtgctgaagaaaatgaagaagaccgccgaagactacctcggcgagccggtcaccgaagcggtgatcaccgttccggcctacttcaacgacagccagcgccaggccaccaaggacgccggccgcatcgccggcctcgacgtcaagcggatcatcaacgagccgaccgcggcggcgctggcctacggcctggacaaggccaagggcgaccacaccgtgatcgtctatgacctgggcggcggtaccttcgacgtgtcggtgatcgagatcgccgaagtcgacggcgagcaccagttcgaagtgctggccaccaacggcgacaccttcctcggcggcgaagacttcgacatccgcctgatcgactacctcgtcgacgagttcaagaaggaaagcggcatcaacctgaagggcgacccgctggccatgcagcgtctgaaggaagcggccgagaaagccaagatcgagctgtcctcgacccagcagaccgacgtcaacctgccgtacgtgactgccgacgcgagcggtccgaagcacctgaacgtcaaggtttcccgcgccaagctggagtccctggtcgaagacctggtgcagcgcaccatcgagccgtgccgcaccgcgctgaaggatgccggcctggatgtttccgatatccatgaagtgatcctggtcggcggccagacccgcatgccgctggtacagaagaccgttgccgagttcttcggcaaggaagcgcgcaaggacgtcaacccggacgaagccgtggctgtcggtgccgccatccagggcgcggtcctggccggcgacgtgaaggacgtgctgctgctcgacgtgaccccgctgaccctcggcatcgagaccctgggcggcgtgatgaccggtctgatcgagaagaacaccaccatcccgaccaagaagtcgcaggtgttctccaccgccgacgacaaccagggcgcggtgaccatccacgtgctgcagggcgagcgcaagcaggccgcgcagaacaagtcgctgggcaagttcgacctggccgacattccgccggctccgcgcggcgtgccgcagatcgaggtgaccttcgatatcgatgccaacggcatcctgcacgtctcggcgaaggacaaggccaccggcaagcagcagtccatcgtgatcaaggcatcctccggcctgtccgaggatgagatccagcagatggtccgcgatgccgaggcgaacgccgaggaggaccgcaagttcgaggaactggctgccgctcgcaaccagggcgacgcgctggtccacgcgacccgcaagatgatcaccgaggcgggcgacaaggccaccgccgaggacaaggcgaccatcgagaaggcgctgggcgagctggaagcggcggtgaagggcgacgacaaggccgagatcgaggccaagatgaacgctctgtcccaggcttccaccccgctggcgcagaagatgtacgccgaacaggcccagcagggcgaagacgctccccagggcgagcaggcgaaagccgctgacgacgtggtggacgccgagttcgaagaggtcaaggacaacaagtaa

SEQ ID NO: 7961 - DNA, 1302 bp, Pseudomonas aeruginosa
  CDS (1)...(1302)
atgaatgccgctgatgagagcctgggcaacgtcctgctggtcggtctgggcgcggtggcgatccaggtcgcgctggacctgcgccgccacggtgccggtcgcctcggcgcgctgaaccatcccggccggcgcagccagcggatcgccgaggccctggcgcgcggcgcctgcctgcagctggaagggcaggggcagcatcgctggctgtccggcaacgccgcgctggacgtcttccaccaggaccccgctgagcttcgcgacgattggcagaccctggtgctctgcgtgccggccgacagttacctggacgtggtccgcgggttgccctgggagcgactcggcggggtgcgcacgctgctgctggtgtccgccttcatcggcgccaacctgctggtgcgcagcgccctgccggcggggtgccaggcgaccgtgctgagcctgtccagctactacgcggcgaccaaggtgatcgacgagacacaaccgctgcgggccctgaccaaggcggtcaagcgcagggtctacctgggttccagccggccggactgcccggcgcgggagacctggcggcgagtcctggccggcagcggggtggaggtggtacccctggcgacgccggaagcggcggagggccgcaacgtcaccacctacgtgcacagtccgttctttctcggcgagttcgccctcgcccggatactttccgagcaggggccgcccggtttcatgtacaagctctacccggagggacctatcacccccggggccattggcgccatgcggcggctgtggtgcgagctgagcgaactgttgcggcggatgggcgccgagccgttgaacctgctgcggttcctcaacgacgacaactacccggtgcacgagacgatgctgccgcgcgcgtccatcgacggcttcgccgaggcgggcgccgagcgccaggaatacctgctgttcgtgcgctatgcggcgttgctggtcgatccgttctctccggccgacgagcagggtcgccacttcgacttttccgccgtgccgttccgccgcgtcagtcgcgacgaagacggactctggcggctcccgcgggtgccgctggaggactatcgcaagctggcgctgatcgtcgcgctggccgcccacttcgacctggccatgccgcaggcgcgcagcctgttggcgagctacgagaacgccgtgtcccgattcatcgattgccaaggagcgagccagtgccatccaagcctgtatccgatcgacagccgtccggcggcggacgccatctatcgccaatggtgctcgacctgctga

SEQ ID NO: 7962 - DNA, 792 bp, Pseudomonas aeruginosa
  CDS (1)...(792)
atgcaaggacgcacaccgctgctggaaaccctccgcgaactggaatgcgagattcgcctgctcaccgtctatgcccgcgagtgttgcggctgctacgagatcctcaggcgcaagctcgaccgtctgagcggactgatcggggaggattgcagccgggcgcagtggcaggccgattcggacgaccctgcgttgcaggcgctcggcctgcgcctgcgcgacgcggcggtgcaggccctctgcgaactggagaagcacctttgccagggcgtgctgcatgagcccggcgagatgggccgctacctgggtagcctgctggaatccatccgcggcgaactcgacagcgccgggatagatgccgatgcacgggtcctgttcgtcggctccggtgccctgccgacctcggccctggtgctggcgcgggaggtcggcgcacatttgtgctgcctggacatcgacgaggaggccctgggctgtgcccgcgagatcgcccgctgccaggggctggaggcgcgcatgcagttttcctcgctgccgccggcggaactggcgttttcccgcgatgccacgcatttcctgatcgcttcgctggtgcagcagaaaagcgcggtgctggcgcagatccgccaggtcatgcgcgccgacgccaaggtcctgctgcgtcacggcagcggcatcaagggactgttcaactatccggtggagccggccgaactggatggctggcgggtttgcgcggagcgggtcagccagccgctgtacgacaccctgatcctggagaaggccggtcgatga

SEQ ID NO: 7963 - DNA, 1911 bp, Pseudomonas aeruginosa
  CDS (1)...(1911)
atggccgctcgacggactcgcaaagacgatggcagcaactggaccgtggccgacagccgcggcgtatacggcatccgccactggggtgcgggttatttcgccatcaacgatggcggcaatgtcgaagtgcgtccgcagggtgccgactcgacgcccatcgatctctacgagctggtcggccagctgcgcgaggcgggcctgagcctgccgctgctggtgcgcttcccggatatcctgcaggaccgcgtgcgcaagctcaccggcgccttcgacgcgaacatcgagcgcctcgaataccagagccgctataccgcgctgtatccgatcaaggtcaaccagcaggaagcggtggtggagaacatcatcgccaccgagaacgtctccatcggcctggaggcaggctccaagccggaactcatggcggtgctggcgctggccccgaagggcggcaccatcgtctgcaacggctacaaggaccgcgagttcatcaagctggcgctgatggggcagaagctcgggcacaacgtgttcatcgtgatcgagaaggaatccgaggtgcagctggtgatcgaggaggccgccaacgtcggcgtgcagccccaggtcggcctgcgcgtgcggctgtcctcgctggcttcgtcgaagtgggcagacaccggtggcgagaaggccaagttcggcctttccgccgcccagctgctgtcggtggtcgagcgcttccgccaggccggtctcgaccagggcgtgcgcctgctgcatttccacatgggctcgcagatcgccaacctggccgactaccagcacggcttcaaggaagccatccgctactacggcgagctgcgcgcgctcggcctgccggtggatcacatcgacgttggcggcggcctcggcgtcgactacgacggcacccattcgcgcaacgccagctcgatcaactacgacatcgatgactatgccggcgtggtggtcggcatgctcaaggagttctgcgacgcccagggcctgccgcatccgcacatcttctcggagagcggccgggcgctgaccgcgcaccatgcggtgctgatcacccaggtcaccgacgtcgagcggcacaacgacgacgtgccgaagatcgtcgatctcgacgagcagccggagatcgtccgctggctggccgaactgctcggcccgaccgatgccgagatggtcaccgagacctactggcgcgccacccactacatcggcgacgccgccgcgcagtatgccgacggcaagatcagcctggcgcagaaagccctcgccgagcagtgctacttcgctatctgccggcgcctgcacaaccagctcaaggcccgccagcgctcccaccggcaggtcctcgacgaactcaacgacaagctcgccgacaagtacatctgcaacttctcggtgttccagagcctgccggatacctgggccatcggccaggtgctgccgatcctgccgctgcaccgcctgggcgaggagccggatcggcgcgcggtactgcaggacctgacctgcgactccgacggcaagatcacccagtacgtcgacgagcagagcatcgagaccagcctgccggtgcacgaggtgaaggagggcgaggactacctgatcggggtattcctggtcggcgcctaccaggagatcctcggcgacatgcacaacctgttcggcgacaccgactcggtgaacgtctaccagcgcgcagacggcggcatctatcacgccggcatcgagacccacgacaccatcgaggacatgctgcgctacgtgcacctgtcgccggaggaactgatgaccctctaccgcgacaaggtcgccggggccaagctcaccgcccgcgagcgcaaccagtacctggatgcgctgcgcctggggctgacccgctcggcgtacctgtcctga

SEQ ID NO: 7964 - DNA, 471 bp, Pseudomonas aeruginosa
  CDS (1)...(471)
atggacattcgtaaagtcaagaaactgatcgagctgctggaagagtccggtatcgacgagctggaaatccgcgaaggcgaagagtcggtacgcatcagccgccacagcaagaccgccgcccagccggtgtacgcacaggctccggccttcgccgctccggtcgccgcgccggcgccggcagccgccgctccggccgccgctgccgcggaaagcgccccggccgctccgaagctgaacggcaacgtggttcgctcgccgatggtcggcaccttctaccgcgccgcctcgccgacctcggccaacttcgtcgaagtcggccagagcgtgaagaaaggcgacatcctgtgcatcgtcgaagccatgaagatgatgaaccacatcgaagccgaagttagcggcaccatcgagtcgatcctggtggagaacggccagccggttgagttcgaccagccgctgttcaccatcgtctaa

SEQ ID NO: 7965 - DNA, 1350 bp, Pseudomonas aeruginosa
  CDS (1)...(1350)
atgttggaaaaagtgctgatcgccaaccgcggcgaaatcgccttgcgcatccttcgcgcatgcaaggagctggggatcaagacggtggcggtacactccaccgccgaccgcgagttgatgcacctgtcgctcgccgacgaatcggtgtgcatcggtccggccccggccacccagtcgtacctgcagatcccggcgatcatcgccgcggccgaggtcaccggcgccaccgcgatccaccccggctacggcttcctcgccgagaacgccgacttcgccgagcagatcgaacgctccggcttcaccttcgtcggcccgaccgccgaggtgatccgcctgatgggcgacaaggtttcggccaaggacgccatgaagcgcgccggcgtccccaccgtgccgggctccgacggcccgctgccggaagatgaagagaccgccctggcgatcgcccgcgaggtcggctacccggtgatcatcaaggccgccggcggcggcggtgggcgcggcatgcgcgtggtctacgacgagtccgagctgatcaagtcggccaagctgacccgcaccgaggccggcgcggcgttcggcaacccgatggtctacctggagaagttcctgaccaacccgcgccacgtggaagtccaggtgctttccgacggccagggcaacgccatccacctcggcgaccgcgactgctccctgcagcgccgccaccagaaggtgatcgaagaggcgccggcccccggcatcgacgagaaggctcgccaggaagtcttcgcccgctgcgtccaggcctgcatcgagatcggctaccgcggcgccggcaccttcgagttcctctacgagaacggccgcttctacttcatcgagatgaacactcgcgtgcaggtggagcacccggtatctgagatggtcaccggtgtcgacatcgtcaaggagatgctgcgcatcgcctccggcgagaagctctcgatccgccaggaggacgtggtcatccgcggccatgcgctggaatgccggatcaacgccgaagacccgaagaccttcatgcccagcccgggcaaggtcaagcacttccacgcccccggcggcaacggcgtgcgcgtcgactcgcacctctacagcggctacagcgtgccgccgaactacgactcgctggtcggcaaggtcatcacctacggtgccgaccgcgacgaggcgctggcgcggatgcgcaatgccctggacgagttgatcgtcgacggtatcaagaccaataccgaactgcacaaggacctggtgcgcgacgccgccttctgcaagggcggggtgaacatccattacctggagaagaaactgggtatggacaagcactga

SEQ ID NO: 7966 - DNA, 999 bp, Pseudomonas aeruginosa
  CDS (1)...(999)
atgtcggtggtacgcatcggcccatatacactgcccaacagactgatcctcgcgccgatggccggggtgaccgatcgtccgttccgtcagctttgccgtcgccttggcgccgggatggtggtatcggagatggtgaccagcgacgtccgcctgtggaacagccgcaagtcgcgcctgcgcctgatccacgatggcgaggacgagccgcgctcggtgcagatcgccggcggcgatccggccatgctggccgaggccgcgcagcgcaatgtggaactcggtgcgcagatcatcgacatcaacatgggctgcccggcgaagaaggtatgcaacaaggcagcggggtccgccctgctgcgggacgaggcgctggtcgccgagatcctcgatgccgtggtcagggcggtcgacgtaccggtcaccctgaagatccggaccggctgggaccgggacaaccgtaacggcgtcaccgtcgcgaagctcgccgaacaggcggggatccaggctcttgcggtgcatggccggacccgcgccgacctgtacaccggggaggcggagtacgagaccatcgcggcgatcaagcaggccgtgtcgataccggtgttcgccaatggcgacatcgattcgccggaaaaggccaggaaagtcatcgagcagaccggggtggatgccctgctgatcggtcgggccgcccagggaagaccgtggattttccgcgagatcgaccattacctgcggaccggcgagcacctgccggcggcgccgcttcccgaagtgcagagcatcctgctcgaacacctcgcggagctgcaccttttttatggggaagaaatgggtgtgcggatcgcccgcaagcatgtggggtggtatctcgcgactctgccgggcgcaagggaattccgcgcccagttcaatcgtttgcaggacacggatgcgcagtgcgccagcgtcaggcagttcttcgccgagcgccagaacaacggaacaggggtggccgcatga

SEQ ID NO: 7967 - DNA, 303 bp, Pseudomonas aeruginosa
  CDS (1)...(303)
atggacttgtcccctcgcgagaaagacaagctgctgatcttcaccgccggcctgctcgccgagcgccggctggcacgcggtctcaagctgaactacccggaggcggtggcgctgatctccgccgccctgctggagggcgcgcgcgacggccgcagcgtcgccgagctgatgcactacggcaccaccctgctgaaccgcgagcaggtgatggagggcgtgccggagatgatcccggacatccaggtggaggccaccttccccgacggcaccaagctggtgaccgtccaccagcccatcgcctga

SEQ ID NO: 7968 - DNA, 306 bp, Pseudomonas aeruginosa
  CDS (1)...(306)
atgatccccggtgaatacgacatccagcccggcgatatcgaactcaacgccggccgccgcaccctcgccctgagcgtggcgaacaccggtgaccggccgatccaggtcggctcgcactaccacttcttcgaggtcaacgacgccctcgccttcgaccgtccggccacccgtggcatgcgcctgaacatcgccgccggcaccgcggtgcgcttcgaaccggggcagagccgcgaggtggagctggtggaaatcggcggcggacggcgggtatacggctttgccgggcgggtgatgggggacctctag

SEQ ID NO: 7969 - DNA, 615 bp, Pseudomonas aeruginosa
  CDS (1)...(615)
atgacatcccaacccctgcgtgtcggcatcggcggtccggtgggctccggcaagaccgccctgaccctggccctgtgtcgcgaactgcgcgagcgctacaacctcgcggtggtcaccaacgacatctatacccaggaagacgcggagttcctggtgcgcaacgaggccctcgcccccgagcggatcatcggcgtggaaaccggcggctgcccgcacacggcgatccgcgaggacgcctcgatcaacctggaggcggtggaccagctcaaccggcgcttccccggcctcgaactgatcctggtggaatccggcggcgacaacctgtcggccaccttcagccccgagctgtccgacctgaccctctacgtgatcgacgtttccgccggcgacaagatcccgcgcaagggcggccccggcatctgcaagtcggacctgctggtgatcaacaagatcgacctggcgccgctggtcggcgcctccctcgatgtgatggaccgggacgcccggcgcatgcgcggcgacaagccgttcgtgttcagcaaccagaagaccggccaggggctggacgaaatcatcgccttcatcgagcgccagggcctgctgaccgccgcctga

SEQ ID NO: 7970 - DNA, 933 bp, Pseudomonas aeruginosa
  CDS (1)...(933)
atgcacagcctgcgctttttcagcaacgccgaggtcgccgagcgcctggcttatccacaactgatcgaggcgttgcgcatcggcctggccaagccttgcagcgcgccgctgcgcaactgccatgccttgccggcgcaggcctcgctgctacagatgccggtgtggcaagccggcgcggggatcggcgtgaaactggtgacggtgttccctggcaatggggcgcgtggcctgccggcggtggccgcggtgttcgctctgttcgacggcgaagacggtcgcccactggcgttgctggaggcttcggagctgaccgcccggcgtaccgcctgcagctcggcgctggccgccgactacctggcgcgggacgatgcgcggcgcctgctggtggtcggctgcggaaccctggctgcgcacatggtgcgggcccacgcctgcgtgcgcgactatcgccacatcgacatctggggccgcgatccggccaaggccgccgcgctggccgcccggctgcgcgaggagggctacccggcgcgagcggccgacgggttgcgcgcggcggtggaggcggccgactgcgtcagttgcgttaccacctcccgcgaagcgctggtgcgcggcgcatggctgaagccgggcgtccatctcgacctggtcggcgccttcctgccgtccatgcgcgagaccgacgtcctggcggtggcgcgcgcgcgggtcgtggtggatacccgcgcaggcgcgctggaagaggccggcgacctgttgcaggcgatcgccgaaggcgccatcgggcgcgaggcgatatccaccgaactgcgcgacttgctgagcggggcagggcggcgcggcgatcccggggaaatcaccctgttcaagtcggtgggttatgcgctggaggacctggtcgccgcgcgccgggttgtggataacgccgcctga

SEQ ID NO: 7971 - DNA, 828 bp, Pseudomonas aeruginosa
  CDS (1)...(828)
atgcaacagatccaacgcgacatcgcccaagccctgcaggtccagccgccgttccagtcggaggccgacgtgcaggcgcagatcgcccggcgcatcgccttcatccagcagtgcctgaaggattccgggctgaagaccctggtgctggggatcagcggcggcgtcgactcgctcaccgccggcctgctggcccagcgcgccgtcgagcaactgcgcgagcagaccggcgaccaggcctaccgcttcatcgccgtgcgcctgccctaccaggtgcagcaggacgaggccgatgcccaggcctcgctggcgaccatccgcgccgacgaagagcagaccgtcaacatcggtccgtcggtgaaagccctggcggaacagctggaagccctggaaggactcgagccggcgaagagcgacttcgtcatcggcaatatcaaggcgcgcatccgcatggtcgcccagtacgccatcgccggcgcccgcggcggcctggtgatcggcaccgaccatgctgccgaggcggtcatggggttcttcaccaagttcggcgacggcgcctgcgacctggctccgctcagcggcctggccaagcatcaggtacgcgccctcgcccgcgccctcggcgctccggagaacctggtggagaagatccccaccgccgacctcgaggacctgcgccccggccatccggacgaggcttcccacggcgtcacctatgccgagatcgacgccttcctgcacggccagccgctgcgcgaggaagctgcgcgggtgatcgtcgacacctaccacaagacccagcacaagcgcgaactgccgaaggcgccctga

SEQ ID NO: 7972 - DNA, 588 bp, Pseudomonas aeruginosa
  CDS (1)...(588)
atgaccttgcgttccgtctgcgtattctgtggcgccagccccggcgcttccccggtctaccaggaagccgccgtggccctcggccggcacctggccgagcgcggcctgaccctggtctacggtggcggcgcggtcggtctgatgggcaccgtggcggacgccgcattggccgccggcggcgaagtgatcgggatcatcccgcagagcctgcaggaggccgagatcggccacaagggcctgacccgcctggaagtggtagacggcatgcacgcgcgcaaggcacgcatggccgaactggccgacgccttcatcgccctgcctggcgggctcggcaccctggaagagctgttcgaggtctggacctggggccaactgggctaccacgccaagccgctgggcctgctcgaagtgaacggtttctacgacccgctgctgactttcctcgaccacctggtcgacgaacgtttcgtccgcgccgaacaccgcggcatgctgcagcgcggcgccagcccggaggcgctgctcgatgccctcgccgcctggacgccgagcgtggcgccgaagtgggtcgaccgcaccccgcagtga

SEQ ID NO: 7973 - DNA, 1077 bp, Pseudomonas aeruginosa
  CDS (1)...(1077)
atgcgtcccctcgttgccaccgtcgacctttccgccattcgccacaactatgccctggccaagcgctgcgcgccgcagcgccaggcgttcgcggtggtcaaggcgaacgcctatggccacggtgcgcgcgaagtggttaccgcgttgcacgacgatgccgatggcttcgccgtggcctgcctggaggaggccgcggaagtccgcgccttgcacgccagcgcgcgcatcctgttgctggaaggctgcttcgaggcgagcgaatacgccctcgccgggcaattgcgcctggacctggtgatccagggcgcggaacagggcgaggcgttcctcgccgccggcctggatattccactcaacgtctggctcaagctcgactccggcatgcaccgcctgggcttcgatcctgccgcgctgcgcgcctggcatgcgcgcctgcgcagccatcccggtgtgcgcgagctgaacctgatcagccatttcgcctgcgccgacgaacgcaaccatccgctcaccgaacagcagctggagagtttcctcggcctgctcgacctggacttcgaccagcgcagcctggccaattcggcggcggtgctgactatcccggccgcccacatggactggctgcggccgggaatcatgctctacgggtcgaccccgctggccgacctcagtgctgccgaactgggcctgaagccggccatgagcctgggcgcgcagttgatttcactgcgcgaggtggccgtgggtgagagcgtcggctacggcgccacctggatcgccgagcggccggcgcggatcggcacggtcagttgcggctacgccgacggctatccgcgtaccgcgccagccgggactccggtactggtcgggggacgccgcgcgatcctggccgggcgggtctcgatggacatgctggcggtcgacctctccgacctgccggaggctcgcgttggcgacccggtggagttgtggggcgccgggttgtcggtggacgaggtcgcccgtgcctgcggcacccttggctacgagcttctgagcaaggtcacggctcgggttccgcgacgctacagccactga

SEQ ID NO: 7974 - DNA, 1395 bp, Pseudomonas aeruginosa
  CDS (1)...(1395)
atgaacgagatcaccagccccgagcaatacgacctggaaaccacagccctgaaggtgccgccgcactcgatcgaggccgagcaggccgtgctgggtggcctgatgctggacaacaacgcctgggagcgtgtgtcggattcggtgtccgacggcgatttctaccgccatgaccatcgcctgatcttccgcgccatctacaagctggccgaggccaaccagccgatcgacgtggtgaccctctccgagcagttggagaaggaaggacaactggcccaggtcggcggcctggcctatctcggcgaactggcgaagaacattccctcggtcgccaacatcaaggcctacgcgcagatcatccgcgagcgcgccaccctgcgccaactgatcggcatcagcaacgagatcgccgacagcgccttccacccggaagggcgcggcgccaacgagatcctcgacgaggccgagcggaagatcttcgaggtcgccgaagcgcgaccgaagaccggcgggccggtagggatcagcgatatcctggtcaagaccatcgaccgcatcgactacctgttcaacaccaccgaggcgctgaccggggtgtccaccggtttcaccgacctcgacgagaagaccagcggcctgcagccggccgacctgatcatcgtcgccgggcgtccgtcgatgggtaagaccaccttcgccatgaacctggtcgagaacgcggtgatgcgcaccgacaaggccgtgttggtgtactccctggagatgccctccgactcgatcgtgatgcgtatgctctcgtcgctcgggcgtatcgaccagaccaaggtgcgttccggcaagctcgacgacgaggactggccgcgcctgacttcggcgatcaacctgctcaacgacaagaagctgttcatcgacgataccgctggcatcagtccctcggaaatgcgcgcgcggacccgtcgcctggtgcgcgagcacggcgacctggcgctgatcatgatcgactacctgcaactgatgcagatacccggctccagcggcgacaaccggaccaacgagatttccgagatttcccgctcgctgaaggccctggcgaaggaattcaactgcccggtgattgccctgtcgcagctcaaccgctccctggagcagcgacccaacaagcgcccggtgaactccgacttgcgcgaatccggggcgatcgagcaggacgccgacgtgatcatgttcgtctaccgcgacgaggtgtaccacccggagaccgagttcaagggcgtcgccgaaatcatcatcggcaagcagcgtaacggtccgatcggtacggtgcgcctggccttcatcggcaaatacacgcgcttcgagaaccttgccgccggcatgtacaacttcgaggacgaatga

SEQ ID NO: 7975 - DNA, 447 bp, Pseudomonas aeruginosa
  CDS (1)...(447)
atggaagtcatcctgctggaaaaagtcgccaacctgggcaacctgggcgacaaggtgaacatcaagggcggttacgcccgtaacttcctgctgccgcagggcaaggccaccgtcgccaccgccgagaacgtcgctgcgttcgaagcacgccgcgccgagctggaaaaggctgccgccgagaagaaggccgctgccgaagcccgtgctgcccagctctccgagctggtggtaaccctcggcgcccacgctggcgacgaaggcaagctgttcggttcgatcggcacccgcgacatcgccgaagccgtttccgctgccggttacccgctggaaaaagccgaagttcgcctgcccaacggcgcgctgcgcaacaccggtgagttcgacgtcgccgtgcacctgcacaccgacgtggaaaccactctgaagctgatcatcgtcgctgagtaa

SEQ ID NO: 7976 - DNA, 231 bp, Pseudomonas aeruginosa
  CDS (1)...(231)
atggcacgtttcttccgtcgtcgtaagttctgccgcttcaccgccgaaggcgtgaaagagatcgattacaaggatctcaacaccctgaaggcctacgtttccgaaaccggcaagatcgttccgagccgtatcaccggcaccaaggccaagtaccagcgtcagctggcgaccgctatcaagcgcgcccgctacctggccctgcttccttacaccgacagccacggccgttga

SEQ ID NO: 7977 - DNA, 420 bp, Pseudomonas aeruginosa
  CDS (1)...(420)
atgcgtcattacgaaatcgtgttcctggttcacccggaccagagcgaacaagtcggtggcatggtcgagcgttacaccaaggccatcgaagaagacggcggcaagatccaccgtctggaagactggggccgtcgtcagctggcctacgccatcaacaacgtgcacaaggcccactacgttctgatgaacgtcgagtgcagcgccaaggccctggctgagctggaagacaacttccgttacaacgatgccgtgatccgtaacctggtcatgcgtcgcgacgaagctgtcaccgagcagtccgagatgctcaaggctgaagaaagccgcaacgagcgtcgcgagcgtcgtgagcgtccgaacgataacgctgaaggcgccgatggcgacgacaacagcgatagcgataacgctgacgagtaa

SEQ ID NO: 7978 - DNA, 1293 bp, Pseudomonas aeruginosa
  CDS (1)...(1293)
atgggtaagaatgtcgtagtcctgggcacccaatggggtgatgagggcaagggcaagatcgtcgacctgctcaccgagcaggcggctgccgtagttcgctaccagggtggtcacaacgctggccacaccctggtgatcgatggcgagaaaaccgtcctgcacctgattccatcgggcatcctgcgcgaaggcgtgcagtgcctgatcggcaatggcgtggtgctggcgccggatgcgctgctgcgcgaaatcaccaagctggaagagaagggcgtgccggtgcgcgagcgcctgcgcatcagtccttcctgtccgctgatcctgtcctatcacgtcgccctcgaccaggcgcgcgagaaggcccgcggcgaagccaagatcggcaccaccggtcgtggcatcggcccggcatacgaggacaaggtggcacgtcgcggcctgcgcgtcggcgacctgttccaccgcgagcgcttcgccgccaagctgggcgagctgctggactaccataacttcgtcctgcagcactactacaaggagccggccatcgacttccagaagaccctggacgaggcgatggagtatgccgagctgctcaagccgatgatggccgatgtcgctgcgaccctgcacgacctgcgcaagcacggcaaggacatcatgttcgaaggcgcccagggatcgctgctggacatcgaccatggcacctacccctacgtgaccagttccaacaccaccgctggcggtaccgccaccggttccggcttcggcccgctgtacctggactacgtactgggtatcaccaaggcctataccactcgcgtcggctccggtccgttcccgaccgagctgttcgacgacgtcggcgcctacctggccaagcgcggccacgagttcggtgccaccaccggtcgcgctcgtcgctgcggctggttcgatgccgtgatcctgcgccgcgccatcgagatcaacagcatctccggcctgtgcctgaccaagctcgacgtgctcgatggcctggatgtggtgcgcctgtgcgtcggctacaagaatgccgatggcgatgtgctggaagcgccgaccgatgccgacagctacatcggcctgcagccggtctacgaggaaatgcccggctggagcgagtcgaccgtgggtgcgaagaccctggaagagttgccggccaacgcccgcgcctacatcaagcgcgtggaagagctggtgggtgcgccgatcgatatcatctccaccggtccggaccgcaacgagaccatcatcctgcgccatccattcgcctga

SEQ ID NO: 7979 - DNA, 1902 bp, Pseudomonas aeruginosa
  CDS (1)...(1902)
atgagtgaagcaccgcgtatccagctgctgagtccgcggctggcgaaccagatcgccgccggtgaggtggtcgagcgtcccgcctcggtggccaaggaactcctggaaaacagccttgacgccggttcccggcgcattgatgtggaggtcgagcagggcggcatcaagttgctgcgagtgcgcgacgacggtcgcggcatccccgccgacgacctgccgctggccctggctcgccacgccaccagcaagatccgcgagctggaagacctggagcgggtgatgagcctcggattccgtggcgaggcgctggcctcgatcagctcggtagcgcgcctgaccatgacctcgcgtaccgccgacgccggcgaagcctggcaggtggaaaccgagggccgcgacatgcagccgcgggtacagccggcggcgcacccggtggggaccagcgtcgaggttcgcgacctgttcttcaacaccccggcgcggcgcaagttcctgcgtgccgagaagaccgagttcgaccatctgcaggaggtcatcaagcgcctggcgctggcccgcttcgacgtggctttccacctgcgccacaacggcaagaccatcttcgccctgcacgaggcgcgagacgagctggcccgcgcgcgccgggtcggcgcggtgtgcggccaggcattcctcgagcaggcgctgccgatcgaggtcgagcgcaacggcctgcacctgtggggctgggtcggcttgccgaccttctcccgcagccagccggacctgcagtacttctatgtgaacgggcgcatggtgcgcgacaagctggtcgcccacgcggtgcgccaggcttatcgcgacgtgctgtacaacggccggcatccgaccttcgtgctgttcttcgaagtcgatccggcggtggtggacgtcaacgtgcacccgaccaagcacgaagttcgcttccgtgacagccggatggtccatgacttcctctatggcaccctgcatcgtgcgctgggcgaggtccgtcccgacgaccagctcgcgccgcccggggcgaccagcctgaccgagccgcgtccgaccggcgctgccgccggcgagttcggcccgcagggcgagatgcgcctggccgagagcgtgctggagagtccggcggcacgggtgggctggagtggcggctcatcggcctccggcggctcctccggctattccgcctatacccggccggaggcgccgccctctctggccgaggccggtggcgcctacaaggcctacttcgcgccgttacccgcgggcgaggcgccagccgcgttgcccgagagtgcccaggacatcccgccgctgggttacgccctggcgcagctcaagggcatctacattctcgccgagaacgcccacggcctggtgctggtggacatgcacgcggcccacgagcggatcacctacgagcgcctcaaggtggcgatggccagcgaaggcttgcgtgggcagccgttgctggtgccggagtcgatcgcggtcagcgagcgcgaggcggattgcgcggaagagcattccagctggttccagcgcctgggcttcgagctgcagcgcctggggccggaaagcctggcgatccggcagatccctgcgctgctcaagcaggcggaggcgacccagttggtgcgcgatgtcatcgccgacctgctggaatacggcaccagtgaccgtatccaggcgcacctgaacgagctgctcggcaccatggcctgccatggcgcggtgcgcgccaaccggcgcctgaccttgccggaaatgaacgccctgttgcgcgacatggaaatcaccgaacgcagcggccagtgcaaccatgggcgtccgacctggacccagttgggcctggacgagctggacaagctcttcctgcgcggacgctga

SEQ ID NO: 7980 - DNA, 1413 bp, Pseudomonas aeruginosa
  CDS (1)...(1413)
atggctgacggcaaggaaaggctgcaactcacccgggccctggcgagccgccacatcttcatgctgtccctcggcggggtgatcggcaccgggctgttcatgggctccggcgtgaccatcaaccagggcggcccggccggcgcggtgctggcctacctggtggccggggtgctgatgtacctggtgatggtctgcctcggcgagctgtcggtgcagatgccggtctccggttcgttccaggcccacgcgacgcgtttcatcggcccggcgactggcttcatgatcggctgggtctactggatgagctgggcctccacggtaggcctggaattcaccgcggccgggatgctcatgacccgctggttcccggaggtgcccgtgtggctatggtcgggtttcttcgtggtcgtgctgttctccctcaatgccctggcgacccgcgctttcggcgaggccgagtactggttcgccgggatcaaggtggcggcgatcctggtgttcatcgtggtcggggggctggtgatcttcggcggtatcgaactgaagagcggtgcgccggcgccgatgttctccaacctggtcggcgagcggctgttccccaacggcctgtcggcggtgttcgcggtgatgatgacggtggtctatgccttccagggttgcgagatcatgggcgtcgccgccggcgagaccgagcgaccggagaagagcatcccgcgggcggtgcgcaacgtggtgttccgcgtactgatcttctacgtgctggccatcgtcgtgctttccgccatcattccctggcaacaggccgggctgatggaaagcccgttcgtgcaggtgttcgacatggtcgggattccctacgcggcggacctgatgaacttcgtcatcctcaccgccatcctctcggtaggcaactcgggcctgtacgcctcgacgcggatcctctgggcgatgtccaggtccggcatggccccgcgcggcctgtcgaagctcagcgcgcgcggcgtgccgctctacgcgttgctgatcaccctgtgcttcgccctgctctcgttgctgaccagcgtggtcgccgccgacaccctgttcatggtgctgatggcggtgagcgggatgtccggcaccgtcacctggatcgtcatcgcctacgcccaataccgcttccgccgcgagcacatggccagcggcggcacggtcgccgagctgaaatatgccgcgccgctgttcccgctggtgccgctggcctgcatcgccgtgtgctgctcgctgttcgtcttcctcgccctcgatcccacccagcggccgtccttgtactggggcttcggcttcatcgccgcctgctacctggcctattacgtggttcgtcgccggcagccgcagggactgggcgaccccgccctgggacgggccggctga

SEQ ID NO: 7981 - DNA, 1425 bp, Pseudomonas aeruginosa
  CDS (1)...(1425)
atgaagttgtccatgccccgtttcgaccaggccccggtgttggtggtcggtgatgtgatgctcgaccgctactggcatggcgcgacttcgcgcatttcgccggaggccccggtgccggtggtccgcgtcgaacagcacgaggaccgccccggcggcgccgccaacgtcgcgctgaacatcgccgcgctgggcgcgcaggccttgctggtcggcgtcaccggccgcgacgaggccgccgacagcctggccaacagcctcaaggccgctggagtggacgcgcgcttccagcgcatcgatagccagccgaccatcgtcaagctgcgggtcatgagtcgccaccagcaactgctgcgggtcgacttcgaggaaccgttccgcaccgacgcggcggccctggccgtggacgtcgagtcgctgctggccaaggtcaaggtgctggtgctgtccgactacggcaagggcgcgctacagaaccaccaggtgctgatccaggcggcgcgggcgcgcaacattccggtactggccgatcccaagggcaaggacttcgccatctatcgcggcgccagcctgatcaccccgaacctgtccgaattcgagaccatcgtcggccgttgcgccgacgaagccgaactggtcgccaagggccaggcgctgatgagcgaactcgacctcggtgccttgctggtgacccgcggcgagcatggcatgaccctgctccgccatggccagccggccctgcacctgccggcgcgggcgcgggaagtgttcgacgtcaccggtgccggcgatacggtcatctccaccctggccgcggcgcttgccgccggcgaggagctgccttccgcggtgggtctggccaacctggccgccggcatcgtggtcggcaagctgggtaccgcggcgatcagcgcgcccgaactgcgtcgcgcggtgcagcgcgagcagggttccgagcgtggcgtgctgggcctggagcaattgctgctggcaatcgaagacgcccgcgcccacggcgagaagatcgtcttcaccaatggctgcttcgacatccttcacgccggccacgtgacctacctcgaacaggcgcgcgcccagggcgaccgcctgatcgtcggggtcaacgacgacgcctcggtcactcgcctgaagggcgttggccggccgatcaactcggtggaccggcgcatggcggtactcgccgggctcggcgcggtggactgggtggtgagcttcgccgaagacactcctgagcgcctgctcgagcaggtgcgtccggacgtgctggtcaagggcggcgattacggcgtcgagcaggtggtcggcgcgcagatcgtcaaggcctacggcggcgaggtacgggtgctcggcctggtggagaacagctccaccaccgccatcgtcgagaagatccgccagaaaggctga

SEQ ID NO: 7982 - DNA, 1434 bp, Pseudomonas aeruginosa
  CDS (1)...(1434)
atgtctgaacgtctgaattccgaccgcctgaacaacgacttccagttcatcgaagtcgggcgcaaggacccgaagaagaagctgctgcgccagcgcaagcgcgagttcgtggagatccacgacctgttcaagccgcagcaggccgccgaccaggcccaccgctgcctgggctgcggcaacccgtactgcgagtggaaatgcccggtgcacaacttcatccctaactggctgaagctggtttccgaaggcaacatcctggccgccgccgaactgtcgcaccagaccaacaccctgccggaagtctgcggccgggtctgcccgcaggatcgcctctgcgagggcgcctgcaccctcaacgacggttttggcgcggtgaccatcggctcggtggagaagtacatcaccgatacggccttcgccatgggctggcgtccggacctgtccaaggtcaagccgaccggcaggcgcgtcgcggtgatcggcgccggcccggccggcctcggctgcgccgacgtgctggtgcgcaacggcgtgaccccggtggtgttcgaccgcaacccggagatcggcggcctgctgaccttcggcattcccgagttcaagctggagaagcacgtcctcagccgtcgccgcgaggtgttcaccggcatgggcatcgagtttcgcctgaacaccgagatcggcaaggacgtgaccatggagcagttgctcgatgagtacgatgccgtgttcatggggatgggcacctacacctacatgaagggcggtttccccggcgaggacctgccgggcgtacacgacgccctggacttcctgatcgccaacgtgaaccgcaacctcggcttcgagaagtcggccgaggacttcgtcgacatgaagggcaagcgcgtggtggtcctgggcggcggcgacaccgcgatggactgcaaccgcacttcgatccgccagggcgccaagtcggtgacctgtgcctatcgccgtgacgaagaaaacatgccgggctcgcgcaaggaagtgaagaacgccaaggaagagggcgtgaagttcctcttcaaccgccagcccatcgccatcgtcggcgaggaccgggtggaaggcgtgaaggtggtcgagacccgtctcggcgagccggacgcccgcggccgccgcagccccgaaccgatccccggttccgaggagatcatcccggcggaagccgtgctgatcgccttcggcttccggccgagtccggcgccgtggttcgagcgcttcgagatcgccaccgacagccagggccgcgtggtggctccggcgcaggcgcagttcaagcaccagaccagcaacccgaagatcttcgccggtggcgacatggtccgtggttccgacctggtggtgacggcgatcttcgaaggacgtaccgcggccgaaggcatcctcgactaccttggcgtctga

SEQ ID NO: 7983 - DNA, 4446 bp, Pseudomonas aeruginosa
  CDS (1)...(4446)
atgaaagcaggtctgtaccatcctgaaacgttcaaggataactgcggatttggcctgatcgcccatatgcagggcgagccgagccatcaacttctgcaaaccgcaatcgaagcactgacctgcatgacccaccgcggtgggatcaatgccgatggcaagaccggggacggctgcgggctgctgatccagaagcccgacctgttcctgcgtgccgtcgccagggaagccttttctgtcgacctgcccgagcaatacgcggtgggcatggtgttcttcaaccaggacccggtgaaagccgaggcggcacgcgagaacatgaatcgcgagatcgtcgccgccggactggagctggtcggctggcgcaaggtgccgatcgataccagcgttctcggccgcctggcgctggagcgcctgccgcagatcgaacaggtgttcatcggcggcgccggcctgagcgaccaggacttcgccatcaagctgttcagcgcacggcgccgctcgtcggtggccaacgccgccgacagcgaccactacatctgcagcttttcgcacaagaccatcatctacaagggcctgatgatgccggccgacctggccgccttctatccggaccttggcgacgagcgcctgcagaccgcgatctgcgtattccaccagcgcttctccaccaacaccctgccgaaatggccgctggcgcagccgttccgcttcctcgcccacaacggcgagatcaacaccatcaccggcaaccgcaactgggcccaggcgcggcggaccaagttcaccaacgaactgatccccgacctggaagagctcggcccgctggtgaaccgcgtcggctccgactcgtcgagcatggacaacatgctcgaactgatggtcaccggcggcatggacctgttccgcggcctgcgcatgatcatcccgccggcctggcagaacgtcgaaaccatggacgccgacctgcgcgcgttctacgagtacaactcgctgcacatggagccctgggatggccccgccggcgtcgtgctgaccgacggtcgctatgccgtctgcctgctcgaccgcaatggcctgcgcccgtcgcgctgggtcaccacgaagaacggctacatcaccctggcttcggaaatcggcgtctgggactacaagcccgaggacgtcatcgccaagggtcgcgtcggcccggggcagatcctcgcggtggacaccgagaccggccaggtcctgcacagcgacgacatcgacaaccgcctgaagtcgcgccatccctacaagcagtggctgcggcagaatgccctgcgcatccaggcgaccctggacgacgaccatggcgtggccagctacgacgccgaccagctcaagcaattcatgaagatgttccaggtcaccttcgaggagcgtgaccaggtgctgcgtccgctcggcgagcagggccaggaagcggtgggctccatgggcgacgatacgccgatggcgatcctctcccggcgcatccgctctccgtacgattacttccgccagcaattcgcccaggtcaccaacccgccgatcgacccgctgcgcgaagccatcgtgatgtccctggaaacctgcctgggcgtcgagcagaacatcttcgaggaagccccgcaccatgccaaccaggcgatcctcaccactccggtgatctcgccggcgaagtggcggaccatcatgaccctggaccgcccgggcttcgaccgccacttcatcgacctcaactacgacgagtcgatgggcctggaggccgcggtgcgcaacatcgccgaccaggccgaggaggccgtgcgcggcggcaaggtgctgctgatcctcagcgaccgccatatcgctcccggcaaactgccggtgcatgctgccctggccgtcggcgcggtgcatcaccgcctggtgcagaccgggctgcgctgcgactccaacatcctggtggagaccgccaccgcccgcgatccgcaccatttcgcggtgctgatcggcttcggcgcctcggcggtctatccgttcctcgcctacgaggtgctggccgacctgatccgcaccggtgaagtgctgggcgacctctacgaggtgttcaagtactaccgcaaggggatctccaagggcctgatgaagattctctcgaagatgggcatctccaccgtcgcgtcctaccgtggcgcgcagctgttcgaggcggtgggcctgtccgacgaggtcaccgacctgtgcttcaccggagtcgccagccgcatccagggcgcgcgcttcgtcgatatcgagaacgagcagaagctcctggccgccgaggcctggagcaaccgcaagccgatccagcagggcggcttgctgaagttcgtctatggcggcgaataccacgcctacaacccggatgtggtgaataccctgcaggctgccgtgcagcagggcgactacgagaagttcaaggaatacaccgcgctggtggaccagcgcccagtgtcgatgatccgcgacctgttgcaggtgaagaccgccgcgcagccgctggcgctcgacgaggtggagccgctggaagccatcttcaagcgcttcgatgccgccgggatttccctcggcgcgctgtcgccggaggcccacgaggcgctggccgaggcgatgaacaccctgggcggtcgctccaactccggcgagggcggcgaggacccggcgcgctacggcacgttgaagagttcgaagatcaagcaggtggctaccggccgcttcggcgtgaccccggaatacctggtcaacgccgaggtcctgcagatcaaggtggcccagggtgccaagcccggcgagggcggccagttgccgggcggcaaggtcaacggcctgatcgcccgcctgcgctatgcggtgcccggcgtgaccctgatctcgccgccgccgcaccacgacatctactccatcgaagacctggcgcagctgatcttcgacctcaagcaggtcaacccgcaggcgctggtatcggtgaagctggtatccgagccgggcgtcggcaccatcgccgccggcgtggccaaggcctatgcggacctgatcaccatctccggctacgacggcggtaccggcgcctcgccgatcacctcgatcaagtacgccggctcgccctgggaactgggcctggcggaaacccaccagaccctgcgcggcaacgacctgcgcggcaaggtccgggtgcagaccgatggcggcctgaagacaggcctggacgtgatcaaggcggccattctcggcgccgagagcttcggcttcggcaccgcgccgatgatcgccctgggctgcaagtacctgcgcatctgccatctgaacaactgcgccaccggcgtggcgacgcagaacgacaagttgcgcaaggaccacttcatcggcaccaccgcgatggtgatcaacttcttcaccttcatcgccacggaaacccgcgagtggctggcgcgcctcggcgtgcgcagcctgggcgagctgatcggccgcaccgacctgctggagatcctccccggcgagaccgccaagcagcagaacctggatctcgctccgttgctgggcagtgagctgatcccggccgacaagccgcagttctgcgaggtggagaaaaacccgccgttcgaccagggcctgctggccgagaagatggtcgagctgtcgaaggccgccatcgaaggcctgagcggcggcgagtacgagctggacatctgcaactgcgaccgatccatcggcgcgcgggtatccggcgagatcgcccgcctgcacggcaaccagggcatggccaaggcaccggtggtgttccgtttcaagggcaccgcgggacagagcttcggcgtgtggaacgccggtggcctgcacctgtacctggaaggcgacgccaacgactacgtaggcaagggcatgaccggcggcaagctggtgatcaccccgcccaagggcagtccgttcaagacccaggaatcggccatcgtcggcaacacctgcctgtacggcgccaccggcggcaagctgttcgccgccggaaccgccggcgagcgcttcgccgtgcgcaactccggttcccatgcggtggtggaaggtaccggcgaccactgctgcgaatacatgaccggcggtttcgtctgcgtgctgggcaagaccggctacaacttcggctccggcatgaccgggggcttcgcctacgtcctcgacatggacaacactttcgtcgaccgcgtgaaccacgagctggtggaaatccagcggatcagcggcgaggcgatggaggcctatcgcagccacctgcgcaaggtcctggtcgagtacgtgaacgaaacggcaagcgagtggggcgcgaacatcctggaaaacctggatgactacctgcgtcggttctggctggtgaaaccgaaggcggccagcctcggttcgctgctgaccagcacccgtgccaacccgcaataa

SEQ ID NO: 7984 - DNA, 1764 bp, Pseudomonas aeruginosa
  CDS (1)...(1764)
atgaaagacacgattcgccagctgatccagcaagccctcgaccaactgaccgcggacggcaccctgcccgccggcctgaccccggacatccaggtggagaacaccaaggaccgtagccacggcgatttcgccagcaacatcgccatgatgctggccaagccggccgggatgaagccgcgcgacctggccgccaggctggtcgaggcaatccccgcccacgagcaactggccaaggtggagatcgccggtcccggcttcctcaacttcttccaggatcacgtctggctcgccgccagcctcgaccgcgccctcgccgacgaacgtctcggcgtgcgcaaggcaggcccggcgcagcgcgtggtgatcgacctgtcctcgccgaacctggccaaggaaatgcacgtcggccacctgcgctcgaccatcatcggcgacgccgtcgcgcgcgtcctcgagttcctcggcgacacggtgatccggcagaaccatgtcggcgactggggcacccagttcggcatgctgctcgcctacctggaagagcaaccggtcgacgccgaggccgagctgcacgacctggaggtcttctaccgcgcggcgaagaaacgcttcgacgagtctcccgaattcgccgaccgcgcccgcgaactggtagtcaagctgcaggccggcgaccccgactgcctgcgcctgtggacccgcttcaacgagatttccctgtcgcactgccagaaggtctacgaccgtctcggcgtgaagctgagcatggccgacgtcatgggcgagagcgcctacaacgacgacctcgcccaggtggtcgccgacctgaccgccaagggcctgctcaccgaagacaacggcgcgttgtgcgtcttcctcgaagagttcaagaacgccgagggcaatccgctcccggtgatcgtgcagaaggccggcggcggctacctctacgccaccaccgacctcgccgccatgcgttatcggcacaacgtgctgcacgccgaccgcgtgctgtacttcgtcgaccagcgccaggccctgcacttccagcaggtcttcgaagtggcgcggcgcgccggtttcgttccggccggcatggagctggagcacatgggcttcggcaccatgaacggcgccgacggccgtccgttcaagacccgcgacggcggtacggtgaagctgatcgacctgctggaagaggccgagagccgcgcctatgcgctggtcaaggaacgcaacgagcagcgcgccgagcgtggcgaggagccgttcgacgaggtccagctgcgcgagatcggccgggtggtggggatcgactcggtgaagtacgccgacctgtccaagcaccgcaccagcgactacagcttcaacttcgaactgatgctgagcttcgaaggcaacaccgcaccctacctgctctacgcctgcacccgcgtggccagcgtcttccgcaagctcggccagggccgcgagcaactgggcgggaagatcgtcctcgagcagccccaggagctggccctggccgcacagctggcgcagttcggcgacctgatcaacaacgtcgcgctcaagggcgtgccgcacctgctctgcgcctacctgtacgagttggccgggctgttctccagcttctacgagcattgcccgatcctcaccgccgaggacccggcgcagaaggacagccgcctgcgtctcgccgcgctgaccggccgtaccctggaacagggcctggagctgctcggtctgaagactctggaacgcatgtaa

SEQ ID NO: 7985 - DNA, 534 bp, Pseudomonas aeruginosa
  CDS (1)...(534)
ttgaccaccatcgtatctgtccgccgcaacggcaaagtcgtcatgggcggcgacggccaggtttccctgggcaacaccgtgatgaaaggcaacgccaagaaggtccggcgcctgtatcacggtcaggtactggccggtttcgccggcgccaccgccgatgccttcaccctgttcgagcgcttcgagcagcaattggagaaacaccaggggcacctggtccgcgccgccgtcgaactggccaaggactggcgcaccgaccgctccctgagccgcctcgaagccatgctcgcggtcgccaacaaggatgcctcgctgatcatcaccggcaacggcgacgtggtcgaacccgaacacggcctgatcgccatgggctccggcggcggcttcgcccaggccgcggccctggccctgctgcagcacaacgccgagctgagcgctcgggaagtcgccgagaccgcgctgaacatcgccggctcgatctgcgtcttcaccaaccagaacctgaccatcgaggagctggacagcgccgtctga

SEQ ID NO: 7986 - DNA, 771 bp, Pseudomonas aeruginosa
  CDS (1)...(771)
atgaacgatccccgcaaaggcgccgacgccgaacccaccacccacttcggctaccagaacgttccggaaagccagaaggcgaagaaggtcgccgaggtatttcactcggtggcagccaagtacgacctgatgaacgacctgatgtccggtggcatccatcgcctgtggaagcgcttcaccatcgagctgtccggcgtgcgcagcgggaaccgcgtgctcgacatcgccggcggcaccggcgacctgacccggcagttctcgcgcctggtcggcccgaccggcgaggtggtgctggccgacatcaacgcctcgatgctcaaggtcggccgcgacaagctgctcgacaagggcgtctccggcaacgtcagcttcgtccaggcggacgccgagaagctgcccttcccggacaaccacttcgactgcgtgaccatcgccttcggcctgcgcaacgtcacccacaaggacgaagcgatccgctccatgctgcgcgtgctcaagcccggtggccgcctgctggtgctggagttctccaagccgagcagcaacctgctgtccaaggcctacgacgcctattcgttcagcctgctgccgctgatgggcaagctggtcaccaacgactccgagagctatcgctacctggccgagtcgatccgcatgcaccccgaccaggaaaccctgaaggcgatgatggtggaagccggcttcgaccgcgtgacctaccacaacatgaccggcggcatcgtcgccctgcaccgcggtatcaagccttaa

SEQ ID NO: 7987 - DNA, 1530 bp, Pseudomonas aeruginosa
  CDS (1)...(1530)
atgagcctgcatctgaaacccggccagttgaccctggccgacctgcgccaagcctacctggcccccgtgcgcctgagcctggatcccagcgccgacgcgccgatcgccgccagcgtcgcctgtgtcgagaacatcatcgccgagggccgcaccgcctacggcatcaacaccggcttcggcctgctggcctcgacgcggatttccccggcagacctggagaagctccagcgttccatcgtcctgtcccatgccgccggcgtcggcgaggcgctggacgacgccatggtgcggctggtcatgctgctcaaggtgaacagcctggcgcgcgggttctccggcatccgccgcaaggtgatcgacgcgctgatcgcgctgatcaacgccgaggtctatccgcacatcccgctgaaaggctcggtgggtgcgtccggcgacctggcgccgctggcgcacatgtcgctggtgctgatcggcgaaagccgggcgcgccatcgcggtgagtggctgccggccgccgaagcgctggcggtggccgggctggagccgctgaccctggcggcgaaggaaggcctggccctgctcaatggcacccaggtgtccaccgcctacgcgctgcgcgggttgttcgaggccgaggacctgttcgccgccgccaccgtctgcggcgggctcagcgtcgaggccatgctcggttcgcgggcgccgttcgatgcgcgcatccatgccgcgcgcggccagcgcgggcagatcgacgtggccgcggcctatcgcgacctgctcaccgccagcagcgaggtggcgcgctcccatgagaagtgcgacaaggtccaggacccctattcgctgcgttgccagccgcaggtgatgggcgcctgcctgacccagatgcgccaggccgccgaggtgctggagatcgaagccaacgcggtgtccgacaacccgctggtattcgccgccgagggcgacgtgatctccggcggcaacttccacgccgaaccggtggcgatggccgccgacaacctggccctggcgttggccgagatcggttcgctgtcggaacggcgcatctcgctgatgatggacatgcacatgtcgcagttgccgccgttcctggtggccaacggcggggtcaactccggcttcatgatcgcccaggtcaccgccgccgcgctggccagcgacaacaaggccctggcccatccggccagcgtcgacagcctgccgacctcggccaaccaggaagaccatgtgtcgatggcgccgaacgccggcaaacggctctgggcgatggccgagaacgtccgcgggattctcgccgtggagtggctgggcgcctgccagggcctggacttccgcgagggcctgaagagttcgccgaagctggagcaggctcgccgcctgctgcgcgacaaggtgccgtactaccaggaggatcgcttcttcgcccctgatatcgaggccgccagccagttgctcgccagcggttgcctgaacgcgctgctgccggcccggctgttgccgagtctttga

SEQ ID NO: 7988 - DNA, 1680 bp, Pseudomonas aeruginosa
  CDS (1)...(1680)
gtgaccaccccgagcaaattccgcgatattgaaatccgcgccccgcgcggcactacgctgaccgccaagagctggctgaccgaagcgccgctgcgcatgctgatgaacaacctcgacccggaggtcgcggagaaccccagggaactggtggtttacggcggcatcggccgtgccgcgcgcaactgggagtgctacgacaggatcgtcgagaccctcaagcaactgaacgacgacgagaccctgctggtacagtccggcaagccggtcggcgtgttcaagacccacgccaacgcgccgcgggtgctgatcgccaactccaacctggtgccgcactgggcgacctgggaacacttcaacgaactggacgccaagggcctggcgatgtacggccagatgaccgccggttcgtggatctacatcggcagccagggcatcgtccagggcacctacgaaaccttcgtcgaggctggccgccagcattacgacggcaatctcaagggccgctgggtgcttaccgccggccttggcggcatgggcggcgcccagccgctggcggcgaccctggccggcgcctgttcgctgaacatcgagtgccagcagagccgcatcgacttccgcctgcgcagtcgctacgtcgacgagcaggccaaggacctggacgacgccctggcgcggatccagcgctacaccgccgaaggcaaggccatctccatcgccctgctgggcaatgccgccgagatccttccggaactggttcgccgcggcgtacgcccggacatggtcaccgaccagaccagcgcccacgatccactcaacggctacctgccggccggctggagctgggaagagtaccgcgaccgcgcgcagaccgacccggccgccgtggtcaaggccgccaagcagtccatggcggtacacgtgcgggccatgctggcgttccagcagcagggcgtgccgaccttcgactatggcaacaacatccgccagatggccaaggaagagggggtggccaatgccttcgatttccccggcttcgtcccggcctacatccgcccgctgttctgtcgcggcatcggtccgttccgctgggccgcgctgtcgggcgacccgcaggacatctacaagaccgacgccaaggtcaagcaactgatccccgacgatgcccacctgcaccgttggctggacatggcccgcgagcgcatcagcttccagggcctgccggcgcgcatctgctgggttggcctggggctgcgcgccaagctcggcctggccttcaacgagatggtgcgcacgggcgagctgtccgcgccgatcgtcatcggccgcgaccacctcgactccggctcggtggccagccccaaccgcgagaccgaggccatgcaggacggctccgacgcggtgtccgactggccgctgctgaatgccctgctgaataccgccagcggcgccacctgggtctcgctgcaccacggcggcggcgtaggcatgggcttctcccagcactccgggatggtgatcgtctgcgacggtagcgacgaggccgccgaacgcatcgcccgcgtactgaccaacgacccggggaccggggtgatgcggcacgccgacgccggctaccaggtcgccatcgattgcgcgaaggagcagggcctgaacctgccgatgatcaccgcccagcgctga

SEQ ID NO: 7989 - DNA, 1818 bp, Pseudomonas aeruginosa
  CDS (1)...(1818)
gtgatcgaaaatctgcgcaacatcgccatcatcgcccacgtcgaccatggcaagaccaccctggtggacaagctgctgaagctgtccggcaccctcgaccgcaaagaagcggaaagcgagcgggtgatggactccaacgaccaggaaaaagagcgtggcatcaccatcctggcgaagaacaccgcgatcaagtggaacggctacaacatcaacatcgtcgacacccccggtcacgccgacttcggcggcgaggtggagcgcgtgatgtcgatggtcgactccgtgctgctggtggtcgacgcccaggacggccccatgccgcagacccgcttcgtgacccagaaggccttcaaggccggcctgcgtccgatcgtggtggtgaacaagatcgaccgcccgggcgcgcgtccggactgggtcatcgaccagatcttcgacctgttcgacaacctcggcgccaccgacgagcaactcgacttcccgatcgtctacgccagcgccctgaacggcatcgccggcctcgaccacgagaagatggacgacaacatggacgcgctgttccaggcgatcatcgaccacgtcccggccccggtggtggacaccgagggtccgttccagatgcagatctcgcagctggactacaacagcttcctcggcgtgatcggtatcggccgcatcacccgcggcaaggtcaagtccaacaccccggtggtggccatcagcgacgacggcagcaagcgcaacggccgcatcctgaagatcatgggccaccacggcctgcagcgcgtcgaggtggccgaggcggaagccggcgacatcgtctgcgtcagcggcatggaggagctgttcatctccgataccctgtgcgacccgcagaacgtcgaggcgctgccgccgctgaccgtcgaccagccgaccgtgagcatgaccttccaggtcaacgattcgccgttcgccggccgcgaaggcaagttcgtcaccagccgcaacatcaaggagcgcctggagaaggaactgctgcataacgtggcgctgcgcgtcgagccgggcgacagcccggagaagttcaaggtttccggccgtggcgaactgcacctgtcggtactgatcgagaccatgcgccgcgaaggcttcgagctggccgtgggccgcccggaagtggtgatcatcgagaaggacggcgagaagcaggagccctacgagaacgtcaccatcgacatcgaggagcagcaccagggctcggtgatggagcagatgggcctgcgcaagggcgacctgagcaacatgattcccgacggcaagggccgcgtgcgcctggagtacaccattccggcgcgcggcctgatcggcttccgcaacaacttcctgaccctgacctcgggcaccggcatcctgacctcgaccttcagccactacggtccgatcaaggccggcgaagtcagcaaccgccagaacggcgtactggtctccatggccaccggcaccgcgctgacctactcgctggagaccctgcagagccgcggcaagctgttcctcggcccgggcgacgaaatctacgaaggccagttggccggcatcaacagccgtgacaacgacctggtgatcaacccgaccaagggcaagaagctcgacaacatgcgcgcttccggcaaggacgaagtcatcgccctggttccgccgatccgcttcaccctcgagcaggcgctggagttcatcgccgacgacgagctggtggaagtgacgccgaagtcgatccgcctgcgcaagaagatgctcaacgagaacgaccgcaagcgctacgagcgcagcaaggtctaa

SEQ ID NO: 7990 - DNA, 1410 bp, Pseudomonas aeruginosa
  CDS (1)...(1410)
atgtcgtacaagtcgcaccaactgatcaaagaccatgacgtgaagtgggtagacctgcgcttcaccgataccaagggcaagcagcaacacgtcaccatgccggctcgcgacgcgctggacgatgagttcttcgaagccggcaagatgttcgacggctcctccatcgccggctggaaaggcatcgaagcctccgacatgatcctgatgccggacgacagcaccgccgtcctcgatccgttcaccgaagagccgaccctgatcctggtctgcgacatcatcgagccgagcaccatgcaaggctacgagcgcgacccgcgcaacatcgccaagcgcgccgaggagtacctgaagtccaccggcatcggcgacaccgtgttcgtcggcccggagccggagttcttcatcttcgacgaagtgaagttcaagtccgacatctccggctcgatgttcaagatcttctccgagcaggcttcctggaacaccgacgccgacatcgagtccggcaacaagggccatcgcccgggcgtgaagggcggctacttcccggtaccgccggtcgaccacgaccatgaaatccgcaccgccatgtgcaacgccctggaagaaatgggcctggtggtcgaagtccaccaccacgaagtggcaaccgccggccagaacgagatcggcgtgaagttcaacaccctggtcgccaaggccgacgaagtgcagaccctgaagtactgcgtgcacaacgtcgccgacgcctacggcaagaccgtgaccttcatgccgaagccgctgtacggcgacaacggttcgggcatgcacgtgcacatgtcgatctccaaggacggcaagaacaccttcgccggcgaaggctatgccggcctgtccgagaccgccctgtacttcatcggcggcatcatcaagcacggcaaggccctgaacggcttcaccaacccctcgaccaactcctacaagcgcctggtcccgggcttcgaagctccggtgatgctggcctactcggcgcgcaaccgttccgcctcgatccgtatcccctacgtatccagcccgaaggcccgccgtatcgaagcgcgcttcccggacccggcagccaacccctacctggccttcgccgcgctgctgatggccggcctggacggcatccagaacaagatccaccccggcgatgccgccgacaagaacctgtacgacctgccgccggaagaggcgaaggaaatcccgcaggtttgcggcagcctgaaagaggcgctggaagaactcgacaagggccgcgcgttcctgaccaagggcggcgtgttcaccgacgagttcatcgatgcctacatcgagctgaagagcgaagaagagatcaaggtgcgcaccttcgtgcacccgctggaatacgacctgtactacagcgtctga

SEQ ID NO: 7991 - DNA, 2208 bp, Pseudomonas aeruginosa
  CDS (1)...(2208)
gtgccgatcatcgcccgcttcacccttcgctcccgcgtcctggcggccctgctgctgtgcctctgcgccgccctgttctactcgccgccgggcgccgcggcgctgccgaacccgttggcggggagttcctccggtggcgagaaggtcagcgatgcgcagttggaacaatcgctgaaccaggtcatccagaccctggagaacgacaggcagcgcgccgacctgctgaaaaagctgaaacagctgcgggacgtgaccaagaaaggcaaggaaagcgagggtggggtgctggggctgatcggcgataccctgaccagcctggaaaagcagttccagggcgcgaacagcccggtcgcgttatggggcaaccagttccagctggcgcgtgccgaactcgaggagcgctttcccagctggcgcgacctgccggcgatggtcttcgatttttcggtggtgatcctcctctgggcctgcctggccagcgcgctgctctggctcagccggcgcatgcgcgagcgcttcggcctgtcggcggagttgccgcagcatccgaagacccgcgacctgctgctgttttccctgcgcaagctgggcccctggctggtggccttcctcatcaccctgtacctgtcggtggtgctgccggactccctgagcaagaccctggcgatggtcatggcctatgtgctggtctgcggcacgctgttctccgcgctgtgcgtgatttccctctcgctgctcagcggcccgcaccgccagcgcgccctggatatcctgcggcgccaggcgttccgcccgttgtggctgatcggcagcctcgccgcgctgggcgaggtcgcccacgatccgcggctgatcgccggcctcggcgagcacacctcgatctgcctgagtaccctggccaacgccagcgccgcgctgttcaccgcgctgttcgtgatgcgtttccgccggccgatcgcccacctgatccgcaaccagccgctggagcgccgcctcaagcgccgtagcctgcacgacctggtgcaactggtcggctcgctgtggttcgtgccggtgctggtgctggtggggatttccctattcgccaccttcgtttccgccggcgacagcagttcggcgttgcgccgggcgctggtctgcgcggtgctggcggtggtggcgatgaccgtgatcgggctgatccgccgccgttccagtcgggtcggcgccggcccgcgccgcagcgcgccgtacatcgagcagttgcaaagcttcggctacaccctgctgcacatcttcgtggtgctgttcttcatcgaggtcgccttgcgcgtctggggcatgtcgctgattcgctatgcggaaggcgagggcgagcagatcagcatgaaggtagtcagcttcggcaccaccctgctggtcgcctggctgatctggatcctcaccgataccgcgatccagcacagcctcggcctgggcggcaagagccggccgaacacccgcgcgctgaccatgctgccgctgatccgcaacgtactgttcgccaccatcgcggtgatcgccctgatcgtcgccctggccaacatgggcatgaacgtcaccccgctgctggccggtgccggcgtgatcggcctggccatcggcttcggtgcgcagtcgctggtggcggacctgatcaccggcctgttcatcatcatcgaggactcgctgtcgatcgacgactacgtcgacgtcggcggccaccttggcacggtcgagggcctgactatccgtaccgtgcgcctgcgcgacctggacggcgtggtgcataccatcccgttcagcgagatcaagagcatcaagaactactcgcgccagttcggctacgcgatgttccgctggccggtgccggcgagcatgccgatcgacgacgcggtggcgctggtgcgcgaggtcgcgatggagctgcgcagcgacccggcggtctaccgcaacctgtggtcgccgatggaattgcagggcgtggagagtttcgacaacggccaggcgatcctgcgcttccgcttcaagaccgcgccgatcaagcagtgggaggtccagcgggcgttcaacctgcgcctgcgtcggcgcctcgaccaggccggcctcgaactgtccatgccgcgtctcaacgtacagttgagccgggcgcccaaggcgaaatccgcggaaccggacgagcagggcacgccggcggacggcggcatctag

SEQ ID NO: 7992 - DNA, 933 bp, Pseudomonas aeruginosa
  CDS (1)...(933)
atgcgtatcgtcgtcgcattgggcggtaatgccctgctacgccgtggcgaacccatgaccgcggacaaccagcgggaaaacgtgcggatcgccgccgaacagatcgccaaggtggcgcccggcaacgagctggtgatcgcccacggcaacggcccccaggtcggcctgctggccctccagggtgccgcctacgacaaggtctcgccctacccgctggacgtcctcggcgcggaaaccgagggcatgatcggctacatgatcgaacaggaaatgggcaacctgctgccgttcgaagtgccgttcgccaccatcctcacccaggtcgaggtggacggtaaggatccggcgttccagaacccgaccaagccgatcggcccggtctactccagggaagaagccgagcgcctggccgccgagaagggctggagcatcgccccggacggcgacaagttccgccgcgtggtgcccagcccgcggccgaagcggatcttcgagatccgcccggtgaagtggctgctggagaaaggcaccatcgtcatctgcgctggcggcggcggtatcccgaccatgtacgacgaggccgggaagaagctcagcggcgtcgaggcggtgatcgacaaggacctctgctcctcgctgctggcccaggagctggtggccgacatcctgatcatcgccaccgacgtcgacgcggcctacgtcgactggggcaagccgacccagaaggccatcgcccaggcccacccggacgaactggagcgcctcggcttcgccgccggctccatgggtccgaaggtccaggccgccatcgagttcgcccgcgccaccggcaaggacgcggtgatcggttcgctcgcggacatcgtcgcaatcaccgagggcaaggcgggaacacgggtcagcacgcgcaaggcgggcatcgagtaccgctga

SEQ ID NO: 7993 - DNA, 1542 bp, Pseudomonas aeruginosa
  CDS (1)...(1542)
atgacgcaagccaacaacgccgtgtacaccgatatcagcgccgcccaactggtagaagaagccattcgccgcggtgagggcgaactggccgccaacggctcgctggtcgtacgtaccggccatcgcaccggccgttcgccggtcgaccgtttcatcgtcgaagagccgagcaccaaggacgcgatcgcctggggcaacatcaaccgtccgttcccggccgacaagttcgatgcgctgtgggcccgcgtggaagcgttcaacaacgcccaggaccatttcgtttcccatgttcatgtaggttccgccgaggcttactacctgccggtgaagatgaccaccgctaccgcctggcagaatctgttcggccgttgcctgttcatcgagccggagcagtacaacccggccggcaaggacgagtggcaggtcctcaatgtcgccaacttcgaatgcgtgcccgagcgcgacggcaccaactccgacggttgcgtgatcctcaatttcgcccagaagaaagtgctgatcgcaggcatgcgctatgccggcgagatgaagaaagccatgttctccgtgcagaacttcctgctgcccgagcgcgacgtgctgccgatgcactgcgctgccaacatcggcgaagcgggcgatgtgaccctgttcttcggcctgtccggcaccggcaagaccaccctgtccgccgatgaaagccgttacctgatcggtgacgacgagcacggctggggcgagggcgtggtgttcaacgtcgaaggcggttgctatgccaagtgcatcgacctgtccgagaagaacgagccggtcatctggaaagccatcaagttcggcgccgtgctggagaacgtggttctcgacgaagagcgcgtgcccaactacgccgatgacagcctgacccagaacagccgcgccgcctacccgctggagcacgtcgagaagcgttcggagaagaacctcggcggcgagcccaacgcggtgatcttcctgacctgcgacctgaccggcgtactgccgccggtatcgatcctgaacaatgagcaggcggcctaccacttcctgtccggctacaccgcgctggtcggctccaccgagatgggttccggcggcggtatcaagtcgaccttctccacctgcttcggtgctcctttcttcccgcgtccggccggcgtctatgccgagctgctgatcaagcgcatcaaggccttcggctccaaggtctacctggtcaacactggctggaccggcggtggctacggcgtcggcaagcgcttcaacatcccgaccacccgtggcgtgatcgcggcgatccagagcggcgcgctgatcggcgcggaaaccgagcacctggagatcatcaacctggacgtgccgaaggccgttccgggcgtcgagaccaatctgctcaacccgcgcaacacctgggctgacaaggctgcctacgacgaggcggcgaagggcctggccaagcagttcatcgaaaacttcaagaaattcgaggtttccgatgcgatcaaggccgccggcccgcagctgtaa

SEQ ID NO: 7994 - DNA, 396 bp, Pseudomonas aeruginosa
  CDS (1)...(396)
gtgagcgagaaagacgacgacaaggtgcgcctggacaagtggctctgggcggcgcgcttcttcaagacccgggcgctggccaaggccgcgatagagggcggcaaggtgcattgccggggcgagcggtgcaagccgagcaaggaacccagggtaggggaggagttgaccattcgtacgggcttcgacgagcgaaccgtgaccattcgcgcgcttgccgtagtccgtcgtggcgcgcaggaggcccaggctctctacgaggaaaccgcggacagcgtggaaagccgcgagcgcgcggcggccatgcgcaaggccggggcgctgggcgtacagaccgaggggcggccgagcaagaagcagcggcggcagatccaccagttgcgcggcggccaggactga

SEQ ID NO: 7995 - DNA, 2340 bp, Pseudomonas aeruginosa
  CDS (1)...(2340)
atggacagcatcaacacccgtatcgccgaagagctctccgcactgccctccggccgcgttcaaccgcagcaagtcgccgctgccgtcgccctgctcgacgaaggctccaccgttcccttcatcgcccgttaccgcaaagaggtcaccggcagcctcgacgatacccagttgcgcatgctggaagagcgcctgcgctacctgcgcgaactggaagaacgccgcggcgcgatcctcgccagcatcgaggaacagggcaagctgacccccgaactggcccgcgacatcaagctcgccgacaccaagacccgtctcgaagacctctacctgccttataagcagaagcgccgcaccaagggccagatcgccctggaagccggcctcggcgcgctggccgacgcactgttcgacgacccgaccctggtcccggaaagcgaggccgcgcgtttcgtcgacgccgagaaaggcttcgccgacgtcaaggcggtgctggaaggcgccaagtacatcctcatggagcgcttcgccgaagacgccacgctgctcgacaagctgcgcgtgttcatgaagaacgaagcgaccctgaccgcccgcgtggtccccggcaaggaacaggaaggcgccaagttcagcgactacttcgaacacgatgagccgctgaaaagcgccccgtcgcaccgcgccctggcgatcttccgcggacgcaacgaaggcgtcctcagcgcctcgctgaaggtcggcgaggaagcgccgggcaccctgcacccatgcgaagtcatgatcgccgagcgcttcggcctgtccaaccagggccgcgccgccgacaagtggctggccgaggtggtgcggtggacctggaaggtcaagctctatacccacctggaaaccgacctgttcggcgagctccgcgacggcgccgaggacgaggcgatcagcgtgttcgcgcgcaacctgcacgacctgctgctggccgccccggccggcccgcgtgccaccctcggcctcgacccgggcctgcgcaccggggtcaaggtcgcggtggtcgacgccaccggcaagctgctggacaccgccaccgtctacccacatgcgccgaagaaccagtgggaccagaccctcgccgtgctcgccgcgctgtgcgccaagcaccaggtcgagctgatcgccatcggcaacggcaccgccagccgcgagaccgacaagctggccggcgaactgatcaagaagtatccgggcatgaagctgaccaagatcatggtcagcgaagccggcgcatcggtgtattccgcctccgaactggcggcgaaggagttccccgagctggacgtgtccctgcgcggcgccgtatccatcgcccgtcgcctgcaggacccgctggcggagctggtgaagatcgagcccaagtcgatcggcgtcggccagtaccagcacgacgtgtcccagctgaagctggcgcgtagcctggacgcggtggtcgaggattgcgtgaacgccgtcggcgtcgacgtcaacaccgcctccgccgccctgctggcacgcatctccggcctcaactcgacgctggcgcagaacatcgtcgcgcaccgcgacgccaacggagcgttccgcacccgcgacgagctgaagaaagtcagccgcctgggcgaaaagaccttcgagcaagccgccggcttcctccgcgtgatgaacggcgacaacccgctggacgcctcggcggtgcacccggagacctatccgctggtgcagcgcatcgccgccgacaccgagcgcgacatccgctcgctgatcggcgactcggcgttcctcaagcgcctcgacccgaagaagttcaccgacgagaccttcggcctgccgaccgtcaccgacatcctcaaggaactcgacaagcccggccgcgacccgcgtccggagttcaagaccgcagaattccaggaaggcgtcgagagcctcaaggacctcaagccgggcatggtcctggagggcgtggtgaccaacgtcaccaacttcggcgcgttcgtcgacatcggcgtccaccaggacggcctggtgcacatctcggcgctgtccgagaagttcgtcaaggatccgtacgaagtggtcaaggccggcgacatcgtcaaggtcaaggtcatggaagtggacatcccgcgcaaccgtgtcggcctgtccatgcgcatgagcgacacccccggcgagaaggtcgaaggccagcgcggcgggcgtcccaccggcagcggccagccgcgccaggagcgtggcgccccgcgcggacagagcgcgccgccggcgaacaacgccatggccgcgctgttcgccaacgccaagcaactgaagaagaagtga

SEQ ID NO: 7996 - DNA, 1083 bp, Pseudomonas aeruginosa
  CDS (1)...(1083)
atgggattgcgcaccccgctttacgagctgcacgtcgcgctcggcgccaagatggtcgatttcggcggttgggacatgccgctgcactacggttcgcaggtcgaggagcaccatcaggttcggcgtgactgcggcgtcttcgacgtgtcccacatgaccgtggtcgacgtcgccggcgagcaggccacggcctatctgcagcatctcctggcgaacgacgtggcgcgtctcggcgaaaccggcaaggcgctctacagcgcgatgctcaacgaagagggcggggtggtcgacgacctgatcgtctacctgaccgagcacggctaccgggtggtggtcaatgcttccacccgcgacaaggacatcgcctggatgcaggcgcaggccgccggcttcaaggtcgacctgcaggaacgcggcgacctggcgatgctcgccatccagggccccaacgcccgcgtgcacagctccgaactggtgtccccggcacgcgccgcgctgatacgcgaactcaagccgttccagggccgtgccgagggcgactggttcatcgcccgcaccggctacaccggcgaggacggcctggaaatcatgctgccggccgccgaggcgccgggtttcctcaatgagctggttggcgccgggatctccccggcgggcctgggtgcgcgcgatacgctgcgcctggaggccgggctcaatctctacggccaggacatggacgaaagcgtttccccgcttgccgccaacatgggctggaccgtagcctgggagccggttgcgcgggacttcgtcggccgccgcgcgctggaagcgcagaaggccgccggcgaccagccgaagctggtcggcctggtactggaggagcgcggcgtgctgcgcgcccaccaggtggtgcgggtagctggcattggtgagggggagatcaccagcggcagcttttcgcctaccctgaacaagtccatcgcgctggcccgcgtgccggccgccaccggcgaccgcgccgaggtggaaatccgcggcaagtggtacccggtacgggtggtccagcccagtttcgtgcgtcacggcaagcccctgatctaa

SEQ ID NO: 7997 - DNA, 1260 bp, Pseudomonas aeruginosa
  CDS (1)...(1260)
atgaatctgaccgaactcaagcaaaagccgattgccgaactgctggaaatgtccgatgccatgggcctggaaaacatggcccgttcgcgcaagcaggacatcatcttcgccctgctgaagaagcacgcgaaaagtggtgaagagatctccggcgatggcgtgctggagattcttcaggacggcttcggcttcctgcgctccgccgactcttcctacctggccggccccgacgacatctatgtctcgccgagccagatccggcgcttcaacctgcgcacgggcgacaccatcatcggcaagatccggccgccgaaagagggcgagcgttacttcgccctgctcaaggtcgactcgatcaacttcgatcgtccggagaatgcgaagaacaagattctcttcgagaacctgacgccgctgttccccaacgagcggatgaagatggaagccggcaacggctccaccgaagacctgaccggccgcgtcatcgatctctgcgcgccgatcggcaagggccagcgcggcctgatcgtggcgccgccgaaggcgggcaagaccatcatgctgcagaacatcgccagcaacatcacccgcaacaaccccgaatgccacctgatcgtactgctgatcgacgagcgccctgaggaagtgaccgaaatgcagcgcaccgtgcgcggcgaagtggtcgcctcgacctttgacgaaccgccgacccgtcacgtacaggtcgccgagatggtgatcgagaaggccaagcgcctggtcgagcacaagaaggacgtggtcatcctgctcgactccatcacccgtctggcgcgggcctacaacaccgtgatccccagctccggcaaggtgctcaccggcggtgtcgacgcccatgccctggagaagccgaagcgcttcttcggcgccgcgcggaacatcgaagagggcggttctcttacgattctcgccacggcgttggtggaaaccggctcgaagatggacgaggtgatctacgaggaattcaagggtaccggcaacatggaactcccattggatcgcaagatcgccgagaagcgcgtgttcccggccatcaacatcaaccgttcgggtacccgccgcgaagagctgctgaccagcgaggacgagctccagcgcatgtggatcctgcgcaagatcctgcacccgatggacgagatctccgcgatcgaattcctcatcgacaagctcaagcagaccaagaccaacgatgagttcttcgattcgatgaaacggaagtag

SEQ ID NO: 7998 - DNA, 1014 bp, Pseudomonas aeruginosa
  CDS (1)...(1014)
gtgagcttcactcccgccaatcgcgcctatccctacacccgcctgcggcgcaatcgccgcgatgacttctcccgccgcctggtccgcgagaatgtcctcaccgtcgacgacctgatcctgccggtgttcgtcctcgatggggtcaaccagcgtgaaagcattccgtcgatgcccggcgtcgagcgcctgtccatcgaccagttgctgatcgaggcggaagagtgggtggccctgggcattccggcgctggcgctgttccctgtgaccccggtggagaagaagtccctggacgccgccgaggcatacaacccggaaggcatcgcccagcgcgccacccgtgccctgcgcgagcgctttccggagctgggcatcatcaccgacgtggcgctcgacccgttcaccacccatggccaggacggcatcctggatgacgatggctacgtcctcaacgacgtcagcatcgacgtgctggtacggcaggcgctgtcccacgccgaggccggcgcccaggtggtagcgccctcggacatgatggacggtcgcatcggtgcgatccgcgaggccctggagtctgccggccacaccaatgtgcggatcatggcctactcggccaagtacgccagcgcctactacggtccgttccgcgatgcggtcggctcggcttcgaacctcggcaagggcaacaaggccacctaccagatggatccggcgaacagcgacgaggcacttcacgaagtggccgccgacctggccgaaggcgccgacatggtgatggtcaagccgggcatgccctacctcgacatcgtgcgtcgggtgaaggatgaattccgcgccccgacctttgtctaccaggtcagcggcgagtatgcgatgcacatgggcgccatccagaacggctggctggccgaatcggtgatcctcgaatcccttaccgccttcaaacgtgccggcgccgatggcattctgacctacttcgccaagcaggccgcagaacaattaagacgggggcgttga

SEQ ID NO: 7999 - DNA, 942 bp, Pseudomonas aeruginosa
  CDS (1)...(942)
atgtcgtcccgcgaaatccgcatcgccactcgccagagcgccctcgccttgtggcaggccgaatacgtcaaggcgcgcctggaacaggcgcatcccggcttgaccgtcaccctgctgccgatgaccagtcgcggcgacaagctgctcgacgcaccgctggcgaagatcggcggcaagggcctgttcgtcaaggaactggaaaccgccctgctcgaaggcgccgccgacatcgcggtgcattcgatgaaggacgtgccgatggactttcccgaggggctcggcctctacaccatctgcgagcgcgaagacccgcgtgacgctttcgtctcgaacacctacgccagcctcgagcaactgccagccgggagcgtggtcggcacctccagcctgcgccgccaggcgcagctgctggcgcgccggccggacctgcagatccgtttcctgcggggcaacgtcaatacccgcctggccaagctggatgccggcgaatacgacgcgatcatcctcgccgccgccggcctgatccgcctcggcttcgagtcgcgcatccgctcctcgatcagtgtcgacgacagcctgcccgccggcggacaaggcgccgtcggcatcgaatgccgtacggccgacagcgacctgcatgccttgctggaacccttgcaccataccgacacggctctgcgggtcactgccgagcgcgcgctgaacaagcggctcaacggcggttgccaggtgccgatcgcctgctacgccatccgcgagggcgaccagctgtggctgcgcggcctggtcggccagcctgatggcacccagttgctgcgcgccgaggggcgggcgccactggcggaagccgaggcgctgggcgtgcgggtggccgaggacctgctggagcagggcgccgaagcgattctcgaagccgtctacggcgaggccggacatccgtga

SEQ ID NO: 8000 - DNA, 747 bp, Pseudomonas aeruginosa
  CDS (1)...(747)
atgaatgtcctgattgtcgatgacgaacctctggcgcgagagcgcctggcccgattggtagggcaactggacggctatcgcgtcctcgagccctcggccagcaatggcgaagaagcgctgacgctgatcgacagcctcaagcccgatatcgtcctgctggatatccgcatgcccggtctggacggcctccaggtcgcggccagactctgcgagcgggaagcgccgccggctgtgatcttctgcacggcccatgacgaattcgccctggaagccttccaggtcagcgccgtgggctacctggtcaagccggtgcgcagcgaagacctggccgaggcgttgaagaaagcctcgcgaccgaaccgcgtgcaactggccgcgctgaccaagcccccggcctccggcggcagcggtccgcgcagccacatcagtgcacggacccgcaaggggatcgagctgatcccgctggaagaggtgatcttcttcattgccgaccacaagtacgtgaccttgcgccatgcgcagggcgaggtgctgctggacgagccgttgaaggcgctggaagacgagttcggcgagcgcttcgtgcgcatccaccgcaacgcgctggtcgcccgcgaacggatcgaacgcctgcagcgtacgccgctggggcatttccagctctacctgaaaggcctcgacggcgatgcgctgaccgtcagccggcggcacgtggccggagtcaggcgtctgatgcatcagctctga

SEQ ID NO: 8001 - DNA, 1248 bp, Pseudomonas aeruginosa
  CDS (1)...(1248)
atggacacattcagttaccgcgacgctgagctgttcgcggaaggggtggcgctttcccgcatcgccgagcgtttcggcacgcccacctacgtctattcccgcgcgcacatcgaggcccagtaccgcgcctatgccgatgccctcgccggcatgccgcatctggtctgcttcgcggtcaaggccaactccaacctcggggtgctgaatgtgctggcgcgcctcggcgccggtttcgacatcgtttcccgcggtgagctggagcgtgtcctggccgccggcggcgatccggccaaggtggtgttctccggcgtcggcaagacccgcgacgacatgcgccgcgccctggaagtcggcgtgcactgcttcaacgtcgagtccggcgaagagctggagcgcctgcaacgggtagctgcggaactcggcgtgaaagcgccggtatcgctgcgggtcaacccggacgtggacgcccagacccacccctatatctccaccggcctgaaagagaacaagttcggcatcgccatcgacgaggccgaggcggtctacgcccgcgccgccgagcttgaccacctggaggtgatcggcgtcgactgccacatcggctcgcagttgacccagctggagcccttcctcgacgccctcgagcgcctgctcgggctggtcgaccgcctggccggcaaaggcatcggcattcgccacctggacctcggtggtggcctcggggtgcgctaccgcgacgaacagccgccgctggccggcgactacatccgcgccatccgcgagcgcctgcacggccgcgacctgaccctggtgttcgagccgggccggtccatcgtcgccaacgccggcgtgctgctgacccgtgtcgagtacctcaagcacaccgagcacaaggatttcgccatcgtcgacgcggcgatgaacgacctgatccgcccggctctctaccaggcctggatggacgtgcaggcggtacgcccgcgcgacgccgcgccgcgccgctacgacctggtcgggccgatctgcgagaccggtgacttcctcgccaaggatcgcgacctggcgctcgccgaaggcgacctcctggcggtgcgctcggccggcgcctacggcttcgtcatgagctcgaactacaacacccgcggccgcgccgccgaggtgctggtggatggcgagcagacccacgaggtccgtcgccgcgagaccgtccaagagctctacgccggcgaaagcctgctgccgcagtga

SEQ ID NO: 8002 - DNA, 2034 bp, Pseudomonas aeruginosa
  CDS (1)...(2034)
atgcagcaggcgcaggtgcccctgctgctcagcatcgaggagcagaaccaggtgggcatgcgcgttggcggccagggcgagatcctcttcttcaacgccaagaccggtgtcgaactgaagcgtgtcgctctgccgcttccggcgggcagcgagatccgctcgatcgcccaggaccagccgggcagcccgacggtcgccctgggcctgtccaacggacaggtgctggtgttccagcacacctacaaggtcacctacccggacaacaagaagaccatcaccccggagatcgccttcccctacggcgagaccccgatcggtctcgatccgcagggccgcccgctggagcatgtgagcatcaatgccggcgacgacagcctgctgctggctggctccgtcgacaagcaactgctgctgttgagcatgactcgcgaagagaacatgctgaccggcgaaagcacgctggacgaggagcgcatcgaactcccgcagatcgccgaaccggtgaaagccatctacctcgacccgcgcaagcagtggctgtacgtgatcaacggacgtgccaccgccgatgtgtttgacctgcacagccgccagttgaacggtcgctacaagctgctggaagaccccaacgccgaggtcaccgcgagcacccagctgctgggcggcatctcgctgctggtgggcgattccaagggtggcatcgcccagtggttcatggctcgcgataccgacggcgaaccgcgcctgtcgcacgttcgcgacttcaacctggatggcgcgccgatcagcgccatcgctccggaacaacggcgcaagggcttcatcgccctggacgagaagggcaacctcggcgtcttccacagcaccgcgcaccgtaccctgctggtccagccggtcgccgactcttccggggtcatcaccctgtcgccgcgggccaaccgcctgctgctggagcagggtggcaagatccaccgcttcgccctgagcaacccgcacccggaaatctcctggagcgcgctctggggcaaggtctggtacgagagctacgacaagccggcctacgtctggcagtccaccgccgcgaccaccgacttcgaaccgaagctgagcctctcgccgctgaccttcggcacgctcaaggccgccttctacgcgatgatcctggcagctccgctggccatcgcggccgccgtctacaccgcctatttcatggctccggcgatgcgccgcaaggtcaagccggtgatcgagctgatggaggcgctgccgacggtgatcctcggcttcttcgccggcctgttcctggcgccctacgtcgaaggccacctgccgggggtgttcagcctgctgttgctgacgccgctgggcatccttctcgccggcctgctctggagccgcctgcccgagcgtatccgcctgagcctgccggccggctgggaagccgcgctgctgatcccggtggtgctcgccgtcggcgccttcgccctgtggctgagcccgcacctggagaccaccttcttcggcggcgacatgcgcctctggctgagccacgacctgggcatcacctacgaccagcgaaatgccctgatcgtcgggctggcaatgggcttcgcggtgatcccgaatatcttctcgatcgccgaggacgccatcttcagcgtgccgcgcagcctcacctacggctccctggccctgggcgccacgccctggcagacgctgacccgcgtggtgatcctgaccgccagtccaggcatcttctcggcgctgatgatcggcatgggccgcgccgtcggcgagaccatgatcgtgctgatggcgaccggcaataccccggtgatggaagtgaatatcttcgaggggatgcgcaccctggcggccaacgtcgcggtggagatgcccgagtcggaggtgggcggcagccactaccgcgtgctgttcctctcggcgctggtactgctgacgttcaccttcgtgatgaacaccctggcagagctgatccgtcagcgtctgcgcaagaaatacgcgtcgttgtaa

SEQ ID NO: 8003 - DNA, 1686 bp, Pseudomonas aeruginosa
  CDS (1)...(1686)
atgtcccaggaattcgactacatcatcatcggagccggctctgccggtaacgtactcgctacccgcctcaccgaagatgccgacgtcagcgtcctgctgctcgaagccggcggtcccgactaccgcttcgacttccgcacccagatgccggcggcccttgccttcccgctgcaggggcggcgctacaactgggcctacgagaccgaccccgagccctacatgaacaaccgccgcatggagtgcggtcgcggcaagggcctgggcggctcctcgctgatcaacggcatgtgctacatccgcggcaacgccctggacttcgacggctgggccaaggagccgggcctcgaggactggagctacctcgactgcctgccgtacttccgcaaggcggaaacccgggacatcggccccaacgactaccatggcggcgacggcccggtcagcgtgaccacgccgaaggccggcaacaacccactgttccatgcgatggtcgaggccggcgtgcaggccggctacccgcgaaccgatgacctcaacggctaccagcaggaaggcttcggccccatggaccggaccgtcaccccggagggccgtcgcgccgccaccgggcgcggctacctggaccaggcccgcggccggcccaacctgaccatcgtcacccacgccctgagcgaccgcatcctgttcagcggcaagcgcgccatcggcgtctcctacctggtgggcaacggcgacaacccggtcaccgcccacgcccgccgcgaagtattggtgtgcagcggcgcgatcgcctcgccgcaattgctgcaacgctccggcgtcggcccggcggccctgctgcgcgacctggacatcccggtggtgcatgacctgccgggcgtcggcgccaacctgcaggatcacctggaactctacctgcagtacgcctgcaagcagccggtgtcgatctacccggcgaccaaatggtggaaccagcctgccatcggtgcccagtggctgttcctcggcaagggcctcggcgccagcaaccagttcgaggccggcggcttcatccgaacccgcgaagcgttcgaatggccgaacatccagttccatttcctcccggtggcgatcaactacaacggcagcaagggcgtgcaggagcacggcttccaggcgcacatgggctcgatgcgctcgccgagccgcgggcgcatccacctgaagtccagggacccgcgccagcatccgagcatcctgttcaactacatgtcccacgagcaggactggcaggagttccgcgacggcatccggctgacccgcgagatcatgaaccagccggcgctggacccctatcggggccgcgagttgagccctggggtgagcgtgcagtcggacgccgaactcgacgagttcatccgcaaccatgctgagaccgctttccacccatcctgctcgtgcaagatgggcagcgacgacatggcggtggtcgatggccagggacgggtccatggcatggaaggactgcgagtggtggatgcgtcgatcatgccgctgatcatcaccggcaacctcaatgccaccaccatcatgatggccgagaagatcgccgacaggatccgcggtcgccagccgctgccgcgcagcacggcgaagtactacgtggccggggatgcgccggtacgcggcaaccccgtgcgggcctga

SEQ ID NO: 8004 - DNA, 1473 bp, Pseudomonas aeruginosa
  CDS (1)...(1473)
atggcccgattcgaagaacagaagctctacattggcggtcgctacgtggaggccagcagtggcgccaccttcgagaccatcaacccggccaacggcgaagtgctcgccaaggtccagcgggcttccagggaagacgtcgagcgggccgtgcagagcgccgtcgaggggcagaaggtgtgggcggcgatgaccgccatgcagcgctcgcgcattctccgtcgcgccgtcgacatcctccgcgagcgcaacgacgaactggctgccctggaaaccctggataccggcaagccgctggcggaaacccgctcggtggacatcgtcaccggcgccgacgtgctcgagtactacgccggcctggtcccggccatcgaaggcgagcagattcccctgcgcgaaaccagtttcgtctacacccgccgcgagccgctgggcgtggtcgccggcattggcgcctggaactacccggtgcagatcgccctgtggaaatccgccccggccctcgctgccggcaacgcgatgatcttcaagcccagcgaagtcaccccgctgacggccctcaagctggccgagatctacaccgaggccggcgtgccggacggcgtgttcaacgtgctcaccggcagcggacgcgaagtcggccagtggctgaccgagcacccgctgatcgagaagatctccttcaccggtggcacctccaccggcaagaaagtcatggccagcgcttccagctcgtcgctgaaggaagtgaccatggagctgggcggcaagtccccgctgatcatcttccccgacgcagacctcgaccgcgccgccgacatcgccgtcatggccaacttcttcagctccggccaggtctgcaccaacggcacccgggtgttcatccaccgttcccagcaggctcgcttcgaagccaaggtactggagcgcgtgcagcgcatccgtctcggcgacccgcaggacgagaacaccaacttcggcccgctggtcagcttcccgcacatggaaagcgtgctcggctacatcgagtccggcaaggcgcagaaggctcgcctgctgtgcggcggcgagcgtgtgaccgatggagcgttcggcaaaggtgcctacgtcgcgccgaccgtgttcaccgattgccgcgacgacatgaccatcgtccgcgaggaaatcttcggcccggtgatgagcatcctggtctatgacgacgaagacgaggcgatccgccgcgccaacgataccgagtacggcctcgccgccggcgtcgtgacccaggacctggcccgcgcccaccgcgccatccatcgcctggaagccggcatctgctggatcaatacctggggcgagtcgccggcggaaatgccggtcggcggttacaagcaatccggtgtcggtcgcgagaacggtctcaccaccctggctcattacactcgcatcaagtccgtgcaagtggagctgggcgactacgcctcggtgttctga

SEQ ID NO: 8005 - DNA, 978 bp, Pseudomonas aeruginosa
  CDS (1)...(978)
atgagcccagccgaattgcacgccgacagcatcgtcatcgacggtctgatcatcgccaagtggaaccgcgaactgttcgaggacatgcgcaagggcggcctgaccgccgccaattgcaccgtatcggtatgggaaggcttccaggcgacggtgaacaatatcgccgccagcaacaagctgatccgcgacaacagcgacctggtgatcccggtgcgcagcaccgcggacatccgcaaggccaaggagcagggcaagaccggcatcctctacggtttccagaatgcccacgcattcgaggaccagatcggctacgtcgaggtgttcaagcagctcggcgtgggcatcgtgcagatgtgctacaacacccagaacctggtcggcaccggctgctacgagcgtgacggcgggctctccggcttcggtcgggagatcgtcgcggagatgaaccgggtcggcatcatgtgcgacctctcccacgtcggcagcaagacttccgaagaggtcatcctcgaatcgaagaagccggtctgctactcccactgcctgccgtccggcctcaaggaacacccgcgcaacaagtccgacgaggagctgaagttcatcgccgatcatggcggcttcgtcggtgtgaccatgttcgcgccgttcctcaagaaaggcatcgactcgaccatcgacgactacgccgaggccatcgagtacgtgatgaacatcgtcggcgaggacgccatcggcatcggcaccgatttcacccagggccacggccacgacttcttcgagtggctgacccacgacaagggctacgcccggcgcctgaccaacttcggcaagatcgtcaacccgctgggcatccgcaccgtcggcgaattccccaacctcaccgagaccctgctcgagcgcggcatgcccgagcgcgtggtgcgcaaggtgatgggcgagaactgggtaagggtcctgcgcgacgtctggggcgagtaa

SEQ ID NO: 8006 - DNA, 1029 bp, Pseudomonas aeruginosa
  CDS (1)...(1029)
atgaccctgccacagaccatgaaagccgcggtcgtgcacgcctacggcgcgccgctgcggatcgaggaagtcaaggttccgctgcccggccccgggcaggtactggtgaagatcgaagcctccggcgtctgccacaccgacctgcatgccgccgagggcgactggccggtgaagccgccgttgccgttcattcccggtcacgaaggcgtcggctacgtcgccgcggtgggcagcggagtgacccgagtgaaggaaggcgaccgggtcggcatcccctggctgtacaccgcctgcggctgctgcgagcactgcctgaccggctgggagaccctctgcgagagccagcagaacaccggctactcggtgaacggcggctatgccgaatacgtattggccgacccgaactacgtcggaattctgccgaaaaacgtcgaattcgctgaaatcgcgccgatcctctgcgccggcgtcaccgtctacaaggggctcaagcagactaacgcgcgccccggccagtgggtggcgatctccggcatcggcggcctcggccacgtcgccgtgcagtacgccagggccatgggcctgcacgtcgccgccatcgacatcgacgacgccaagctggaactggcgcgcaagctcggtgccagcctgacggtcaacgcccggcaggaagacccggtggaggtgctccagcgcgacatcggcggcgcccacggggtgctggtcaccgcggtatccaatagcgccttcggccaggccatcggcatggcgcgccgcggcggcaccatcgccctggtcggcctgccgccgggtgacttcccgacgccgatcttcgacgtggtgctcaagggcctgcacatcgccggctcaatcgtcggcacccgcgcggaccttcaggaagccctcgactttgccggcgaaggcctggtcaaggcgaccatccatccgggcaagctggacgacatcaaccagatcctcgaccagatgcgcgccgggcagatcgaggggcgcatcgtccttgagatgtga

SEQ ID NO: 8007 - DNA, 1467 bp, Pseudomonas aeruginosa
  CDS (1)...(1467)
ttgagtacaccagccactccaacgtcctgcgacatcctggtcttcggcggtaccggcgacctggccctgcacaagctgctgccggcgctctatcgcctgcaccgggaggaccgcctgccggccgatacacggatcttcgccctcgcccgcagcgcgctggacaacgccgccttcctcgccctcgccgagcgcaacgtccgcgcggtggtggcgcgcagcgagttcgccgccgaacaatggaaaggcttcgccgcgcgcctcgactacctggccatggacgcctcgcagagcgccgacttcggccgtctcgcgcggcacctgaagagcagcgagggccgggtgctggtgcactacctggcgacctcgccgagcctgttcgcgccgatcgcgcagaacctctccatcgccggcctcgccgggccgcaagcgcgcatcgtgctggaaaaaccgctgggccattcgctggactcggcgagggcgatcaaccagtccatcggccgggtgttcgacgagtcgcgggtgttccgcatcgaccactacctgggcaaggaaaccgtgcagaacctgatggccctgcgcttcgccaatgcgttgttcgagccggtctggcgcgcggcgcacatcgaccatgtgcagatcagcgtcaacgagacccttggcgtggagaaccgtggcggctactacgaccacgccggggcgatgcgcgacatggtgcagaaccatctgctccagttgctctgcctggtggcgatggaggcgccggtgcgtttcgacgccgaggctgtgcgcaacgagaagctcaaggtgctgcaggcgctgaagccgatctccgggctcgacgtgcaggacaagacggtacgcggccagtacgccgccggcaggatcggcggccaggaggtgccggcgtactacttcgagaagaacgtcgacaacgacagcgataccgagaccttcgtcgcgctccaggccgaggtcgagaactggcgctgggccggggtgccgttctacctgcgcaccggcaagcgcatggcgcgcaagtgctcggaaatcgtcatccagttcaagccggtgccgcacagcctgatcgacggcggcggcgggccggccaaccgcctgtggataaggttgcagccggaggagcggatcagcgtgcaactgatggccaagaccccgggcaagggcatgcaactggaaccggtggagctggacctcaacctggccgaggccctcagccgcaacaagcggcgctgggacgcctacgaacgcctgctgctggacgtgatcgagggcgactcgacgctgttcatgcgccgcgacgaggtagaggccgcctggggctgggtcgacccgatcctcgccggctggcgcgagcactaccagagcccgcggccctacccggccggcagcaacggcccggaacaggcgcaactgctgctggaactgcagggtcgacgctggctggaatga

SEQ ID NO: 8008 - DNA, 1395 bp, Pseudomonas aeruginosa
  CDS (1)...(1395)
atgaccgccaccaccctccgccccgaactgctgtgccccgccggcaccctgaaaagcatgcgctatgccttcgcctacggcgccgatgccgtctacgccgggcagccgcgctacagcctgcgggtgcgcaacaacgatttcgaccacgcccaactggccgaaggcatcgccgaggcccacgcacttggcaagcgcttctacgtggtggtcaacatcgccccgcacaacgccaagctgaaaaccttcctgcgcgacctggagccggtggtcgccatgggtccggatgcgctgatcatgtccgatcccggcctgatcatgctggttcgccagcatttcccgcagatgcccatccacctgtcggtgcaggccaacgcggtgaactgggccgcggtgcaattctggcggcagcagggcctgacccgggtgatcctttcccgcgagctgtcgctggaggagatcgaggaaatccgccagcaggtgccggacatggagctggaagtgttcgtccacggcgccttgtgcatggcctattccgggcgctgcctgctgtccggctacatcaaccgccgcgaccccaaccagggcacctgcaccaatgcctgccgctgggaatacaaggcggtggagggccgcgaggacgagctgggcaacgtggtggcgcgggagccgaccctgggacgcggcgcgccgaccgagcaggtgttcctcctcgaggaaggcaaccgtcccggcgaaccgatggccgccttcgaggacgaacacggcacctacatcatgaattccaaggacctccgcgccgtgcagcacgtcgagcggctggcgcggatcggcgtgcactcgctgaagatcgagggccgcaccaaatcccactactacgtggcgcgcaccgcccaggtctaccgccaggcgatcgacgacgcggcggccggcaagccgttcgaccgcggcctgatggacaccctggagtccctcgcccaccgcggctacaccgagggcttcctgcgccgccacgtgcacgacgagtaccagaactaccagcacggccattcgttgtccgagcgccagcagttcgtcggcgaactcaccggcgaacgccgcgacggactggccgaggtggaggtgaagaaccgcttccagcgcggcgacagcgtcgaactgatgactccgcgaggcaacctgagcctgcgcgtggaggacctgcgcaacgccgccggcgaggccatcgaggtggcgccgggcaatggccacgtggtctacctggcgctgccggaaggcctggacctgtgctacgcgctactgatgcgcgatctccagcccggccaggatacccgccagccgcaggccgaacgcagcggagggtgtgccggcaagggcgcttgcggctgcgctcactga

SEQ ID NO: 8009 - DNA, 1788 bp, Pseudomonas aeruginosa
  CDS (1)...(1788)
atgagcatgccgctgccgatgaagctccggacccggttgttcctcagcatttccgcgctgatcaccgtctcgctgttcggcctgctgctcgggctgttcagcgtgatgcagctcggccgcgcccaggaacaacggatgtcgcaccactacgcgaccatcgaggtgagccagcaactgcgccagttgctcggcgaccagctggtcatactgctccgcgaaacccccgacgggcaggccctggagcgctcgcaaaacgacttccgacgagtcctggaacagggccgggcgaataccgtcgacagcgccgagcaggccgccctggatggcgtccgcgacgcctacctgcaactgcaggcgcacaccccggccctgctcgaggcgcccatggccgacaacgacggcttcagcgaagccttcaatggcctgcgcctgcgtttgcaggacctgcagcaactggcgctggccggcatcagcgaagccgagaccagcgcccgccatcgtgcctacctggtcgccggcctgcttggcctggtgggcgtcgccatcctgctgatcggtttcgtcaccgcccacagcatcgcccggcgcttcggcgcgccgatcgaaaccctggcgcgggcggcggacaggatcggcgaaggcgatttcgacgtgaccctgccgatgaccaacgtcgccgaggtcggccagttgacccggcgtttcggcctgatggccgaggccctgcggcagtatcgcaagaccagcgtcgaagaggtgctttccggcgagcggcgcctgcaggcggtactcgacagcatcgacgacggcctggtgatcttcgacaaccagggacgcatcgaacacgccaacccggtcgcgatccgccagctgttcgtctccaacgacccccatggcaagcggatcgacgaaatactcagcgatgtcgatgtccaggaggcggtggaaaaggccctgctcggcgaagtccaggacgaggcgatgcccgacctggtggtggacgtcgccggcgagtcgcgcctgctggcctggtcgctgtatccggtcacccatcccggcgggcatagcgtcggcgcggtgctggtggtccgcgacgtgaccgagcagcgcgccttcgaacgggtccgcagcgaattcgtcctgcgcgcctcccacgaactgcgtacgccggtgaccggcatgcagatggccttcagcctgctccgcgaacgcctggacttccccgcggagtcacgggaagcggacctgatccagacggtggacgaagagatgtcgcggctggtcctgctgatcaacgacctgttgaacttctcgcgctaccagaccggcatgcagaagctcgaactggcttcctgcgacctcgtcgacctgctcacccaggcgcagcagcgtttcattcccaagggcgaggcccgccgggtctcgctgcaactggagctgggcgatgaactgccgcgcctgcagctcgatcgcctgcagatcgagcgggtgatcgacaacctgctggaaaacgccctgcgccatagcagcgaaggcgggcagatccacctgcaggcccggcgccagggcgaccgggtgctgatcgcggtggaagacaatggcgaaggcattcccttcagccagcaaggacggatcttcgagcctttcgtccaggtcggacgcaagaagggcggcgccggcctcggcctggcgctgtgcaaggaaatcatccagctgcatggcgggcgcatcgcggtgcgctcgcaaccgggccagggcgcgcgcttctacatgctgctgccggtgtga

SEQ ID NO: 8010 - DNA, 1008 bp, Pseudomonas aeruginosa
  CDS (1)...(1008)
gtgatcgaattccacgacgtccacaagacctatcgagttgccggtcgggaaatccccgccttgcaaccgacccgcctgaacatccaggccgggcagattttcggcctgatcggccattccggtgccggcaagagcaccctgctgcgcctgatcaaccgcctcgaggagcccagcggcggccgcatcctggtcgagggcgaagacgtcaccgccctcgacgccgaaggcctgcgccgtttccgccagcgcgtcgggatgatcttccagcacttcaacctgctgtcctcgaagaccgtcgccgacaacatcgccatgcctctgcgcctggccggcggcttcagccgtgccgaagtcgatgcgcgggtttccgagctgctcgcgcgggtcggcctgtccgaccacgcgcgcaagtatccggcccagctctccggcggacagaaacagcgcgtcggcatcgctcgcgccctggcctgccggccgagcatcctgctctgcgacgaggccaccagcgccctcgatccgcagaccaccgcctcggtcctgcaactgctggcggaaatcaatcgcgagctgaagctgaccatcgtcctcatcacccacgagatggacgtgatccgtcgtgtctgcgaccaggtcgcggtcatggacggcggcgccatcgtcgagcagggcgatgtcgccgatgtcttcctccatccgcagcacccgaccacccgccgcttcgtgttcgaggccgaacgggtcgacgaggacgagcgccacgacgatttcgcccacgtgccgggtctcatcctgcgcctgaccttccgcggcgaagccacctatgcgccgctgctgggcaccgtggcgcggcagaccggggtcgactacagcatcctttccggacgcatcgaccgcatcaaggacacgccctacggccagttgaccctggccctggtcggcggtgacctggaagccgccatgagccagttgaacgccgctgacgtacatgtggaggtactgcgctga

SEQ ID NO: 8011 - DNA, 678 bp, Pseudomonas aeruginosa
  CDS (1)...(678)
atggacttcttcgaaaccatgagcttcgccaacatcgactggtacgaaatctggctggccagcgtcgacaccttctggatgctcggcggttcgctgctgttcacagtggtcctcggcctgcccctcggcgtcctgctgttccttaccgggccacggcagatgttcgagcagaaggcggtctacaccctgctctcgctagtggtgaacatcctccgttcgttgccgttcatcatcctgctgatcgtgatgatcccgctgaccgtactgatcaccggtacctcgctgggcgtcgccggggccatcccgccgctggtggtgggcgccacgccgttcttcgcgcgcctggtggaaaccgcgctgcgcgaggtcgacaagggcatcatcgaggcaacccaggcgatgggcgccagcacccggcagatcatctggaacgccctgctgccggaagcccggccgggcatcatcgccgccatcaccgtcaccgccatcaccctggtctcgtacaccgcgatggccggagtggtcggcgccggcgggctgggcgacctggcgatccgcttcggctatcagcgcttccagaccgacgtgatggtggtcacggtggtgatgctgctgatcctcgtccagattctgcaaaccgtgggcgacaagctggtggtgcacttctcgcgcaagtaa

SEQ ID NO: 8012 - DNA, 783 bp, Pseudomonas aeruginosa
  CDS (1)...(783)
atgaaaaaactgcttgctgctttctccgctgtcgcggcgctcggcctcaccgccgcccaggccgccgagtccctcaccgtcgcggccaccccggtgccgcacgcggagatcctcaacgtggtcaagccgctgctggccaaggaaggcgtggacctgaagatcaaggagttcaccgactacgtgcagccgaacgtgcaggtctcggaaaagcgcctggacgccaacttcttccagcaccagccgtacctcgatgagttcaacaaggccaagggcaccgacctggtcgccgtgaccggcgtacacatcgagccgctgggcgcctactcgagcaagtacaagaagctcgacgaactgccttccggcgctaccgtggtgattcccaacgacgccaccaacggcggccgcgccctgctcctgctggacaaggccggggtgatcaagctcaaggacaacaagagcatcaccgccacgccgaaggacatcgtcgacaatccgaagaacatcaagatccgcgaactggaagccgcgaccctgccgcgcgtgctgacccaggtcgacatggcgctgatcaataccaactacgccctggaagccaagctgaacccaaccaaggatgcgctggccatcgaaggcagcgactcgccctacgtgaacatcctcgtcgcgcggccggacaacaaggacagcgacgccatgcagaagctggccaaggccctgcacagcgccgagatcaagcagttcatccaggagaagtacaaaggcgcggtggtaccggcgttctga

SEQ ID NO: 8013 - DNA, 1836 bp, Pseudomonas aeruginosa
  CDS (1)...(1836)
atgtgtggaatcgtaggcgcgatcgccgagcgcaacatcacccccatccttatcgaaggcctcaagcgcctcgagtatcgcggctacgacagcgccggcgtggcggtcttcgataacgaaggcaggctgcagcgctgccgccgggtcggcaaggtcgccagcctggaggaaggcctggccggtacgccgctgctcggccgcctgggcatcgcccatacccgctgggcgacccacggcgcgccaaccgaaggcaacgcccacccgcatttctccagcgacgaagtggcggtggtgcacaacggcatcatcgagaaccacgaacctctccgtgagcggctcaagggcctgggctacgtgttcacctcgcagaccgacaccgaggtcatcgtccacctgctgcaccacaagctgcagtccatcggcgacctgaccctggcgctgaaggacgcggtcaaggaattgcacggggcctatggcctggcagtgatcagcgcggcgcagccggaccgcatcgtcgccgctcgcagcggcagcccgctggtgatcggcctcgggcttggcgagaacttcctcgcttccgaccaactggcgctgcgccaggtgaccgaccgcttcatctacctggaagaaggcgatatcgccgagatccgtcgcgacagcgtgcgcctgtgggatgtccagggcaacgacgtgcagcgcgagaccgtgcagtaccacgaaggcgccgaagccgccgacaagggcgagtaccggcacttcatgctcaaggaaatccacgagcagcccagcgtcgtgcagcgcaccctggaaggccgcctcgggcagaaccaggtactggtggaaagcttcggtccgcaggcggcggagctgttcgccaaggtccgcaacgtgcagatcgtcgcctgcggcaccagttaccacgccggcatggtcgcccgttactggctggaaagcctgaccgggattccctgccaggtggaggtcgccagcgagttccgctaccgcaaggtcgcggtgcagccggattgcctgttcgtcaccatctcccagtccggtgagaccgccgacaccctggctgccctgcgcaacgccaaggagctgggcttcctctccagcgtggcgatctgcaacgttgccaccagttcgctggtgcgcgaatccgacctgaccctgctgacccaggccggcccggaaatcggcgtggcctcgaccaaggccttcaccacccagttggtcgccctgctgctgctgaccctgggcatcggccaggtgcagaagcgcctggccgatggcgtcgaagccgagctggtggacgaactgcgtcgcctgccgacccggctgggcgaggcgctggcgatgaaccggacggtggagaaggtttccgagctgttcgccgagaagcaccacaccctgttcctcggccgtggcgcgcagttcccggtggccctggaaggcgcgctgaagctcaaggaaatttcctatatccatgccgaagcctacccggccggcgaactcaagcatggcccgctggcgctggtggacagcgacatgccggtggttaccgtggcgccgaacaacgagctggtggagaagctcaagtcgaacctgcaggaagtccgcgcccgcggcggcgaactggtggtgttcgccgacgaaggcgcgggcatcgaggctggcgagggcacccatgtggtgggcatgccgcacatcggcgacgtgctctcgccgatcctctacaccatcccgttgcaattgctctcgtaccatgtcgccgtgctcaagggcaccgacgtcgaccagccgcgcaacctggccaagtcggtcaccgtcgagtaa

SEQ ID NO: 8014 - DNA, 1365 bp, Pseudomonas aeruginosa
  CDS (1)...(1365)
atgtcccttgaaatcgtgattctcgccgccggccagggcacccgcatgcgttcggccctgcccaaggtcctccatcccattgccggcaagccgatgctcggccacgtcatcgactgcgcgcgccagttgcagccggaacggatccacgtggtgatcggccacggcgcggatctggtgcgtgagcggatggccgccgacgacctgaatttcgtgctccaggccgaacagctcggtacgggccatgcggtggcccaggccctgccgttcctcagtgcagaccaggtgctgatcctctacggcgacgtgccgctgatccagctggacaccttgcagcgcctgctggcgcaagtcaccccggaccagttgtcgttgctcaccgtcgacatgctcgaccccaccggctacggccgcatcgtccgtgacgaccagggcgcggtgcaggccatcgtcgagcacaaggacgcgaccccggcgcagcgccagatcggcgagatcaacaccggcatcctcgcggtgccgggcaagcgccttgccgactggctcggccgcctgtccaacgacaacgcccagggcgagtactacctgaccgacgtgatcgccatggcggtcggcgacggcctggtggtggccagcgcccaaccgctggacgcgatggaagtgcagggcgtcaatgaccgcatgcaacaggcccagctggagcgtcactaccagcgcctgcgcgcagaggagctgatgcgccagggcgtgaccctgctcgatccgcagcgcctggatgtccgtggcgaaatctcggtcggccgcgacgtgctgatcgacgtcaatgtggtgctggaaggccgcgtggtgatcgaggacgacgtgcgcatcggaccgaactgcgtgattcgcgacagcgtcctgcggcgtggcgcggtgatcaaggccaacagccacctggaaggcgcggagctgggcgagggtagcgatgccggtccgttcgcccgcctgcgtccgggcagtgtgctcggcgctcgggcccatgtcggcaacttcgtcgaactgaagaatgcccgcctgggcgaggggagcaaggccggccacctgagctacctgggcgatgccgagctgggcgccaactgcaacatcggcgccggcaccatcacctgcaactacgatggcgcgaacaagttccgcaccgagctgggcgatgatgtgttcatcggctcgaacaactcgctggtggcgccgctgaagatcggcgatggcgcgacgaccgcggccggctccaccatcacccatgaggttccggcgaagaacctggccttcggccgcgcccggcagaagaacctggaaaactggaagcgcccggaaaaaatcaagaagtaa

SEQ ID NO: 8015 - DNA, 1545 bp, Pseudomonas aeruginosa
  CDS (1)...(1545)
atgcagcaactcaatccttccgaaattagtgaaatcatcaaggggcgcatcgagaaactcgacgtcgcctcccaagcacgaaacgaaggcaccatcgtcagcgtgtccgacggtatcgtgcgcatctacggtctggccgacgtcatgtacggcgagatgatcgagttcccgggcggcgtctacggtatggcgctgaacctggagcaggattccgtgggtgccgtggtcctgggtgaataccagggcctcgccgaaggcatgaacgccaagtgcaccgggcgcatcctggaggttccggtcggtccggaactgctgggtcgcgtagtcgacgcactgggcaatccgatcgacggcaagggtccgatcgacgccaaggccaccgacgcggtcgagaaggtcgctccgggcgtgatctggcgtaagtcggtagaccagccggtacagaccggctacaagtcggtcgacgccatgatcccggtaggccgtggccagcgcgagctgatcatcggcgaccgccagatcggcaagaccgccctcgcggtcgacgccatcatcaaccagaaagacagcggcattaagtgcgtctacgtggccatcggccagaagcagtccactatcgccaacgtcgtacgcaagctggaagagaacggtgccctggccaacaccatcgtggtcgccgccagcgcttccgagtccgccgccctgcaatacctggcgccgtactccggttgcaccatgggcgaatacttccgcgatcgcggtgaagacgccctgatcgtctacgacgacctgtccaagcaggccgtggcttatcgccagatctccctgctgctgcgccgtccgccgggtcgcgaagcctacccgggcgacgtgttctatctccacagccgtctgctggagcgcgcttcccgcgtttccgaagagtatgtcgagaagttcaccaacggcgccgtgaccggcaagaccggctcgctgaccgcgctgccgatcatcgagacccaggccggcgacgtttccgcgttcgttccgaccaacgtgatctcgatcaccgacggccagatcttcctggaatccgccatgttcaactcgggtatccgtccggccgtcaacgccggtatctcggtatcccgcgtaggtggcgcggcccagaccaagatcatcaagaagctgtccggcggcatccgtaccgctctggcccagtaccgtgaactggcggccttcgcccagttcgcctcggacctggacgaagcgacccgcaagcagctggagcatggtcagcgcgttaccgagctgatgaagcagaagcagtacgcgccgatgtcgatcgccgagatgtcgctgtccctgtatgccgccgagcgtggcttcctgcaggacgtcgaaatcgccaaggtcggtagcttcgagcaggcgttgatctcctacttccagcgcgagcatgccgctctgctggcgaagatcaacgagaaaggtgacttcaacgacgaaatcgacgcgggcatcaaggccggcatcgagaagttcaaggccacccaaacctggtaa

SEQ ID NO: 8016 - DNA, 471 bp, Pseudomonas aeruginosa
  CDS (1)...(471)
gtgaacattaatgcaaccctgattggccagtccgttgcgttcttcatctttgtgctgttctgcatgaagttcgtgtggcctccggtcatcgcggctctgcaagagcgtcagaagaagatcgctgacggcctggacgctgccaaccgcgcggctcgtgatctggagctggctcatgagaaagcgggccagcaactgcgcgaagccaaggctcaggcagccgaaatcgtcgaacaggcgaagaaacgcgctaaccagatcgtcgatgaagcccgcgaccaggcccgtaccgaaggcgaacgcctgaaggcccaggcccaagcggaaatcgaacaggaactgaacagcgtcaaggacgccctgcgtgcccaagtgggtgccctggccgtcaccggcgcagagaagatcctgggtgcttcgatcgacgcaaacgcgcacgagcagctggtttccaaactggcagccgagatctaa

SEQ ID NO: 8017 - DNA, 870 bp, Pseudomonas aeruginosa
  CDS (1)...(870)
atggcagcagaaaccgcttcgggttacatccagcaccacttgcagaacctgaccttcgggcgtctgcctaatggtgattgggggttcgcccacaccgccgagcaagccaaggaaatgggcttctgggcattccacgtagacaccctgggctggtcggtactgctcggcgtggtgttcctgttcatcttccgcctggcagccaagaaggccaccagcggccagccgggtggactgcagaacttcgtcgaggtgatggtcgagttcgtcgacaccagcgtcaaggacaccttccacgggcgcaacccgttgatcgcgcccctggccctgaccgtgttcgtctggatcttcctgctcaacctgatcgacctggtaccggtggactacctgccgatgctggccgcgaagatcaccggcgacgagcacctgttcttccgcgcggtggccaccaccgacccgaacgccaccctcggcctgtcgatctcggtgttcgcgctgatcgtcttttacagcatcaaggtcaagggcatcggcggcttcctcggtgaactgaccctgcaccccttcagcagcaagaacatcgtcgttcagatcctgctgattccggtgaacttcctgctcgagttcgtgaccctgatcgccaagccggtttcgctggcgctgcgtctgttcggcaacatgtatgccggcgaactgatcttcattctgatcgccgtcatgttcggtagcggaatgttcctgctgagtgccctgggcgtagccctgaactgggcgtgggctgtgttccacatcctgatcatcaccctgcaggccttcatcttcatgatgctgaccatcgtctacctgtcgatggcgcacgaagacaaccattaa

SEQ ID NO: 8018 - DNA, 645 bp, Pseudomonas aeruginosa
  CDS (1)...(645)
atgtctgcggtaacccaacaccacgccgacgaactcgcgcgcggtgctgacgagctaggcgtcgccctcgacgccgacaagcaacgccagctgctggcctacctggccctgctgatcaaatggaacaaggcctacaacctgaccgccgtacgcgacccggacgagatggtttcgcgccacctgctcgacagcctgagcatcgtgccttatgccgaggctggggataactggctggatgtcggcagcggcggcggcatgcccggcgtgccgctggccattctgttcccggaaaagcgcctgaccctgctcgacagcaacggcaagaagacccgcttcctgacccaggtgaagctcgaactgaagctggccaacctcgaagtcgtgcacagccgggtggaagccttccgtcccgagagccccttcgatggcatcgtttcccgcgctttcagcagcctggaggacttcgccaactggacccgccacctcggtggccaggaaacccgctggctggcgatgaagggcgtgcatccgaacgaagagctggcggcactcccggaggatttccgggtcgaagccgagcacgcgctggcggtacccggttgccaaggtcagcggcatctgctgatactgcggcgcacagcatga

SEQ ID NO: 8019 - DNA, 1893 bp, Pseudomonas aeruginosa
  CDS (1)...(1893)
gtggatttccctacccgttttgacgtaatcgtgatcggcggtggccatgcaggcaccgaagccgcactcgcggctgcgcgcatgggtgtgaaaaccctgctgttgacccacaatgtggaaaccctggggcagatgagctgcaaccccgccatcggcggcatcggcaagagccatctggtcaaggaaatcgacgcccttggcggcgccatggccgaagccaccgacaagggcggtatccagttccgcatccttaacagtcgcaaggggccggcagtgcgcgccactcgtgcacaagccgatcgcgtgctctataaggccgctatccgccatacactggaaaaccagccgaacctgtggatattccagcaggcctgcgacgacctgatcgtcgagcaggatcaggtccgcggcgtagtgacccagatgggactgcgcttccatgccgacaacgtggtcctgactaccggcaccttcctcggcggacttatccacatcggcctggagaactactcaggcggacgcgccggcgacccgccgtccatcgcactggcgcgtcgtctgcgtgaattgccgctgcgggtcggccggctgaagaccggtacgccgccgcggatcgacgggcgcagcgtggacttctcggtgatgaccgagcagccgggcgacacgccgatcccggtgatgtccttcctcggttcgaaggaacagcatcccgagcaggtcagttgctggatcacccataccaacgcccggacccacgagatcatcgccgccaatctcgatcgttcgccgatgtattccggtgtgatcgaaggcatcggcccgcgctactgcccttcgatcgaagacaagatccatcgcttcgccgataaggaaagccatcaggtcttcctcgagccggaaggcctgacgacccacgagctgtatcccaacggcatttccacgtccctgccgttcgacgtgcaactgcagatcgtgcgttccatccgtggcatggaaaacgcccacatcgtgcggccgggctatgcgatcgagtacgacttcttcgatccccgcgatctcaggtacagcctggagaccaaggtcatcggcggcctgttcttcgccggccagatcaacggcaccaccggctacgaggaagctggcgcccagggcctgctggccggcgccaatgctgcgttgcgttcgcaaggcaaggacagctggtgcccgcgccgcgacgaggcctacatcggcgtgctggtggacgacctgatcacgctcggcacccaggagccgtaccgcatgttcacctcgcgggcggaataccgcctgatcctccgcgaggacaacgccgacctgcgtctcaccgagaagggacgcgagctgggccttgtcgacgatcggcgctgggctgccttcgaagccaagcgcgaaggtatcgaacgcgaggaacagcggctgaagagcacctgggtgcggccgaataccccgcagggcgacgccatcgccgagcgcttcggtacgccgctgacccatgaatacaatctgctcaacctgctgagccgccccgagatcgattacgccggcctggtggagatcaccggcaacgctgtggataacccccaggtggccgagcaggtggagattcgcaccaagtacgccggctacatcgaccgccagcaggaggaaatctcccgtctgcgcgccagcgaagatacccgcctgcctgtggatatcgattacctggggatttccggcctgtcgaaggaaatccagaacaagctgaaccaggcccgtccggaaaccctcggacaggcttcgcggatccccggcgtcacgccggctgcgatttcgctgttgttgatccacctgaagaagcgtgcctctggccgccaactggagcagagcgcttga

SEQ ID NO: 8020 - DNA, 135 bp, Pseudomonas aeruginosa
  CDS (1)...(135)
atgaaacgtactttccaacccagcaccctcaagcgcgctcgcgtccacggtttccgcgcccgtatggccaccaagaacggccgtcaggttctgtcgcgtcgtcgcgccaaaggccgtaagcgtctgaccgtctga

SEQ ID NO: 8021 - DNA, 195 bp, Staphylococcus aureus
  CDS (1)...(195)
atgacaaatcacaaattaatcgaagcagtaattaaatcacaattacgtacagacttaccaagtttccgtcctggcaatactttacgtgaacacgtacgtatcattaagggtactcgtgagcgtatccaagtattcgaaggcgttgtaattaagggtcgtgacggtggcgtttctaaaacgtttatctgttcgtaa

SEQ ID NO: 8022 - DNA, 243 bp, Staphylococcus aureus
  CDS (1)...(243)
actgaagaagatgatattgatgtgaaagtcaaagataacgaatctaaattaggcggatttgattggtttaaacgtaaaacaaacaaaaaagatactcatgaaaatgaagtagagtcaacagatgaagaaatttatcaatcagaagataatcatcaggaacataaacagaatcatgaacatgttcaagacaaagataaagaagaaagtaaattcaaaaaactaatgaaatctctatttgaatga

SEQ ID NO: 8023 - DNA, 1002 bp, Staphylococcus aureus
  CDS (1)...(1002)
atgatcagaaaaatttgtaaaaatgccactatttgtagtttagcaatatcaactgctatagttgcgtttcccgaaacttctttagcgaaaataaagacagaaatcactccggtagtagagaaagcaattgatagtgaaacgaaaatgtacacacgtactgctacgacaagcgatactgagaagaatatttctcaaagtctacaatttaattttttaaatgaaccaaactatgataaagaaacgttatttatcaaagcgaaaggtacgattagtagcggcttagaaattttatatcctaatggttattggagtagtacattgaggtggccaggttcttattctgtttcaattcaaaatgttgacgataatacaaatactaaagttactgactttgcaccgaaaaaccaagatgaaacaagagatgttaaatatacgtatggttataaaacaggcggtaattttaccattaatcagaatggtttaagtggcaacattacccaagaatataattattcagagacaattagttaccaacaaccatcttatcgtacgttaattgataaacctacatcaaataaagcagttgcatggaaagtagaagcaaacgtcataaaaaatatggggtatgaccatactagggatgctactactgatggcaataccaaagtaggaagtgaaattttcacactaactaggaacggtaacttatgggctagagataattttacccctaagaataaaatgcctgtgactgtatctgaggggtttaatccagagtttttaacagtaatgtcacatgataaaaagggtaaaggtcattcgctatttgtagtacgctataaaagagtgatggatgatttcgaaataaggtggaactatcggaatatttgggggtattggtctggaaaaaataacgtgaataaaaaagaggaaagtttagcagctttgtacgaaatagactggaagacacatagtgtgaaacttataagtacgttcaagtga

SEQ ID NO: 8024 - DNA, 960 bp, Staphylococcus aureus
  CDS (1)...(960)
gtgaataggaatatcgttaaattagttgtgtttatgctaatcttcgttgtagcagtagcgggttgtggtcaaaaagatactgaagagaaaactgaaatgacgacaataaaagatgaattaggaactgaaaaaattaagaaaaatcctaaacgtgttgttgtattagaatatagttttgctgattatttagcagcattagatatgaaacctgttggtattgcagatgatggcagcagtaaaaatataacaaagtcagtaagagataaggttggggcatatgaatcggttggatctagaccgcaaccgaatatggaagtgataagtaaattaaaaccggatttgatcatagcagatgttagcagacataagaaaatcaaatcagaattaagcaaaattgctccgacaatcatgttagttagcggtacgggagattataatgcaaatattgatgcatttaaaacagtcgctaaagcagtaggcaaagagaaagaaggcgagaaacgtctggaaaagcatgataaaatattagcggagattagaaagaaaattgaacagagtacgttaaaaactgcatttgcattcggtatctcaagagcaggtatgtttattaataatgaagatacatttatgggacaattcttaattaaaatgggtattcaacctgaagtcacaaaagacaaaactacgcatgttggtgaacgcaagggtggtccttatatttatttaaataatgaagaacttgccaatatcaatccaaaagttatgattttagccactgacggaaaaacggacaaaaatagaacgaaattcattgatcctgcagtttggaaatcattaaaagctgtgaaagataacaaagtttatgacgttgaccgaaataagtggttgaaatcaaggggtattatcgcaagtgaaagtatggcagaagatttagaaaaaattgcagaaaaagcaaaataa

SEQ ID NO: 8025 - DNA, 741 bp, Staphylococcus aureus
  CDS (1)...(741)
atgaaaatgactaagagcgctttagtaacaggtgcatcaagaggaattggacgtagtattgcgttacaattagcagaagaaggatataatgtagcagtaaactatgcaggcagcaaagaaaaagctgaagcagtagtcgaagaaatcaaagctaaaggtgttgacagttttgcgattcaagcaaatgttgccgatgctgatgaagttaaagcaatgattaaagaagtagttagccaatttggttctttagatgttttagtaaataatgcaggtattactcgcgataatttattaatgcgtatgaaagaacaagagtgggacgatgttattgacacaaacttaaaaggtgtatttaactgtatccaaaaagcaacaccacaaatgttaagacaacgtagtggtgctatcatcaatttatcaagtgttgttggagcagtaggtaatccaggacaagcaaactatgttgcaacaaaagcaggtgttattggtttaactaaatctgcggcgcgtgaattagcatctcgtggtatcactgtaaatgcagttgcacctggttttattgtttctgatatgacagatgctttaagtgatgagcttaaagaacaaatgttgactcaaattccgttagcacgttttggtcaagacacagatattgctaatacagtagcgttcttagcatcagacaaagcaaaatatattacaggtcaaacaatccatgtaaatggtggaatgtacatgtaa

SEQ ID NO: 8026 - DNA, 234 bp, Staphylococcus aureus
  CDS (1)...(234)
gtggaaaatttcaataaagtaaaagatatcatcgttgaccgtttaggtgtagacgctgataaagtaactgaagatgcatctttcaaagatgatttaggcgctgactcacttgatatcgctgaattagtaatggaattagaagacgagtttggtactgaaattcctgatgaagaagctgaaaaaatcaacactgttggtgatgctgttaaatttattaacagtcttgaaaaataa

SEQ ID NO: 8027 - DNA, 3567 bp, Staphylococcus aureus
  CDS (1)...(3567)
atggtttatttaaaatcaatagatgccattggatttaagtcttttgcagatcaaaccaatgttcaattcgataaaggtgtaactgcaattgttggtccaaatggaagcggtaaaagtaatattacagatgctattaaatgggtgttgggcgaacaatcggctaaatcattacgtggctcaaaaatggaagatattatcttctcaggtgcagaacatcgcaaagctcaaaattatgctgaagtacagttaagattagataatcattctaaaaagctcagtgttgatgaaaacgaagttattgtaacaagaagattgtatcgaagtggtgaaagtgagtactacataaataatgaccgtgcaagattaaaagatattgccgatttatttttagattctggattggggaaagaagcatatagcattatctcgcaaggtagagttgatgaaatactaaatgctaaaccaattgatagacgtcaaattattgaagaatcggctggtgtacttaaatataaaaaacgtaaagctgaatcattaaataaacttgaccaaacagaagataatttaacgagagtagaagacattttatatgatttggaaggtcgcgtagaacctctaaaagaggaggcagctatagctaaagaatataagacactttcgcaccaaatgaaacatagtgacattgtagttacagtgcacgatattgatcaatatacaaatgacaatagacaattagatcaacgtttaaatgatttacaaggtcaacaagcaaataaagaagctgacaagcaacgtttaagccaacaaattcaacaatataaaggtaaacgtcatcaacttgataatgatgttgaatcgcttaattatcaattagtaaaagctacggaagcctttgaaaaatatacgggacaattaaatgttttagaagaacgtaagaaaaatcaatctgaaacaaatgcacgatatgaagaagaacaagaaaatttaattgagcttttagaaaatatatcaaatgagatttctgaagctcaagatacttataagtctctgaaaagtaaacaaaaagaactcaacgctgtcattcgtgaattagaagaacaactatatgtttcagacgaagcacacgatgaaaaattggaagaaattaaaaacgaatactatacattaatgtcagagcaatcagatgttaacaatgatattcgttttttaaagcatactatagaagagaatgaggctaaaaaatcaagactagattctcgattagttgaagtctttgagcaattgaaagatattcagggtcaaataaaaacgactaaaaaagaatatcaacagaccaacaaagaactttctgctgtagataaagaaattaaaaatatagaaaaagacctcactgatacaaaaaaagcacaaaacgaatacgaagagaaattgtatcaagcatatcgatataccgaaaaaatgaaaacacgtattgatagtttggcaacgcaagaggaagaatatacttattttttcaatggcgtcaaacatattttgaaagctaaaaataaagaattaaagggtattcatggtgcagttgcggaaattattgatgtgccatctaaattaactcaggcaattgaaacagcattaggtgcttcattacaacatgttattgtagattcagaaaaagatggacgccaggctattcaatttttaaaagaacgtaatttaggtcgtgcgacgtttttaccattaaatgttatacagagtagagtggtagcgactgatattaagtctattgctaaagaggcaaacggatttattagtattgcttcggaagcagttaaagtagcaccagaatatcaaaatattatcgggaatttattaggtaatacgattatcgttgatcatttaaagcatgcaaatgaattggcacgtgcgattaaatatcgaactcgtattgttactttggaaggtgatattgtaaatcctggtggttctatgactggtggtggcgctcgtaagtcaaaaagtattctgtctcaaaaagacgagttgacaacaatgagacaccaattagaagattacttgcgtcaaacagaatcatttgaacaacaatttaaagagttgaagataaaaagtgatcaattaagtgaactgtattttgaaaaaagtcaaaagcataatacacttaaagagcaagtgcatcattttgaaatggagctcgatagattaactacacaagaaacacaaataaaaaatgatcatgaagaattcgaatttgaaaaaaatgatggttatacgagtgacaaaagtcgacaaactttgagtgaaaaagaaactcatttagaaagtattaaagcatctttaaaacgactagaagatgaaattgaacgctacacaaaactttctaaagaaggtaaggaaagcgtaactaaaacacaacaaacgttacatcagaaacaatctgatcttgctgtggttaaagagcgtattaaaacacaacaacagactatagatcgattaaataatcaaagtcaacaaaccaaacatcaattaaatgatgttaaagaaaaaatagcattctttaattcggatgaagtgatgggcgagcaagcttttcaaaatattaaagatcaaattaatggtcaacaagaaacgagaacacgcttatctgatgaattagataaattgaaacaacaacgtattgagttgaatgaacaaatcgatgcgcaagaagctatactacaagtttgtcaccaagatattttagctatcgaaaatcactaccaagatattaaagctgaacaatcaaagctagatgtattaattcatcatgcgatagatcatttaaatgatgaatatcaattgactgttgaacgtgcaaaatctgaatatacgagtgatgaatcgattgacgcattacgtaaaaaagttaaattaatgaagatgtcgattgatgaactaggtcctgtaaacttaaatgcaattgaacaatttgaagagttaaatgaacgttatacatttttaagtgagcaacgtacagatcttcgtaaagctaaagaaacattagagcaaattataagtgaaatggatcaagaggttactgaaagatttaaagaaactttccatgctattcaaggacattttacagctgtgttcaaacaattgtttggtggaggcgatgcagaattgcaattaactgaagccgattatttaacagctggtattgatattgtggtacaaccaccgggtaaaaagttgcaacatttatcgttactaagtggtggtgagcgtgcattaactgctattgctttactatttgcaattttaaaagtaagatctgcaccttttgttatattagatgaggttgaagctgcattagatgaagcgaatgttattagatacgcaaaatatttaaatgagttatcagacgaaacacaattcattgttattacacaccgtaaaggaacaatggaatttgcagataggttatacggtgtaacaatgcaagaatcaggtgttactaaacttgtgagtgtgaatttaaatacaatagatgatgtgttgaaggaggagcaataa

SEQ ID NO: 8028 - DNA, 1251 bp, Staphylococcus aureus
  CDS (1)...(1251)
atgagcttttttaaacgcttaaaagataagtttgctacaaataaagaaaatgaagaagttaaatccttaacagaagaacaaggtcaagacaaattagaagatacacattctgaaggttcaacgcaggacgtaaatgatttagcagaaaatgctgaagtgaaaaagaagccacgcaagttgagtgaagcggattttgatgacgatggcttaatatcaattgaagattttgaagaaattgaagctcaaaaaatgggtgctaaatttaaagcaggactcgaaaaatctcgtcaaaatttccaagaacaattaaataatttgatagcgagatatcgtaaagtagatgaagacttttttgaagctttagaagaaatgttaatcactgcagacgtcggttttaatacagtgatgacgttaactgaagaattacgtatggaagcacaacgacgtaatattcaagatactgaagatttgcgtgaagtcattgttgaaaaaatcgtagagatttaccatcaagaagatgataattcagaagctatgaacttagaagatggtcgtttaaatgtcattttaatggtcggtgtgaatggtgttggtaaaacaacaacaattggaaaattagcttaccgatataaaatggaaggtaaaaaagtaatgttagctgcgggcgatacttttagagcgggtgctattgatcaattgaaagtttggggcgaacgtgttggtgtagatgtaattagccaaagtgaaggttctgatccagctgctgttatgtatgatgcgattaatgccgctaaaaacaaaggtgttgatattttaatctgtgataccgctggacgtttacaaaataaaacaaatctaatgcaagaattagaaaaagttaagcgtgtaattaatcgagcagtgccagatgcgcctcatgaagcattactatgtttagatgctacaactggtcagaatgcgttgtcacaagctagaaactttaaagaagtaacaaatgttacaggtattgtattaacgaaattagatggtacagccaaaggtggtatcgtattagccattcgtaatgaattgcacattccagttaaatatgtaggtttaggtgagcaattagatgacttacaaccatttaaccctgaaagttatgtctacggcttattcgctgatatgattgaacaaaatgaagaaataacaacagttgaaaatgatcaaattgtaacagaagaaaaggacgataatcatggggcaaaatga

SEQ ID NO: 8029 - DNA, 333 bp, Staphylococcus aureus
  CDS (1)...(333)
atggggcaaaatgatttagttaaaacgttacgaatgaattatttgtttgatttttatcaatccttattgacgaataaacaacgtaattatttggaattattttatctcgaagattattctttaagtgaaatcgcagatacttttaatgtgagtagacaagcagtttatgataatataagaagaactggcgatttagttgaagattatgaaaagaaattggaattataccagaaatttgagcaacgccgagaaatatatgatgaaatgaaacaacatttaagtaatccagaacaaatacaacgttatattcaacaattagaagacttagaatag

SEQ ID NO: 8030 - DNA, 1368 bp, Staphylococcus aureus
  CDS (1)...(1368)
atggcatttgaaggcttatcagaacgcctgcaagcgacgatgcaaaaaatgcgtggtaagggtaaacttactgaagctgatataaagataatgatgcgtgaagtaagattagcgttacttgaggctgacgtaaactttaaagtggtaaaagaatttattaaaacagtatcagaacgcgcattaggttccgatgtaatgcaatcattaacaccagggcaacaagttattaaaatagttcaagatgaattaacgaagttgatgggtggagaaaatatatcgattaatatgtcaaataaaccacctactgttgttatgatggttggtttacaaggtgctggtaaaacaacaactgcaggtaaattagcattattgatgcgtaaaaaatacaacaaaaaacctatgttagttgcagcagatatttatcgtccagcagcgataaatcaattacaaacagtagggaaacaaattgatattcctgtatacagtgaaggagatcaagtaaagccacaacaaattgtaactaatgcattaaaacatgctaaagaagaacatttagactttgtaatcattgatacagcaggtcgattacacatcgatgaagcattgatgaatgaattaaaagaagtaaaagacattgctaaaccaaacgaaattatgttagttgtcgattcaatgacgggtcaagatgctgtcaatgttgcagaatcttttgacgatcaacttgatgtcacaggtgttaccttaactaaattagatggtgatacacgtggtggtgcagctttatctattcgttcggtgacacaaaaaccaattaaatttgttggtatgagtgaaaagttagatggtttagagctattccatcctgaacgtatggcatcacgtatttcaggcctgggtgatgtgtcaaggttaattgaaaaagcgcaacaagatgtggatcaagaaaaagcaaaagatttagagaaaaagatgcgcgagtcatcatttactttagatgattttttagaacaacttgatcaggtgaaaaatttaggaccactggatgatattattaaaatgattccaggtatgaataaaatgaaaggtctagataagcttaatatgagtgaaaagcaaattgatcatattaaagcgattatccagtcaatgacgccggctgaaagaaacaatccagacacattgaatgtatcacgtaaaaagcgtattgctaaaggttctggtcgttcattacaagaagtcaatcgtttgatgaaacaatttaacgatatgaagaaaatgatgaaacaattcactggtggcggtaaaggtaaaaaaggtaaacgcaatcaaatgcaaaatatgttaaaaggtatgaatttaccgttttaa

SEQ ID NO: 8031 - DNA, 189 bp, Staphylococcus aureus
  CDS (1)...(189)
atgggtaaacaatgtttcgtaacaggtcgtaaagcttcgactggtaacagacgttcacacgctttaaactctactaaacgtagatggaacgctaaccttcaaaaagttagaatcctagttgacggtaaacctaaaaaagtttgggtttctgcacgtgctttaaaatctggtaaagtaactagagtttaa

SEQ ID NO: 8032 - DNA, 936 bp, Staphylococcus aureus
  CDS (1)...(936)
gtgaatcaaatgagtaaaacagcaattatttttccgggacaaggtgcccaaaaagttggtatggcacaagatttatataacaacaacgatcaagcaactgaaattttaacttcagcagcaaacacgttagactttgatattttagagacaatgtttactgacgaagacggcaaattgggtgaaactgaaaacacgcaaccagctttattgacgcatagctcggcgttattagcggcgctaaaaaatttgaatcccgattttactatggggcatagtttaggtgaatattcaagtttagttgcagctgacgtattatcatttgaagatgcagttaaaattgttagaaaacgtggtcaattaatggcgcaagcatttcctactggtgtaggaagcatggctgcagtattgggcttagattttgataaagtcgatgaaatttgtaagtcattatcatctgatgacaaaataattgaaccagcaaacattaattgcccaggtcaaattgttgtttcaggtcacaaagctttaattgatgagctagtagaaaaaggtaaatcattaggtgcaaaacgtgtcatgcctttagcagtatctggcccattccattcatcgctaatgaaagtgattgaagaagatttttcaagttatattaatcaatttgaatggcatgatgctaagtttcctgtagttcaaaatgtaaatgcgcaaggtgaaactgacaaagaagtaattaaatctaatatggtcaaacaattatattcaccagtacaattcattaactcaacagaatggctaatagaccaaggtgttgatcattttattgaaattggtcctggaaaagttttgtctggcttaattaaaaaaataaatagagatgttaagttaacatcaattcaaactttagaagatgtgaaaggatggaatgaaaatgactaa

SEQ ID NO: 8033 - DNA, 627 bp, Staphylococcus aureus
  CDS (1)...(627)
atgaataaaatgtcagcttttataacttttgagggcccagaaggctcaggtaaaacaactgtaattaatgaagtttatcatagattagtaaaagattatgatgtcattatgactagagaaccaggtggtgttcctactggtgaagaaatacgtaaaattgtattagaaggcaatgatatggacattagaactgaagcaatgttatttgctgcatctagaagagaacatcttgtattaaaggtcataccagctttaaaagaaggtaaggttgtgttgtgtgatcgctatatcgatagttcattagcttatcaaggttatgctagagggattggcgttgaagaagtaagagcattaaacgaatttgcaataaatggattatatccagacttgacgatttatttgaatgttagtgctgaagtaggccgcgaacgtattattaaaaattcaagagatcaaaatagattagatcaagaagatttaaagtttcacgaaaaagtaattgaaggttaccaagaaatcattcataatgaatcacaacggttcaaaagcgttaatgcagatcaacctcttgaaaatgttgttgaagacacgtatcaaactatcatcaaatatttagaaaagatatga

SEQ ID NO: 8034 - DNA, 912 bp, Staphylococcus aureus
  CDS (1)...(912)
atgaatgaggaagtgaaaatgttggataataaagatattgcaacaccatcaagaacgcgagcgttgttagataaatatggctttaattttaaaaaaagtttaggacagaactttttaatagatgtgaatatcattaataatatcattgatgcaagtgatattgatgcacaaactggggtgattgaaattggtccaggtatggggtcattgacagaacaattggccagacatgctaaaagagtattggcatttgaaattgatcaacgattaataccggtattaaatgatacattatcaccttatgataatgtgacggtgattaatgaagatattttaaaagcgaatattaaaaaagctgttgaaaatcatttacaagattgcgaaaaaataatggttgttgcaaacctgccgtactatattacgacgccaattttattaaatttaatgcaacaagatataccaattgatggctacgtggtgatgatgcaaaaagaagtgggcgaacgcttaaatgctgaagtaggttcaaaagcatatggttcattatcaattgtcgtacaatactatacagagactagtaaagtattaacggtacctaaatctgtatttatgccaccacctaatgttgattcaatagttgtaaaactgatgcagagaactgaaccgttagtaacagtagataacgaggaagcattctttaagttagcaaaagcagcatttgcacaaagaagaaagacaattaataacaactatcaaaattattttaaagatggtaaacaacacaaagaagtgattttacaatggttagaacaagcgggtattgatccaagacgtcgcggtgaaacgctatctattcaagattttgctaaattgtatgaagaaaagaaaaaattccctcaattagaaaattaa

SEQ ID NO: 8035 - DNA, 537 bp, Staphylococcus aureus
  CDS (1)...(537)
atgaaaatcaatgagtttatagttgtagaaggacgagatgatactgagcgtgttaaacgagctgttgaatgtgatacgattgaaacgaatggtagtgccatcaacgaacaaactttagaagtaattagaaatgctcaacaaagtcgaggcgttattgtattaacagatccagattttccaggagataaaattagaagtacaattactgaacatgtcaaaggtgttaaacacgcgtatattgatagagaaaaagctaaaaataaaaaagggaaaattggtgttgaacatgccgacttaattgatattaaagaagcgttaatgcatgttagttcaccctttgatgaagcttatgaatcaattgataaatctgtgcttatagagttggggttaatcgttgggaaagatgcaaggcgccgtagagaaattttaagtagaaaattgcgaatcggccattccaatggtaagcagttattgaaaaagttaaatgcatttggttataccgaagcggatgtaaggcaagctttagaagatgaatga

SEQ ID NO: 8036 - DNA, 774 bp, Staphylococcus aureus
  CDS (1)...(774)
atgttaatcgatacacatgtccatttaaatgatgagcaatacgatgatgatttgagtgaagtgattacacgtgctagagaagcaggtgttgatcgtatgtttgtagttggttttaacaaatcgacaattgaacgcgcgatgaaattaatcgatgagtatgattttttatatggcattatcggttggcatccagttgacgcaattgattttacagaagaacacttggaatggattgaatctttagctcagcatccaaaagtgattggtattggtgaaatgggattagattatcactgggataaatctcctacagatgttcaaaaggaagtttttagaaagcaaattgctttagctaagcgtttgaagttaccaattatcattcataaccgtgaagcaacacaagactgtatcgatatcttattggaggagcatgctgaagaggtaggcgggattatgcatagctttagtggttctccagaaattgcagatattgtaactaataagctgaatttttatatttcattaggtggacctgtgacatttaaaaatgctaaacagcctaaagaagttgctaagcatgtgtcaatggagcgattgcttgttgaaaccgatgcaccgtatctttcgccacatccgtatagagggaagcgaaatgaaccggcgagagtaactttagtagctgaacaaattgctgaattaaaaggcttatcttatgaagaagtgtgcgaacaaacaactaaaaatgcagagaaattgtttaatttaaattcataa

SEQ ID NO: 8037 - DNA, 1974 bp, Staphylococcus aureus
  CDS (1)...(1974)
atggctaaagaaacattttatataacaaccccaatatactatcctagtgggaatttacatataggacatgcatattctacagtggctggagatgttattgcaagatataagagaatgcaaggatatgatgttcgttatttgactggaacggatgaacacggtcaaaaaattcaagaaaaagctcaaaaagctggtaagacagaaattgaatatttggatgagatgattgctggaattaaacaattgtgggctaagcttgaaatttcaaatgatgattttatcagaacaactgaagaacgtcataaacatgtcgttgagcaagtatttgaacgtttattaaagcaaggtgatatctatttaggtgaatatgaaggttggtattctgttccggatgaaacatactacacagagtcacaattagtagacccacaatacgaaaacggtaaaattattggtggtaaaagtccagattctggacatgaagttgaactagttaaagaagaaagttatttctttaatattagtaaatatacagaccgtctattagaattctatgaccaaaatccagattttatacaaccaccatcaagaaaaaatgaaatgattaacaacttcattaaaccaggacttgctgatttggctgtttctcgtacatcatttaactggggtgtccatgttccgtctaatccaaaacatgttgtttatgtttggattgatgcgttagttaactatatttcagcattaggctatttatcagatgatgagtcactatttaacaaatactggccagcagatattcatttaatggctaaggaaattgtgcgattccactcaattatttggcctattttattgatggcattagacttaccgttacctaaaaaagtctttgcacatggttggattttgatgaaagatggaaaaatgagtaaatctaaaggtaatgtcgtagacccgaatattttaattgatcgctatggtttagatgccacacgttattatctaatgcgtgaattaccatttggttcagatggcgtatttacacctgaagcatttgttgagcgtacaaatttcgatctagcaaatgacttaggcaacttagtaaaccgtacgatttctatgattaataagtactttgatggcgaattaccagcgtatcaaggtccacttcatgaattagatgaagaaatggaagctatggctttagaaacagtgaaaagctatactgaaagcatggaaagtttgcaattttctgtggcattatctacgatatggaagtttattagtagaacgaataagtatattgacgaaacaacgccttgggtattagctaaggacgatagccaaaaagatatgttaggcaatgttatggctcacttagttgaaaatattcgttatgcagctgtattattacgtccattcttaactcatgcgccgaaagagatttttgaacaattgaacattaacaatcctcaatttatggaatttagtagtttagcgcaatatggtgtgcttactgagccaattatggttactgggcaacctaaacctattttcccaagattggatagcgaagcggaaattgcatatatcaaagaatcaatgcaaccgcctgctactgaagaggaaaaagaagagattcctagcaaacctcaaattgatattaaagactttgataaagttgaaattaaggcagcaacgattattgatgctgaacatgttaagaagtcagataagcttttaaaaattcaagtagacttagattctgaacaaagacaaatcgtatcaggaattgccaaattctatacaccagatgatattattggtaaaaaagtagcagttgttactaacttgaaaccagctaaattaatgggacaaaaatctgaaggtatgatattatctgctgaaaaagatggtgtattaaccttagtaagtttaccaagtgcaattccaaatggtgcagtgattaaataa

SEQ ID NO: 8038 - DNA, 840 bp, Staphylococcus aureus
  CDS (1)...(840)
atggctgtattatatttagtgggcacaccaattggtaatttagcagatattacttatagagcagttgatgtattgaaacgtgttgatatgattgcttgtgaagacactagagtaactagtaagctgtgtaatcattatgatattccaactccattaaagtcatatcacgaacataacaaggataagcagactgcttttatcattgaacagttagaattaggtcttgacgttgcgctcgtatctgatgctggattgcccttaattagtgatcctggatacgaattagtagtggcagccagagaagctaatattaaagtagagactgtgcctggacctaatgctgggctgacggctttgatggctagtggattaccttcatatgtatatacatttttaggatttttgccacgaaaagagaaagaaaaaagtgctgtattagagcaacgtatgtatgaaaatagcacattaattatatacgaatcaccgcatcgtgtgacagatacattaaaaacaattgcaaagatagatgcaacacgacaagtatcactagggcgtgaattgactaagaagttcgaacaaattgtaactgatgatgtaacacaattacaagcattgattcagcaaggcgatgtaccattgaaaggcgaattcgttatcttgattgagggtgctaaagcgaacaatgagatatcgtggtttgatgatttatctatcaatgagcatgttgatcattatattcaaacttcacagatgaaaccaaaacaagctattaaaaaagttgctgaagaacgacaacttaaaacgaatgaagtatataatatttatcatcaaataagttaa

SEQ ID NO: 8039 - DNA, 609 bp, Staphylococcus aureus
  CDS (1)...(609)
atgatgataatcgtcatgttactactaagttatcttatcggcgctttcccaagtggattcgtaattggaaaattatttttcaaaaaagatattagacaatttggtagtggtaatactggcgctactaatagctttagagtattaggtcgtcctgcaggattcttggtaacatttctagatattttcaaagggttcataactgttttcttccctttatggttaccagttcacgcagatggccctattagtactttttttacaaatggtttaattgttggcttattcgctatacttggacacgtttatcctgtttatttaaaattccaaggtggcaaagcggttgcaactagtgcaggtgtcgtcttgggagtcaacccgatacttttactaatacttgcaattatcttctttattgtattgaagatttttaaatatgtttctttagcaagtatcgttgcagcaatttgctgtgtgattggctcgcttatcattcaagactatattttattagtcgttagtttcttagtttcaatcatattgataattagacatcgctctaatatctcaagaatttttagaggcgaagaacctaaaataaaatggatgtaa

SEQ ID NO: 8040 - DNA, 1992 bp, Staphylococcus aureus
  CDS (1)...(1992)
atgaataaacaaaataattattcagatgattcaatacaggttttagaggggttagaagcagttcgtaaaagacctggtatgtatattggatcaactgataaacggggattacatcatctagtatatgaaattgtcgataactccgtcgatgaagtattgaatggttacggtaacgaaatagatgtaacaattaataaagatggtagtatttctatagaagataatggacgtggtatgccaacaggtatacataaatcaggtaaaccgacagtcgaagttatctttactgttttacatgcaggaggtaaatttggacaaggcggctataaaacttcaggtggtcttcacggagttggtgcttcagttgtaaatgcattgagtgaatggcttgaagttgaaatccatcgagatggtaatatatatcatcaaagttttaaaaacggtggttcgccatcttctggtttagtaaaaaaaggtaaaactaagaaaacaggtaccaaagtaacatttaaacctgatgacacaatttttaaagcatctacatcatttaattttgatgttttaagtgaacgactacaagagtctgcgttcttattgaaaaatttaaaaataacgcttaatgatttacgcagtggtaaagagcgtcaagagcattaccattatgaagaaggaatcaaagaatttgttagttatgtcaatgaaggaaaagaagttttgcatgacgtggctacattttcaggtgaagcaaatggtatagaggtagatgtagctttccaatataatgatcaatattcagaaagtattttaagtttcgtaaataatgtacgtactaaagatggtggtacacatgaagttggttttaaaacagcaatgacacgtgtatttaatgattatgcacgtcgtattaatgaacttaaaacaaaagataaaaacttagacggtaatgatattcgtgaaggtttaacagctgttgtgtctgtacgtattccagaagaattactacaatttgaaggacaaacgaaatctaaattgggtacttctgaagcaagaagtgctgttgattcagttgttgcagacaaattgccattctatttagaagaaaaaggacaattgtctaaatcacttgtgaaaaaagcgattaaagcacaacaagcaagggaagctgcacgtaaagctcgtgaagatgctcgttcaggtaagaaaaacaagcgtaaagacactttgctatctggtaaattaacacctgcacaaagtaaaaacactgataaaaatgaattgtatttagtcgaaggtgattctgcgggaggttcagcaaaacttggacgagaccgcaaattccaagcgatattaccattacgtggtaaggtaattaatacagagaaagcacgtctagaagatatttttaaaaatgaagaaattaatacaattatccacacaatcggggcaggcgttggtactgactttaaaattgaagatagtaattataatcgtgtaattattatgactgatgctgatactgatggtgcgcatattcaagtgctattgttaacattcttcttcaaatatatgaaacctctcgttcaagcaggtcgtgtatttattgctttacctccactttataaattggaaaaaggtaaaggcaaaacaaagagagttgaatacgcttggacagacgaagagcttaataaattacaaaaagaacttggtaaaggcttcacgttacaacgttacaaaggtttgggtgaaatgaaccctgaacaattatgggaaacgacgatgaacccagaaacacgaactttaattcgtgtacaagttgaagatgaagtgcgttcatctaaacgtgtaacaacattaatgggtgacaaagtacaacctagacgtgaatggattgaaaagcatgttgagtttggtatgcaagaggaccaaagtattttagataattctgaagtacaagtgcttgaaaatgatcaatttgatgaggaggaaatctag

SEQ ID NO: 8041 - DNA, 2403 bp, Staphylococcus aureus
  CDS (1)...(2403)
gtgagtgaaataattcaagatttatcacttgaagatgttttaggtgatcgctttggaagatatagtaaatatattattcaagagcgtgcattgccagatgttcgtgatggtttaaaacccgtacaacgtcgtattttatatgcaatgtattcaagtggtaatacacacgataaaaatttccgtaaaagtgcgaaaacagtcggtgatgttattggtcaatatcatccacatggagactcctcagtgtacgaagcaatggtccgtttaagtcaagactggaagttacgacatgtcttaatagaaatgcatggtaataatggtagtatcgataatgatccgccagcggcaatgcgttacactgaagctaagttaagcttactagctgaagagttattacgtgatattaataaagagacagtttctttcattccaaactatgatgatacgacactcgaaccaatggtattgccatcaagatttcctaacttactagtgaatggttctacaggtatatctgcaggttacgcgacagatataccaccacataatttagctgaagtgattcaagcaacacttaaatatattgataatccagatattacagtcaatcaattaatgaaatatattaaaggtcctgattttccaactggtggtattattcaaggtattgatggtattaaaaaagcttatgaatcaggtaaaggtagaattatagttcgttctaaagttgaagaagaaactttacgcaatggacgtaaacagttaattattactgaaattccatatgaagtgaacaaaagtagcttagtaaaacgtatcgatgaattacgtgctgacaaaaaagtcgatggtatcgttgaagtacgtgatgaaactgatagaactggtttacgaatagcaattgaattgaaaaaagatgtgaacagtgaatcaatcaaaaattatctttataaaaactctgatttacagatttcatataatttcaacatggtcgctattagtgatggtcgtccaaaattgatgggtattcgtcaaattatagatagttatttgaatcatcaaattgaggttgttgcaaatagaacgaagtttgaattagataatgctgaaaaacgtatgcatatcgttgaaggtttgattaaagcgttgtcaattttagataaagtaatcgaattgattcgtagctctaaaaacaagcgtgacgctaaagaaaaccttatcgaagtatacgagttcacagaagaacaggctgaagcaattgtaatgttacagttatatcgtttaacaaacactgacatagttgcgcttgaaggtgaacataaagaacttgaagcattaatcaaacaattacgtcatattcttgataaccatgatgcattattgaatgtcataaaagaagaattgaatgaaattaaaaagaaattcaaatctgaacgactgtctttaattgaagcagaaattgaagaaattaaaattgacaaagaagttatggtgcctagtgaagaagttattttaagtatgacacgtcatggatatattaaacgtacttctattcgtagctttaatgctagcggtgttgaagatattggtttaaaagatggtgacagtttacttaaacatcaagaagtaaatacgcaagataccgtactagtatttacaaataaaggtcgttatctatttataccggttcataaattagcagatattcgttggaaagaattggggcaacatgtatcacaaatagttcctatcgaagaagatgaagtggttattaatgtctttaatgaaaaggactttaatacagatgcattttatgtttttgcgactcaaaatggcatgattaagaaaagtacagtgcctctatttaaaacaacgcgttttaataaacctttaattgctactaaagttaaagaaaatgatgatttgattagtgttatgcgctttgaaaaagatcaattaattaccatcattactaataaaggtatgtcattaacgtataatacaagtgaactatcagataccggattaagggcagctggtgttaaatcaataaatcttaaagctgaagatttcgttgttatgactgaaggtgtttctgaaaatgatactatattgatggccacacaacgcggctcgttaaaacgtattagttttaaaatcttacaagttgctaaaagagcacaacgtggaataactttattaaaagaattaaagaaaaatccacatcgtatagtagctgcacatgtagtgacaggtgaacatagtcaatatacattatattcaaaatcaaacgaagaacatggtttaattaatgatattcataaatctgagcaatatacaaatggctcattcattgtagatacagatgattttggtgaagtaatagacatgtatattagctaa

SEQ ID NO: 8042 - DNA, 1989 bp, Staphylococcus aureus
  CDS (1)...(1989)
atgtttaatgaaaaagatcaattagctgttgatacgctacgtgcactaagtatcgacacaatcgaaaaagcgaattctggtcatccaggattacctatgggagctgccccaatggcttacactttgtggacacgtcatctgaattttaatccacaatctaaagattacttcaatagagaccgtttcgtattatcggcagggcatggttcagcattattgtatagcttgttacatgtttctggtagtttagaattagaagaattaaagcaatttagacaatggggttctaaaacgccaggccatcctgaatacagacatactgatggtgtagaagttactactggaccacttggacaaggttttgctatgtcagtaggattagctttagcagaagatcacctagcagggaaatttaataaagaaggatataatgttgtagatcattacacatatgtattagcttctgacggtgatttaatggaaggtatttcgcatgaagcagcttcatttgctggacataataaattaagtaaattagttgttttatacgattcaaatgatatttcattagatggcgaattaaataaagctttttctgaaaacacaaaagctcgttttgaagcatatggttggaattacttactagttaaagatggtaatgatttagaagaaattgataatgcgattactactgctaaatctcaagaaggaccaacaattatcgaagttaaaacaacaatcggatttggttcaccgaataaagcaggaactaatggtgttcatggggcacctttaggtgaagatgaaagaaaattaacattcgaaaattacggtttagatcctgaaaaacgttttaatgtttcagaagaagtatacgaaattttccaaaatactatgttaaaacgtgctaatgaagatgaatctcaatggaattcattattagaaaaatatgcagaaacatatcctgaattagcagaagaatttaaattagcgattagtggtaaattgcctaaaaattataaggatgaactaccacgttttgaacttggtcataatggtgcatctcgtgctgattctggtactgttattcaagcaatcagtaaaactgtcccttcattctttggtggatcagcagaccttgctggttcaaacaaatccaatgtaaatgatgcaacagattatagttctgaaacacctgaaggtaaaaatgtgtggtttggtgtacgtgaatttgctatgggtgctgctgtaaatggtatggctgcacatggaggtttacatccatatggtgcaacattcttcgtatttagtgattatttaaaaccagcgttacgcttatcatcaattatgggattaaatgctacgttcatcttcacacatgattcaattgcagtaggtgaagatggtcctactcatgaaccaattgaacaattagctggactaagagccattccaaatatgaatgttatccgtcctgcagatggtaatgaaacaagagtagcatgggaagttgccttagaatctgaatctacacctacttcattagtattgacacgtcaaaacttaccggttttagatgtaccagaagatgtagttgaagaaggcgttcgaaaaggtgcctatacagtttatggctctgaagagacaccagaattcctattattagcttcaggttcagaagttagtcttgcagttgaagctgctaaagatcttgaaaagcaaggtaaatcagtgcgtgttgtttcaatgcctaactggaatgcatttgaacaacaatctgaagaatataaagaatcagttattccatcaagcgtaacaaaacgtgttgcgattgaaatggcttcaccgctaggatggcataaatatgtaggtactgcaggtaaagttattgctattgacggctttggcgcaagtgcacctggcgatttagtagttgaaaaatatggctttacaaaagaaaatatcttaaaccaagttatgagcttataa

SEQ ID NO: 8043 - DNA, 3030 bp, Staphylococcus aureus
  CDS (1)...(3030)
atgaaaccattacatttaaagttgaataatttcggcccctttttaaaagaagaaattgatttttctaaaattgataataatgaattgtttttaataagtggtaagactggatcgggtaaaacaatgatttttgatgcaatgacttatgccttgtttggtaaagcatctactgaacaaagagaagaaaatgatttgagaagtcatttcgctgatggtaaacagccgatgtcagtaacgtttgaatttcaattaaatcatcgaatttataaagtgcatagacaaggcccttatatcaaagaaggtaatacaacaaaaacgaacgctaaatttgatgtatttgagatggtggatggcaagtatgaaattagagaaagtaaagtgatttcaggtacccaattcattattgaattattaggagtaaatgcagatcaattccgacaattgtttattttgcctcaaggtgaattcaaacgctttttaatatcaaacagtcgtgaaaagcaagggatattaagaacgctgtttgacagtgaaaaatttgaagctatacgagaaatattaaaagaagaagtaaaaaaagaaaaagctcaaatcgagaatagatatcaacaaattgaccttttatggcaagaaattgaatcatttgatgatgacaaaataaaaggcttattagaagttgccactcaacagatagacaaagtgattgaaaatataccacttttacaagctaggtcgaaagaaatactagcatttgtaaatgaaagtaaagaaactgctattaaagaatatgaaataatagaaaagaaaacactagaaaataatatattaaaagataatattaatcaactcaacaaaaataaaattgatttcgttcaattgaaagagcaacaacctgaaatagaggaaattgaagctaagttaaagttgttacaagatattacaaacctattgaattatattgaaaatagagaaaaaattgaaactaaaattgctaaaagcaaaaaagatatttctgaaaccaataataaaatattgaaccttgattgtgataagcgaaacatagacaaagagaaaaaaatgttagaagaaaatggagatttaattgaaagtaaaatctcttttattgataaaactagagtattatttaacgacattaataagtatcaacaaagttatctcaatattgaacgcttgagaactgaggatgaacaattaggtgatgaattaaataatctaattaaaggtttagaaaaggtcgaagattcaataggtaataatgaaagtgattacgagaaaattatcgaactaaataatgcgataactaacataaataatgaaattaatgtaattaaagaaaatgaaaaagctaaagatgaattagataaactattaggtagtaagcaagagttagagaatcaaattaatgaagaaaaaactatattgaagaatctcgaaataaaattagatcgctatgataaatcaaaattggacttaaatgataaagaaagctttataagtgaaattaaatctgctgtaaagattggagatcaatgtccgatatgtggtaatgaaattcaggatttagggcatcatattgattttgacagtattgctaaacgtcaaaatgaaattaaagaaattgaagcaaatatccacactatggaatcgaatattgctgtgcataattctgaaattaaatttgttaatgaaaaaatatcgaatattaatattaaaacgcaaagtgatctttcactcgaagtattgaataagcgtctgctagaaaatgaaaatgcattgaataatcaaagagatcttaataaatttatagaacaaatgaaagaagaaaaagataatctaacgttgcaaatccataataaacaattgcgtctaaataaaaatgaatctgagttgaaaatatgtcgaaatctcatcactgaatttgaaacgctctcgaaatataataatatcactaattttgaggtggattataagaagtatattcaagatgtgaatcaacatcaagaacactcaaaccagattgaagataagttaatacaattatctcaaagaaagttaattgagcaaaataatctaaatcactatgaaaaccaactagaaacttacaataatgacttagaattgaatgaacaatctattgaaatggaaatgtcgaggctgaatttaactgacgacaatgatataaatgaaataatagcctggaggggcgagcaagaggaattagagcagaaaagggatacttataaaaaacgttatcatgaatttgaaatggaaatcgctaggttagaatcattaaccaaggataaagagttattggactctgataaattaaaagatgactatgaactaaaaaaaggaaagatgaatacactgatagatgaatactctgctgttcattatcaatgtcaaaataatattaaaaaaacacaatctatagtttcgcatattaattacttaaatcaagaattaaaggatcaacaagaaatatttcaattggctgagattcttagtggtaagaataacaaaaatcttacattggaaaactttgtcttaatttactatttagatcaaattattgctcaagcaaatctgagattagcaacaatgtcagataatcgataccaactaattaggcgagaagcggtttctcatggtcttagtggcctagaaattgatgtatttgatttgcattcaaataagtctagacatattagctcgttatcaggtggagaaactttccaatcgtcgcttgcattagctttagggttaagtgaaattgtacagcagcaatcaggaggtatttcactagaatcaatttttattgatgaaggattcggtacattagatcaagaaacgcttgaaacagtgttagacactttgttaaatcttaaatcaactggtagaatggttgggattatttcacatgtgagcgaattgaaaaatagaatacctttagttttagaagtgaaatcagatcaatatcagagttcaacaagattcaaaagaaattaa

SEQ ID NO: 8044 - DNA, 285 bp, Staphylococcus aureus
  CDS (1)...(285)
atgctaaaaccaattggaaatcgtgtgattattgagaaaaaagaacaagaacaaacaactaaaagtggtattgttttaactgatagtgctaaagaaaaatcaaacgaaggcgttatcgttgcagtaggaacaggacgcctattaaatgatggtacaagagtgactcctgaagtgaaagaaggggaccgtgtcgtgttccaacaatatgctggtacagaagttaaacgagataatgaaacatatctagtattaaatgaagaagatattttagcggtaattgaataa

SEQ ID NO: 8045 - DNA, 1929 bp, Staphylococcus aureus
  CDS (1)...(1929)
atgatacttttacaactcaatcatatatcaaaatcgttcgatggtgaagatatatttactgatgttgattttgaagtaaaaactggtgaacgaattggtatcgtaggaagaaatggcgccggtaaatcaacattgatgaaaattatagctggtgtagaaaactatgattctggaaatgtgtcaaaaattaaggacttaaggctaggttatttaactcaacaaatgactttcaattctaatgcaacagtttttgaagaaatgtcaaaaccatttgaacatattaaacgaatggaaagcttaatcaaagaagaaacagattggttatcaaaacatgcaaatgattacgatagtgatacatataaaacacatatgtcccgttatgaatctttatcgaatcaatttgaacaattagaaggatatcaatatgaaagtaaaattaaaacagtacttcacgggttaaattttagtgaagaagatttcaataaacctatcaatgattttagcggtggccaaaaaacacgtttatctttagctcaaatgctattaaatgaacctgatttattacttttagatgaacctactaaccacttagatttagaaacgacaaagtggcttgaagattatctacgttattttaaaggtgcaatcgtcatcatcagccatgatcgttactttttagataaaatagttactcaaatttatgatgtggctttaggtgatgtcaaacgctatgttggtaattacgaggaatttatacagcaacgggatttatattatcaaaaacgaatgcaagaatatgaaagtcaacaagcagaaataaaacgattagaaacttttgttgagaaaaatattacccgtgcttcaacaagtggaatggcaaaaagtagacgtaagattttagaaaaaatggaacgcattgataaaccaatgttagatgccaaaagtgcaaatattcaatttggttttgaccggaatacaggtaatgatgtcatgcatgtaaaaaatttagaaattggttatcaaactgcaattaccaaacctatcagtatagaggtctctaaaggcgatcatatagcaatcattgggccaaatggtattggaaaatcgaccttaattaaaactattgctaatcaacaaaaagcacttaatggcgatattactttcggcgcaaatttacaaattggttattatgatcaaaagcaagcagaatttaaatctagtaaaacgattttagattatgtgtgggatcaatatccgttaatgaatgaaaaagatattcgtgcagttcttggacgtttcttatttgtacaagacgatgttaaaaagataattaatgatttatctggtggtgaaaaagcacggttacaactagcactacttatgttgcagcgtgacaatgtacttattttagatgaacctaccaaccacctcgatatagattcaaaagaaatgttagagcaagcactccaacattttgaaggaacaatactatttgtttcccatgatcgttactttattaaccaattagcaaacaaggtatttgatttaacaattgatggcggaaagatgtatttaggagattatcaatattacattgaaaaagttgaggaagcggaagcgttgaaagcgcaccaagaagaacagtcagttaacgtacaagcacatgaaaagtctatggaacaatcgtcgtatcataaccaaaaagaacaaagacgtgaacaacgtaaacttgaacgacaaatatccgagtgtgaaaatgaaatagaaactttagagactactatcttacaaatagacgagcaattaacccaaccagaagtttataacaatccacaaaaagcaaacgaattagctatccaaaaacaagatagcgaacaaaaattagaacacgctatgtctaaatgggaagaattacaacaaaaactataa

SEQ ID NO: 8046 - DNA, 1194 bp, Staphylococcus aureus
  CDS (1)...(1194)
atggcacataccattacgattgttggcttaggaaactatggcattgatgatttgccgctagggatatataaatttttaaagacacaaaataaagtttatgcaagaacgttagatcatccagttatagaatcattgcaagatgaattaacatttcagagttttgaccatgtttatgaaacacatgaccaatttgaagatgtctataatgatattgtggcgcaattggttgaagctgctaatgaaaaagatattgtctatgcggttccgggtcatcctagagttgctgagacaactacagtgaaattactggctttagcaaaagacaatactgatatagatgtgaaagttttaggtggtaaaagctttattgatgatgtttttgaagcagttaatgtagatccaaatgatggcttcacactgttagatgcgacatcactacaagaagtaacacttaatgttagaacgcatacattgattacgcaagtttatagtgcaatggttgctgctaatttgaaaatcactttaatggaacgatatcctgatgattaccctgttcaaattgtcactggttcacgaagcgatggtgcggataacgttgtgacatgcccattatatgaattggatcatgatgaaaatgcattcaataatttgacgagtgtattcgtaccaaaaatcacaacaccgacatatttgtatcatgactttgattttgcaacggaagtgattgatactttagttgatgaagataaaggttgtccatgggataaagtgcaaacgcatgaaacgcttaaacgttatttacttgaagaaacatttgaattgttcgaagctattgacaatgaagatgattggcatatgattgaagaactaggagatattttattacaagtgttattgcatactagtattggtaaaaaagaagggtatatcgacattaaagaagtgattacaagtcttaatgctaaaatgattcgtagacacccacacatatttggtgatgccaatgctgaaactatcgatgacttaaaagaaatttggtctaaggcgaaagatgctgaaggtaaacagccaagagttaaatttgaaaaagtatttgcagagcattttttaaatttatatgagaagacgaaggataagtcatttgatgaggccgcgttaaagcagtggctagaaaaaggggagagtaatacatga

SEQ ID NO: 8047 - DNA, 882 bp, Staphylococcus aureus
  CDS (1)...(882)
atgacacacgattatattgttaaagcattagcatttgatggggagattagggcttatgctgctttgacaactgaaactgttcaagaagcacaaacgagacattatacatggccgacagcatctgctgcaatgggaagaacaatgacagcaacagctatgatgggcgcaatgttgaaaggtgatcaaaaattaactgtcactgtagatggccaaggacctattggacgaattattgccgatgcaaatgctaaaggcgaggtgcgtgcttatgtagaccatccacaaactcattttccattaaatgagcaaggtaaacttgatgtaagacgagcagtagggacaaatggatctattatggttgttaaagacgttggaatgaaagactatttctctggagcaagtccaattgtttcaggagaacttggtgaagattttacttattattatgctacaagtgaacaaacaccttcatcggtaggtcttggtgtattggtaaatcctgataatacgattaaagcagcaggaggatttatcattcaagttatgccaggtgccaaagatgaaacaatttcaaaattagaaaaagcaattagtgaaatgacgccagtttctaaattaattgaacaaggattaacgccagaaggattactaaacgaaatcttaggtgaagaccatgtgcaaattttagagaaaatgcctgttcaatttgaatgtaattgtagtcatgagaaatttttaaatgctattaaaggattgggcgaggctgagattcaaaatatgattaaagaagatcatggtgctgaagcagtatgtcatttctgtggaaataaatataaatatactgaagaagaattaaacgtgttactagaaagtttagcgtaa

SEQ ID NO: 8048 - DNA, 942 bp, Staphylococcus aureus
  CDS (1)...(942)
gtgttcttaatggcacaaaaaccagtagataatattactcaaattattggcggtacaccggtagtcaaattgagaaatgtagtagatgacaatgcagcagatgtttatgtaaaattggaatatcaaaatccaggtggttctgtaaaggatagaattgctttagcaatgattgaaaaagcagagcgagaaggtaaaattaaacctggcgatacaattgtagaaccaacaagtggtaatacaggtatcggtttagcatttgtatgtgctgctaaaggatataaagcagtatttactatgcctgaaacaatgagccaagagcgtcgtaatttattaaaagcatacggtgcggaattagttttaacgcctggatcagaagcaatgaaaggtgcaattaaaaaagctaaagaattaaaagaagaacatggttacttcgagccacaacaatttgaaaaccctgcgaaccctgaagttcatgagttaactacaggtcctgagttattacaacaatttgaagggaaaactatcgatgcgttcctagctggtgttggtactggtggtacgttatctggtgtaggtaaagttctgaaaaaagaatatcctaacatcgaaattgttgctatagagcctgaggcttctccagtattgagcggtggtgagccaggtccacataaattacaaggtttaggtgctggatttattccaggtactttgaatacagaaatctatgacagtattattaaagtaggaaatgatacagcgatggaaatgtctcgtcgagttgctaaagaggaaggtattttagcaggtatttcatcaggtgctgcgatttatgctgccattcaaaaagcaaaagaattaggaaaaggtaaaacagtagtaacagtattgccgagtaatggtgagcgctacttatcaacacctttatattcattcgatgactaa

SEQ ID NO: 8049 - DNA, 813 bp, Staphylococcus aureus
  CDS (1)...(813)
gtggttaacatgactaaaacaaaaattatgggcatattaaacgtcacacctgattcattctcagatggtggaaaatttaataatgttgaatcagcagtaactagagtgaaagcgatgatggatgaaggtgctgacattatagatgttggaggtgtttcaacgagacccggccatgaaatggtttcattagaagaagagctgaacagagtattacctgttgttgaagctattgtcggttttgatgtgaaaatttcagtcgatacatttcgaagtgaggttgctgaagcatgtttaaaattaggcgttgatatcattaatgatcaatgggcggggctgtatgatcatcgtatgttccaaattgtagctaaatatgacgcggaaattattttaatgcataatggaaatggtaatcgtgatgaaccggttgtcgaagaaatgttaacatctttgttagcacaagcacatcaagctaaaatagctggtataccttcaaataaaatttggctagatccaggtataggtttcgctaaaactagaaatgaagaagccgaagttatggcaagactggatgaacttgttgcaacagaatatccagttttattagcgacaagccggaaacgtttcactaaagagatgatgggttatgatacaacaccggttgaaagagatgaagtaactgcagctacgactgcatatggtattatgaaaggcgttagagcagtacgcgttcataatgtcgagttgaatgctaaattagctaaaggtatagattttttaaaggagaatgaaaatgcaagacacaatctttcttaa

SEQ ID NO: 8050 - DNA, 420 bp, Staphylococcus aureus
  CDS (1)...(420)
atgaaatatggtcatattttaaatgaattctttgagcaaaaagttgaagaaacacttattcagccaacgtttatctatggtcatccgactgaaatttcacctttagcgaagaaaaatcctgaagatcctagatttactgatcgtttcgaattgttcattgtaggtagagagcatgcaaatgcatttactgaattaaatgatcctattgatcaaaaaggtcgttttgaagcgcaacttgttgaaaaagcacaaggtaatgatgaagcgcatgaaatggatgaagattacattgaagcgttagaatatggtatgcctccgacaggtggtcttggtatcgggattgacagattagttatgttattaactgactctccatcaatcagagacgtattattattcccttatatgagacaaaaataa

SEQ ID NO: 8051 - DNA, 1359 bp, Staphylococcus aureus
  CDS (1)...(1359)
atgttcatgcgaagacacgcgataattttggcagcaggtaaaggcacaagaatgaaatctaaaaagtataaagtgctacacgaggttgctgggaaacctatggtcgaacatgtattggaaagtgtgaaaggctctggtgtcgatcaagttgtaaccattgtaggacatggtgctgaaagtgtaaaaggacatttaggcgagcgttctttatacagttttcaagaggaacaactcggtactgcgcatgcagtgcaaatggcgaaatcacacttagaagacaaggaaggtacgacgatcgttgtatgtggtgatacaccgctcatcacaaaggaaacattagaaacattgattgcgcatcacgaggatgctaatgctcaagcaactgtattatctgcatcgattcaacaaccatatggatacggaagaatcgttcgaaatgcgtcaggtcgtttagaacgcatagttgaagagaaagatgcaacgcatgctgaaaaggatattaatgaaattagttcaggtatttttgcgtttaataataaaacgttgtttgaaaaattaacacaagtgaaaaatgataatgcgcaaggtgaatattacctccctgatgtattgtcgttaattttaaatgatggcggcatcgtagaagtctatcgtaccaatgatgttgaagaaatcatgggtgtaaatgatcgtgtaatgcttagtcaggctgagaaggcgatgcaacgtcgtaccaatcattatcacatgttaaatggtgtgacaatcatcgatcctgacagcacttttattggtccagacgttataattggtagtgatacagtcattgaaccaggcgtacgaattaatggccgtacagaaattggcgaagatgttgttattggtcagtactctgaaattaacaatagtacgattgaaaatggtgcatgtattcaacagtctgttgttaatgatgctagcgtaggagcgaatactaaggtcggaccgtttgcgcaattgagaccaggcgcgcaattaggtgcagatgttaaggttggaaattttgtagaaattaaaaaagcagatcttaaagatggtgccaaggtttcacatttaagttatattggtgatgctgtaattggcgaacgtactaatattggttgcggaacgattacagttaactatgatggtgaaaataaatttaaaactatcgtcggcaaagattcatttgtaggttgcaatgttaatttagtagcacctgtaacaattggtgatgatgtattggtggcagctggttccacaatcacagatgacgtaccaaatgacagtttagctgtggcaagagcaagacaaacaacaaaagaaggatataggaaataa

SEQ ID NO: 8052 - DNA, 966 bp, Staphylococcus aureus
  CDS (1)...(966)
atgttaaataatgaatataagaattcgtcattaaagattttttcattgaaaggaaacgaagcattagcgcaagaagttgctgaccaagtaggaattgaactaggtaaatgttcagttaaacgttttagtgatggagaaattcaaattaatatcgaagagagtattcgtggttgtgacgtatttattattcaaccaacatcatatcctgtgaatctacatttaatggaattattaattatgattgatgcttgtaaacgtgcttctgcagcaacaatcaatattgtagtgccatattatggatatgcaagacaagatagaaaagcccgtagccgtgagccaatcactgctaaattagttgcaaacttaatcgaaacagctggcgcaactcgtatgattgcgttagacttacatgcaccacaaattcaaggattctttgatattccaattgaccacttaatgggtgtgccaattcttgctaaacatttcaaagatgatccgaatattaacccagaagaatgtgtcgttgtttcaccagaccatggcggtgttacacgtgcacgtaaattagctgacattttaaaaactccaattgcaattatagataaacgtcgtcctagaccaaatgttgctgaagtgatgaacattgttggtgagattgaaggacgtacggcaattattattgacgatattattgatacagcaggtacaatcactttagctgcacaagcattaaaagataaaggtgctaaagaagtatatgcttgttgtacacaccctgttttatcaggaccggctaaagaacgtatcgaaaattctgctataaaagaattaatcgtaacaaactcaattcatttagatgaagatcgcaaaccatctaacactaaagaattatctgttgctggtttaatcgcacaagctatcattcgtgtatacgaaagagaatcagttagcgtattatttgactaa

SEQ ID NO: 8053 - DNA, 3507 bp, Staphylococcus aureus
  CDS (1)...(3507)
atgacaatattgacaacgcttataaaagaagataatcattttcaagaccttaatcaggtatttggacaagcaaacacactagtaactggtctttccccgtcagctaaagtgacgatgattgctgaaaaatatgcacaaagtaatcaacagttattattaattaccaataatttataccaagcagataaattagaaacagatttacttcaatttgtagatgctgaagaattgtataagtatcctgtgcaagatattatgaccgaagagttttcaacacaaagccctcaactgatgagtgaacgtattagaactttaactgcgttagctcaaggtaagaaagggttatttatcgttcctttaaatggtttgaaaaagtggttaactcctgttgagatgtggcaaaatcaccaaatgacattgcgtgttggtgaggatatcgatgtggaccaatttctttacaaattagttaatatggggtacaagcgggaatccgtggtatcgcatattggtgaattctcattgcgaggaggtattatcgatatctttccgctaattggggaaccaatcagaattgagctatttgataccgaaattgattctattcgggattttgatgttgaaacgcagcgttccaaagataatattgaagaagtcgatataacaactgcaagtgattatatcattactgaagaagtgatcagccatcttaaagaagagttaaaaagtgcatatgaaaatacaagacccaaaatagataaatcagtgcgcaatgatctgaaagaaacgtatgaaagctttaaattattcgaaagtacatactttgatcatcaaatactacgtcgtttagtagcgtttatgtatgaaacaccttcgacaattattgattatttccaaaaagatgcaatcattgcggttgatgaatttaatcgtattaaagaaactgaagaaagtttaacagtagagtctgattcttttattagcaatattattgaaagtggtaatggatttataggacaaagttttataaaatatgatgattttgaaacattgattgaaggctatcctgtcacttatttttcattattcgctacaacaatgccgataaaactaaatcatattattaaattttcatgtaaacctgtccaacaattttatgggcaatatgacattatgcgttctgaatttcaacgatatgttaatcaaaactatcatatcgtggttttggtcgaaaccgaaactaaagttgaacgtatgcaagcgatgttaagtgaaatgcatattccatcaataacaaaattgcatcgctcaatgtcatcggggcaagcagtgattattgaaggcagtttatctgaaggatttgaactacctgatatgggattagttgtcattactgaacgtgagctttttaaatcaaaacagaaaaagcaacgaaaacgtacgaaagctatctcaaatgctgaaaaaattaagtcttaccaagatttaaatgtgggagattatattgttcatgtgcatcatggtgttggtagatatttaggtgttgagacgctcgaagtggggcaaacgcatcgtgattatattaaattgcaatataaaggtacggatcagctatttgttccagtagatcaaatggatcaagttcaaaaatatgtagcttcggaagataagacgccaaaattaaataaactcggtggcagtgaatggaaaaaaacaaaagctaaagttcaacaaagtgttgaagatattgctgaagagttgattgatttatataaagaaagagaaatggcagaaggttatcaatatggggaagacacagctgagcaaacaacatttgaattagattttccatatgaacttacgcctgaccaagcgaaatctatcgatgaaattaaagatgacatgcaaaaatcgcgtccaatggatcgcttgctatgtggtgatgttggttatggtaaaaccgaagttgcagtgagagcagcattcaaagctgtaatggaaggaaagcaggttgcatttttagttcctacaactattttagctcagcaacattatgagacgttaattgagcgtatgcaggattttcctgttgaaattcaattaatgagtcgttttagaacgcctaaagagataaaacaaactaaggaaggacttaaaactgggtttgttgacatagttgttggtacacacaaattacttagtaaagatatacagtataaagatttagggctgttgattgtagatgaagaacaacgatttggtgtacgccataaagagcgtattaaaacattaaaacataatgtagatgtactaacattgactgcaaccccaatacctagaacattgcatatgagtatgctaggtgtgcgcgatttgtcagtgattgaaacgccgccagaaaatcgtttcccagttcaaacatatgtattagaacagaacatgagttttatcaaagaagctttagaaagagaactatcccgtgatggccaagtattttatctttataataaagtgcaatccatttatgaaaaacgagaacaactccagatgttaatgccagatgctaacattgcagttgctcatggacaaatgtcagagcgcgatttagaagaaacgatgttaagttttatcaataatgaatatgatattttagtaacgacgacgattattgaaacaggtgtcgatgtcccaaatgcaaatactttgatcattgaagatgcagatcgctttggattgagtcagttgtatcaattaagaggtcgtgttggtcgttcaagtcgtattggttatgcatacttcttacatccagcaaataaggtactaactgagactgcagaagatcgattacaagcgattaaagaatttacggagttaggctcaggatttaagattgcgatgcgtgatttgaacattcgtggtgctggtaatttgttaggtaaacaacagcacggctttattgatacagttggatttgatttgtacagtcaaatgttagaagaagctgtaaatgaaaaacgtggtattaaggaaccagaatctgaggtgccagaagtcgaagttgatttaaacttggatgcatatttgccaacagaatatattgcaaatgaacaagctaaaattgaaatttataaaaagctacgaaaaactgaaacatttgatcaaattatcgacattaaagatgaattaattgatcgtttcaatgattatcctgttgaagtagcacgtttgcttgatatagtggaaataaaagtacacgcattacattcaggtatcacgttgattaaagataaagggaaaataattgatattcatttatctgtaaaagccactgaaaatattgatggcgaagtgctgttcaaagcaacacaacctttaggtagaacaatgaaggttggtgttcaaaataatgcaatgacaattactttaacgaaacaaaatcaatggcttgatagtttgaagttcttagttaagtgcattgaagaaagtatgagaatcagtgatgaagcataa

SEQ ID NO: 8054 - DNA, 1032 bp, Staphylococcus aureus
  CDS (1)...(1032)
atggaaccaatattagaaatgattaaaacattaacaggtattaatagtccttcaggagacacagaagaagcaattcaatttgtcgaaaaatatgcaaaagacttaggttatcaaacaacactaacaaataaaggtgcgttattaataacagtgccaggcaaaaatgatgaagtacaacgctgtattactgctcatgttgatactttaggtgcaatggttaaagaaattaaagaagatgggcgcttagcaatagaattaattggaggattcacgtataacgcgattgagggtgaatattgccaaattaaaactgatgctggccaaatatatacaggaaccatttgtctgcatgaaacaagtgttcatgtatatagaaataatcatgaaatacctagagaccaaaagcatatggaaataagaattgatgaagtaactacatcagaagaagatacaaagagtttaggtatttcagtaggtgattttgttagctttgatccacgtacagttatcacgtcatcaggttttattaaatctcgtcatttagatgataaagctagcgtagcgatgatactacaattactaaagaaattaaaagaagagcaaataatattaccacatacaacacaattttatatttctaataacgaagaaataggttacggtgcaaatgcatcaattgattcgaaaatcaaagaatatattgcattagatatgggtgcgttgggagacggtcaagcatcggatgaatatacagtttctatttgtgccaaagatgcttcaggtccatatcataagcaattgaaatcacacctagttaatctttgcaaaataaataatattccatataaagtagacatatatccatattatggttcagatgcttcagcagctttacatgctggtgcggatatcagacatggtttatttggggctggcattgaatcatctcatgcaatggaacgaacacatattgattctattaaagcgacagagaaattattatatgcatattgcttatcaccaattgagtaa

SEQ ID NO: 8055 - DNA, 1008 bp, Staphylococcus aureus
  CDS (1)...(1008)
atgaaaaccatgacattactaacaagaatccaaactgaatcaatattgctagaaagtgacattaaagagctaatcgaaatacttatttctcctagtattggaactgatattaaatatgaattacttagttcctattcggagcgagaaatccaacaacaagaattaacatatattgtacgtagcttaattaatacaatgtatccacatcaaccatgttatgaaggtgctatgtgtgtgtgcggcacaggtggtgacaagtcaaatagtttcaacatttcaactactgtcgcttttgttgtagcaagtgctggcgttaaagtcattaaacatggtaataaaagcattacctcaaattcaggtagtacggatttgttaaatcaaatgaacatacaaacaacaactgttgatgatacacctaaccaattaaatgaaaaagaccttgtattcattggtgcaactgaatcatatccaaccatgaagtatatgcaaccagttagaaaaatgattggaaagcctacaatattaaaccttgtgggtccattaattaatccatatcacttaacgtatcaaatggtaggcgtctttgatcctacaaagttaaagttagttgctaaaacgattaaagatttaggcagaaaacgtgcaatcgttttacatggtgcaaatggtatggatgaagcaacactatctggtgataatttgatatatgaattgactgaagatggagaaatcaaaaattacacattaaatgcgactgattatggtttgaaacatgcgccgaatagcgattttaaaggtggttcacctgaagaaaatttaacaatctcccttaatatcttgaatggtaaagatcagtcaagtcgacgtgatgtggttgtcttaaatgcaggtttaagcctttatgttgcagagaaagtggataccatcgcagaaggcatagaactcgcaagtactttgatagataatggtgaagctttgaaaaaataccatcaaatgagaggtgaataa

SEQ ID NO: 8056 - DNA, 1260 bp, Staphylococcus aureus
  CDS (1)...(1260)
atgaaatttacagagttaactgttaccgaatttgacaactttgtacaaaatccatcattggaaagtcattatttccaagtaaaagaaaatatagttacccgtgagaatgatggctttgaagtagttttattaggtattaaagacgacaataacaaagtaattgtagcaagccttttctctaaaattcctactatgggaagttatgtttactattcgaatcgtggtccagtaatggatttttcagatttaggtttagttgattattatttaaaagagttagataaatatttacagcaacatcaatgtttatatgttaaattagatccgtattggttatatcatctatatgataaagatatcgtgccatttgaaggtcgcgagaaaaatgatgccttagtaaacttgtttaaatcgcatggttacgagcatcatggctttacaactgagtatgatacatcgagccaagtacgatggatgggtgtattaaaccttgaaggtaaaacacctgaaacattgaaaaaaacatttgatagtcaacgtaaacgtaatattaataaagcgataaactatggtgttaaagtcagattccttgaacgtgatgagttcaatcttttcctagatttatatcgtgaaactgaagagcgtgctggatttgtatcaaaaacagatgattatttttataactttattgacacatatggagataaagtattagtaccattagcatatattgaccttgatgaatatgtgttaaagttgcaacaggaattgaatgacaaagaaaatcgtcgtgatcaaatgatggcgaaagaaaacaaatcagataaacaaatgaagaaaattgcagaattagataagcaaattgatcatgatcagcatgaattattgaatgcaagtgaattgagcaaaacggacggcccaattctaaaccttgcttctggcgtttattttgcaaatgcatatgaagtgaattatttctctgggggttcatcagaaaaatataatcaatttatgggaccatacatgatgcattggtttatgattaactattgcttcgataatggttatgatcgttataatttctatggtttatcaggtgattttacggaaaacagtgaagattatggcgtataccgctttaaacgtggatttaatgtacaaatcgaagaattaataggggatttctataaaccaattcataaagtgaaatattggttgttcacaacattggataaattacgtaaaaaattaaagaaatag

SEQ ID NO: 8057 - DNA, 984 bp, Staphylococcus aureus
  CDS (1)...(984)
atggataaagaaactaatgacaacgaatatagacgtcaaagtgaacatcgcacttcggcgcctaagcgaaaaaagaagaagaaaattaggaaattacctatcattcttctgattgttgtaattttacttatcgcattagttgtatatattgtacatagttacaatagcggtgtagaatatgccaagaaacatgcgaaagatgttaaagtacatcaatttaatggaccagtaaaaaatgatggtaaaatttctattcttgtactcggtgcagataaagcacaaggtggacaatcaagaacagattctatcatggttgttcaatatgactttatcaataaaaagatgaaaatgatgtctgtcatgcgtgatatttatgcagatattccaggatatggaaaacacaaaattaattcagcatacgctttaggtggtccagagctacttagaaaaacacttgataaaaatttaggaattaatcctgaatattatgcagtagttgattttactggatttgagaaaatgattgatgaattaatgccagaaggtgtaccaattaatgtcgaaaaagatatgtcgaaaaatattggtgtatctttgaaaaagggtaaccataggttgaatggtaaagaattacttggttatgcaagattccgtcacgaccctgaaggtgacttcggacgcgtgcgacgtcagcaacaagtaatgcaaacattgaaaaaagaaatggttaattttagaacagttgttaaattaccaaaagttgcaggtattttaagaggctatgtgaatacaaacattcctgattcagggattttccaaacaggtttgagttttggtatccgaggtgaaaaagatgttaagtcattgactgtgccaatcaagaactcatacgaagatgtcaatacaaatactgatggtagtgcattacagattaataaaaacacaaataaacaagctattaaagactttttagatgaagattaa

SEQ ID NO: 8058 - DNA, 1371 bp, Staphylococcus aureus
  CDS (1)...(1371)
atgggtcaaacattatttgacaaggtgtggaacagacatgtgttatacggaaaattgggcgaaccgcaactattatacattgatttacaccttatacatgaagttacttctcctcaagcatttgaaggacttaggcttcaaaacagaaaattaaggcgcccagatttaacatttgcaacactcgatcacaatgttcctactattgatattttcaatattaaagatgaaattgcaaacaaacaaatcacaacattacaaaaaaacgccatagattttggggtgcatatttttgatatgggttctgatgaacaaggtattgttcacatggtaggacctgagacaggacttacacagcctggcaaaacaatcgtttgtggtgactctcacacagcaacacatggagcatttggtgctattgcatttggaattggaacaagtgaagttgaacatgttttcgcaactcaaacgctatggcaaacaaaacccaaaaacttaaaaatcgatattaatggtaccttaccaacaggcgtctatgctaaggacattattctgcatttaattaaaacgtatggtgttgactttggtacaggctatgctttggaatttactggcgaaacaattaaaaacctttcaatggacggtcgaatgactatttgtaacatggccatcgaaggtggtgccaaatacggcataatccaacctgatgatataacatttgaatatgttaaagggagaccatttgccgataacttcgctaaatcagttgataagtggcgtgagctatattctgatgacgacgcgatatttgatcgtgtaattgaacttgatgtttcaacattagaaccacaagtgacatggggaactaatcctgaaatgggtgttaatttcagtgaaccattccctgaaatcagtgatatcaacgatcaacgtgcgtatgattatatggggttagaaccaggacaaaaagctgaagatatcgatttagggtatgttttcctcggttcatgtacaaatgctagactatcagatttgattgaagctagtcatattgttaaaggaaataaagttcacccaaatattacagctattgtcgtaccaggttctcgtacagtaaaaagagaagctgaaaaattaggtctagatactatttttaaaaatgcaggatttgaatggcgtgaaccaggatgttcaatgtgtttaggcatgaatcctgaccaagtacctgagggtgtacattgtgcatctacaagtaatcgaaacttcgaaggacgacaaggcaaaggtgctagaacacatttagtatcccctgctatggcagcagcagcagctattcatggtaaatttgtggacgtaagaaaggtggttgtttaa

SEQ ID NO: 8059 - DNA, 573 bp, Staphylococcus aureus
  CDS (1)...(573)
atggcagcaatcaaacctattacaacatataaaggtaaaatagtccctcttttcaacgataatatcgatacagatcaaatcattcctaaggtacacttaaagcgtatttcaaaaagtggctttggtccatttgcttttgatgaatggcggtacttacctgatggttcagataatcctgatttcaatccaaataagcctcaatataaaggtgcatccatattaattactggagataatttcggatgtggttcaagtcgtgaacatgcagcttgggcacttaaggactatggctttcatattattattgcaggaagtttcagtgacattttttatatgaattgtacaaaaaatgcaatgttaccaattgttttagaaaaaaatgcacgtgaacatcttgcgaaatatgttgaaattgaggtcgatttaccaaatcaaactgtgtcatcaccagacaagagtttccattttgaaattgatgaaacttggaagaataaacttgtaaatggcttagatgacattgcaatcaccctacaatatgaatcattaatagaaaaatatgaaaaatcactttaa

SEQ ID NO: 8060 - DNA, 1026 bp, Staphylococcus aureus
  CDS (1)...(1026)
atgactaaagatatattaatactagctgttgaaacaagttgtgatgaaacaagcgttagtgttataaaaaatgacagagatattttatcaaatacagttttaagtcagattgaaagtcataaacgatttggcggtgtcgttcccgaagtggcaagtagacatcacgttgaaggtataacaacaacaataaacgaggctctagtggatgccgatgtatcaatggaagatattgatgccatagcggttacagaaggccctggactaattggtgcgttactaataggtgttaatgcagccaaagcattagcatttgcttatgataagccacttattccagttcatcatattgcaggacatatatatgctaatcacatagaagagccattaacattcccgctaattgcacttattgtctcaggtggacatactgaattagtttatatgaaagatcatttaacatttgaagtcattggtgaaacacgagatgacgcagtaggtgaggcttatgataaagtggcacgaacaattggtttaaattatccaggtggtccacaagttgatcggttggctgctgaaggtgaagatacttattcattccctcgtgtttggttggataaagatagttatgattttagttttagtgggttgaaaagtgccgtaatcaatcaacttcacaatcaacgacaaaaaaatattccaatcattgaagctaacgtagcaacgagctttcaaaatagtgttgtagaggtgcttacgtttaaagctattcaagcttgtaaagaatatggtgttcagcgattaattgttgccggtggcgtggcgagtaataaaggattacgtcaatctttagcggatcaatgcaaagtcaatgacattcaattaactatcccaagtcctaaattatgcacagataatgctgcaatgataggtgttgccggccactatttgtatcagcaaggtcgatttgctgatttaggattaaatgggcacagcaatatagatttagaagagtattctgcagaataa

SEQ ID NO: 8061 - DNA, 1689 bp, Staphylococcus aureus
  CDS (1)...(1689)
atgcgaagcgacatgatcaaaaaaggagatcaccaagcaccagcaagaagtcttttacatgccacgggcgcgctaaaaagtccaactgatatgaacaaaccatttgtagctatttgtaactcttatattgatattgttcctggacatgttcacttgagagagcttgcagatatagctaaagaagcaattagagaagccggtgccattccatttgaattcaatacaattggtgttgatgatggaatagctatgggacatatcggaatgcgatattctctaccatcacgtgaaattattgcagatgcagctgaaactgtaattaacgctcattggtttgacggcgtattttacattcctaattgtgacaagattacacccggtatgattttagcagccatgaggacaaacgtaccagctatcttttgctctggtggaccaatgaaagctggcttatctgcacatggtaaagcattaacactttcatcaatgtttgaagctgtaggtgcttttaaagaaggatcgatttctaaagaagaatttttagatatggaacaaaatgcctgccctacttgtggttcatgtgctgggatgtttactgcaaattcaatgaactgtttgatggaagttttaggtctagcattaccatacaacggtactgcacttgcagtcagtgatcagcgacgcgaaatgattcgtcaagcagcttttaaattagttgaaaacattaaaaatgatttaaaaccacgtgatatcgttactcgcgaagcaattgatgatgcatttgcacttgatatggctatgggtggttcaacaaacacggtactgcatacgttagccattgccaatgaagctggtattgattatgacttagagcgcattaatgctattgccaaacgcacgccatatttatcaaaaatagcacctagttcatcgtattcaatgcatgatgtgcatgaagctggtggggtcccagcaattattaatgaattgatgaagaaagatggcacgttacacccagatagaatcacagttactggcaaaacgttacgtgaaaataacgaaggcaaagaaattaagaactttgatgtcattcaccctcttgatgcaccatatgatgcacaaggtggtttatctatcttatttggtaatatcgcccctaaaggcgcagttattaaagttggcggcgttgatccatctatcaaaacatttactgggaaagcaatttgtttcaattcgcatgatgaagctgttgaagcaatagacaatcgtaccgttcgtgcaggccacgtcgttgtcattagatatgaaggacctaaaggtggaccaggtatgcctgaaatgttagcacctacttcctctattgttggtcgtggcttaggtaaagatgttgcattaattactgatggtcgtttttccggtgccacaagaggtattgcagttggtcatatttcccctgaagctgcatctggtggaccaattgccttaattgaagatggagatgagattactattgacttaacaaatcgtacattaaacgtaaaccagcctgaagatgttctggcgcgtcgccgagaatctttaacaccatttaaagcgaaagtaaaaacaggttatctagctcgttatactgccctagtaactagcgcaaatacaggtggcgtcatgcaagtgcctgagaatttaatttaa

SEQ ID NO: 8062 - DNA, 1779 bp, Staphylococcus aureus
  CDS (1)...(1779)
atggttaaaatgtctaaaactcaacatgaagtaaaccaaaatattgaccctttaaaaatggctgaatcacttgaacctgaacaactaaatgaaaaaactttaaatgacatgcgttcaggatcagaagtgctagtagaagctctacttaaagaaaatgtggattatttattcggttatcctggtggtgccgtactacctttatacgacacattttatgatggtaaaatcaaacatattttagcaagacacgaacaaggtgctgttcatgctgcagaaggttatgcacgtgtatctggtaaaactggcgtcgttgtagttacaagcggtccaggtgcaactaatgtaatgacaggtattacggatgcacattgcgactctttacctctagttgtattcactggacaagttgctacaccaggcattggtaaagatgcattccaagaagcggatattctatctatgacttcaccaattacaaaacaaaattatcaagtgaaacgtgttgaagatatccctaaaatcgtacacgaagctttccatgtagctaattctggacgcaaaggtcctgtagtgatcgattttccaaaagatatgggtgttttagctacaaatgtggatttatgcgacgaaatcaatattccaggttatgaagttgttacagaaccagaaaataaagacattgacactttcatctcacttttaaaagaagcgaaaaagcctgtcgtattagccggcgcaggtattaatcaatcaaaatcaaatcaattattaacacagtttgttaataaacatcaaatcccaacagttactactttactaggtctaggtgctgtaccttatgaggatacactatttttaggtatgggaggtatgcatggttcttatgctagtaacatggcattaactgagtgtgatttactcattaatttaggtagccacttcgatgatagattagcaagcaaacctgatgcctttgcacctaacgccaaaattgtacatgtagatattgacccttcagaaattaataaagttattcatgtagatttaggtattattgcagactgtaaacgatttttagaatgtttaaatgataaaaatgttgagactgtagaacacagtgactgggttaaacattgtcaaaataataagcagaaacacccatttaaacttggtgaagaagatcaagtattttgtaagccacaacaaacaatcgaatatatcggcaaaattacaaatggtgaagcaattgttactacagacgtgggacaacatcaaatgtgggcagctcaattttatccatttaaaaatcacggacaatgggttacaagcggtggtttaggaacaatgggattcggtattccttcgtcaattggtgccaaattagctgatcctgataaaacagtcgtatgtttcgtcggtgacggtggtttccaaatgacaaaccaagaaatggcactattacccgaatatggtttagatgtcaaaatcgtactaatcaataatggaacattaggtatggttaaacaatggcaagataagttctttaatcaacgcttctcacactcagtatttaatggtcaacctgattttatgaaaatggcagaagcatatggcgtcaaaggtttcttaatcgataagccagaacaactggaagaacaattagatgcagcgtttgcttatcaaggaccagctttaattgaggttcgtatttcccctactgaagctgtaaacccaatggttccgagtggcaaatcaaatcatgaaatggagggcttataa

SEQ ID NO: 8063 - DNA, 1005 bp, Staphylococcus aureus
  CDS (1)...(1005)
atgacaacagtttattatgatcaagatgtaaaaacggacgctttacaaggcaaaaaaattgcagtagtaggttatggatcacaaggccacgcgcatgcacaaaacttaaaagacaatggatatgatgttgtcatcggtattcgaccaggtcgttcttttgacaaagctaaagaagatggatttgatgtgttccctgttgcagaagcagttaagcaagctgatgtaattatggtgctattacctgatgaaattcaaggtgatgtatataaaaacgaaattgaaccaaatttagaaaaacataatgcgcttgcatttgctcatggctttaacattcattttggtgttattcaaccacccgctgatgttgatgtatttttagtagctcctaaaggaccgggtcatttagttagacgtacatttgttgaaggttctgctgtaccatcactatttggtattcaacaagacgcttcaggtcaagcacgtaatattgctttaagttatgcaaaaggtattggtgcaactcgtgcaggtgttattgaaacaacatttaaagaagaaacagagacagatttatttggtgaacaagcagtactttgcggtggtgtatcgaaattaattcaaagtggctttgaaacattagtagaagcgggttatcaaccagaattagcttattttgaagtattacatgaaatgaaattaatcgttgatttgatgtatgaaggcggtatggaaaatgtacgttactcaatttcaaatactgctgaatttggtgactatgtttcaggaccacgtgttatcacaccagatgttaaagaaaatatgaaagctgtattaactgatatccaaaatggtaacttcagtaatcgctttatcgaagacaataaaaatggattcaaagaattttataaattacgcgaagaacaacatggtcatcaaattgaaaaagttggtcgtgaattacgcgaaatgatgccttttattaaatctaaaagcattgaaaaataa

SEQ ID NO: 8064 - DNA, 4509 bp, Staphylococcus aureus
  CDS (1)...(4509)
gtgtgcatcatgcacaatgagaaattaattaaaggcttatatgactatcgtgaggaacatgatgcgtgtggtattggtttttatgcgaatatggacaataaaaggtctcacgacatcattgataaatcgcttgaaatgttgcgacgcttagatcacaggggcggggtcggcgcagatggcatcactggtgatggcgcaggtattatgactgaaataccttttgcatttttcaaacaacatgtaacggactttgatatcccaggtgaaggtgaatatgccgtgggattatttttttccaaagaacgcgttttaggttctgaacatgaagcagtttttaaaaaatattttgaaggcgaagggttatcaattcttggttatcgtaatgtaccagttaataaagatgccattgctaaacatgtagcagatacgatgccagtcattcaacaagtgtttattgatattagggacattgaagatgttgaaaagcgtttgtttttagcgagaaaacaattagagttctattcgactcagtgcgatttagaattatattttacgagcttatcacgcaaaacaattgtatataaaggttggttacgatcagaccaaattaaaaaactctatacagatttatcagatgatttatatcaatcaaagctagggttagtgcattcgagatttagtacgaatacattcccgagttggaaaagggcgcatcctaaccgtatgttaatgcataatggtgagattaacacaataaaaggtaatgtgaactggatgcgagcacgccaacataaattaatcgaaacattatttggcgaggatcaacataaagtgtttcaaattgtcgatgaggatggtagtgactctgccattgtagataatgcgctagagttcttatcgttagccatggagccagaaaaggcagcgatgctactcatacctgaaccttggctatataatgaagcgaatgatgcaaatgtacgtgcgttttatgaattttatagttatttaatggaaccgtgggatggtcctacaatgatttcgttctgtaacggtgacaaacttggcgcgcttacagatagaaatggattacgtccaggtcgttatacgattactaaagataactttattgtcttttcatctgaagtgggtgttgtggacgtacctgaaagtaatgttgcttttaaaggtcaattgaatcctggaaagttattgcttgttgattttaaacagaataaagtcattgaaaataatgatttaaaaggtgcgattgctggagaattaccatataaagcttggattgataaccataaagttgattttgattttgaaaatatacagtatcaagattcgcaatggaaagatgaaacgttatttaaattacaacgtcaatttgcatacacgaaagaagagattcataagtatattcaggaacttgtagaaggtaagaaggatcctatcggtgcaatgggatatgatgcgccaattgcagtgttgaacgagcgaccagaatcactatttaattactttaaacagttgtttgcacaagttacgaatccaccaattgatgcgtatcgtgaaaaaatcgtaacgagtgaactttcttatttaggtggcgaaggtaacttattagcacctgacgaaacggttttagatcgaattcaattgaagagaccggtattgaatgaatcacacttagcagcgattgatcaggagcattttaaattaacatatttatcaacggtatatgaaggggatttggaagatgcgttagaagcattaggccgagaagcagtggatgctgtaaagcaaggcgctcaaattctagtgttagatgatagtggattagttgatggcaatggctttgcaatgccgatgttactcgcaataagtcatgtgcatcaattacttattaaagcagatttacgtatgtctacaagtttagtcgctaaatctggtgagacacgagaagtgcatcatgttgcttgtttactagcatatggcgcgaatgcaattgtgccatacctagcgcaacgtacagttgaacaactgacattgacagaagggttacaaggcaccgttgtcgataatgttaagacatatacggatgtattgtcggaaggtgtcattaaagtaatggcgaagatgggaatttcgacagtgcaaagttatcaaggtgcacaaatatttgaagcgattggcttgtctcatgatgtgattgatcgttattttactggaacacagtctaagttatctggtatttcgattgatcaaatcgatgctgaaaataaagcacgtcaacaaagtgatgataattatcttgcatcaggtagtacattccaatggagacaacaaggtcaacatcatgcttttaatccggaatctattttcttattgcagcacgcatgtaaagaaaatgactatgcgcaatttaaagcatactctgaagcggtgaacaaaaatagaacagatcacattagacatttacttgaatttaaagcatgtacaccgattgacatcgaccaagttgaaccggtaagtgacattgtcaaacgttttaatacaggggcgatgagttatggatcgatttcagcggaagcacatgaaacgttagcacaagccatgaaccaattaggtggaaagagtaatagtggtgaaggtggcgaagatgcaaaacgttatgaagtacaagttgatggaagcaacaaagtaagtgcgattaaacaagtcgcttctgggcgttttggtgtaactagtgattatttacaacatgccaaagaaattcaaattaaagttgcgcaaggtgcaaagcctggtgaaggtggtcaattacctggtactaaggtatatccgtggattgcgaagacaagagggtcaacgccaggtatcggtctgatttcaccaccgccacatcatgatatttattcaatagaagatttagcgcaactgatacatgatttgaaaaatgcgaataaagatgcagatatcgcggtaaaattagtttcgaaaacaggtgttggtaccattgcgtctggggtggcaaaagcatttgcagataaaattgtcatcagtggttacgatggtggtacaggggcttcacctaaaacgagtattcagcatgccggtgttccttgggagattggtttagcagaaacacatcaaacattaaaactaaatgacttaagaagtcgtgttaagttagaaacagacggtaagttattaactggtaaagatgtagcgtacgcatgtgcgcttggagcggaagaatttggatttgcaactgcaccattagtggtgttgggctgtattatgatgcgtgtatgccataaagatacatgtccagtaggagttgcaactcaaaacaaagatttacgtgctttatatagaggtaaagcacatcatgttgttaattttatgcattttattgcacaagaattaagagaaattttagcatctttaggtttgaaacgtgtagaagacttagttggaagaactgatttattacaacgatcatcaacattaaaagcgaatagcaaagcggctagtattgatgttgaaaaactgttatgtcctttcgatgggccaaacacaaaagaaattcaacaaaatcataatcttgagcatggatttgatttaacaaatttatatgagataacgaagccatatattgctaaaggacgtcgctatacaggtagctttacagtaaataatgaacaacgtgatgtaggggttattacaggtagtgagatttcgaaacaatatggagaagcaggacttcctgaaaatacaattaatgtttatacgaatggtcatgctggccaaagtcttgcagcatatgcaccgaaaggcttaatgattcatcatactggagatgcgaatgactatgttggtaaaggattatctggtggtacggtcattgtcaaagcaccttttgaagaacgacaaaatgaaattattgctggtaacgtctcattctatggtgcgacaggtggtaaggcatttattaacggtagtgcaggagaaagattctgtattagaaatagtggtgtagatgttgtcgttgaaggtatcggcgaccatggattagagtacatgactggtggacatgtcattaatttaggtgatgtaggtaagaacttcggtcaaggtatgagtggtggtattgcttacgttatcccgtctgatgtagaagcttttgttgaaaataatcaactagatacgctttcgtttacaaagattaaacaccaagaagaaaaagcattcattaagcaaatgctggaagaacatgtgtcacatacgaatagtacgagagcgattcatgtgttaaaacactttgatcgcattgaagatgtcgtcgttaaagttattcctaaagattatcaattaatgatgcaaaaaattcatttgcacaaatcattacatgacaatgaagatgaagcgatgttagctgcattttacgatgacagcaaaacaatcgacgctaaacataaaccagccgttgtgtattaa

SEQ ID NO: 8065 - DNA, 1464 bp, Staphylococcus aureus
  CDS (1)...(1464)
atgggtgaatttaaaggatttatgaagtatgacaaacagtacttaggtgaattatcactggtagaccgtttgaagcatcataaagcatatcaacaacgatttactaaagaagatgcctctatccaaggtgcacgatgtatggattgtggaacgccgttttgtcaaaccggacaacagtatggtagggaaacaataggttgtccaattggaaactacattcctgaatggaacgacttagtgtatcatcaagattttaaaactgcttatgaacgcttaagcgaaacaaataactttcctgactttacagggcgtgtatgtcctgcaccatgtgaaagtgcttgtgtgatgaagattaatagagaatcgattgcgattaaaggtattgaacgcacaattattgatgaagcttttgaaaatggttgggtagcgccgaaagttccgagtcgccgtagagatgaaaaagtggcaatcgttggaagcggtccagcaggattaactgctgctgaagaacttaatctactaggatatcaagtaactatttatgaacgtgctagagaatcaggcggtttattaatgtatggtattccgaatatgaaacttgataaagatgtggttcgacgtcgtattaagttaatggaagaagcgggcattactttcattaatggtgttgaagtaggcgttgatattgataaagcaacgttagaatctgagtatgatgccattatattatgtactggtgcacaaaaaggtagagatttacctttagaaggacgcatgggtgatggtatacatttcgctatggattatttaactgaacaaacgcaactgttaaatggagaaattgatgatataacaataactgcaaaagataagaatgtcattatcattggtgctggtgatacaggggcagactgtgtagcgacagcattaagagaaaattgtaaatcgattgttcaatttaataaatatacgaaattgccagaagcaattacgtttacagaaaatgcatcatggcctttagcaatgccggtgtttaaaatggactatgcgcaccaagagtacgaagctaagtttggtaaggaaccacgtgcatatggtgttcaaacaatgcgttacgatgttgacgataaaggacacatacgtggtttgtatactcaaattttagagcaaggcgaaaatggtatggtcatgaaagaaggacctgaaagattttggcctgctgaccttgtattattatcaatcggcttcgaaggtacagaaccaacagtaccgaatgcttttaacattaaaacggatagaaatcgaatcgtggcggatgatacaaactatcaaactaataatgaaaaggtatttgctgctggagatgctagacgtggtcaaagtttagttgtatgggcaattaaagaaggtagaggcgtagcgaaagcagtagatcagtatttagcgagtaaagtttgtgtataa

SEQ ID NO: 8066 - DNA, 729 bp, Staphylococcus aureus
  CDS (1)...(729)
atggtgaagcaaaagaagtttatgaagatttatgaggcgttgaaagaagatatattaaacgggcagattcaatatggtgaacaaattccgtctgaacatgatttggtgcaattgtaccagtcatctcgagagaccgtgcgtaaggcattagatttgttggcattagacggtatgattcaaaagattcatggtaaagggtcacttgtcatttatcaggaggttacagagtttccattttctgaacttgttagttttaaagaaatacaagaagaaatgggtgtcgcatatttaactgaagttgttgtgaatgaggttgttgaagcgcatgaagttccagaagttcaacatgctttaaacatcaattctagtgaatcactcattcatattgttagaactcgtcggcttaaccaacatgtgaagattgttgatgaagattattttctaaagtcgattgtttcagatataggtaatgatgttgcgagtgattctatttatgattatttggaaaaggtattaaatcttaatattagttattcaagtaagtctattacttttgaaccgtttgatgaacaagcatatcaattgtttggggatgtatcggtggcttattcagcaacagttcgaagtattgtgtatttagaaaatacaatgccgtttcaatataatatttcaaaacatcttgcaaatgaatttaaatttaatgacttctcaagacgtcgtacaaagtaa

SEQ ID NO: 8067 - DNA, 1674 bp, Staphylococcus aureus
  CDS (1)...(1674)
atgtacagaccccaaagtttcgaggatgtcgtcggacaagaacatgtcacgaagacattgcgcaatgcgatttcgaaagaaaaacagtcgcatgcatatatttttagtggtccgagaggtacgggaaaaacgagtattgccaaagtgtttgctaaagcaatcaactgtttaaatagcactgatggagaaccttgtaatgaatgtcatatttgtaaaggcattacgcaggggactaattcagatgtgatagaaattgatgctgctagtaataatggcgttgatgaaataagaaatattagagacaaagttaaatatgcaccaagtgaatcgaaatataaagtttatattatagatgaggtgcacatgctaacaacaggtgcttttaatgcccttttaaagacgttagaagaacctccagcacacgctatttttatattggcaacgacagaaccacataaaattcctccaacaatcatttctagggcacaacgttttgattttaaagcaattagcctagatcaaattgttgaacgtttaaaatttgtagcagatgcacaacaaattgaatgtgaagatgaagccttggcatttatcgctaaagcgtctgaagggggtatgcgtgatgcattaagtattatggatcaggctattgctttcggcgatggtacattgacattacaagatgccctaaatgttacgggtagcgttcatgatgaagcgttggatcacttgtttgatgatattgtacaaggtgatgtacaagcatcttttaaaaaatatcatcagtttataacagaaggtaaagaagtgaatcgcctaataaatgatatgatttattttgtcagagatacgattatgaataaaacatctgagaaagatactgagtatcgagccctgatgaacttagaattagatatgttatatcaaatgattgatcttattaatgatacattagtgtcgattcgttttagtgtgaatcaaaacgttcattttgaagtgttgttagtaaaattagctgagcagattaagggtcaaccacaagtgattgcgaatgtagctgaaccagcacaaattgcttcatcgccaaacacagatgtattgttgcaacgtatggaacagttagagcaagaactaaaaacactaaaagcacaaggagtgagcgtcgctcctactcaaaaatcttcgaaaaagcctgcgagaggcatacaaaaatctaaaaatgcattttcaatgcaacaaattgcaaaagtgctagataaagcgaataaggcagatatcaaattgttgaaagatcattggcaagaagtgattgatcatgccaaaaacaatgataaaaaatcactcgttagtttattgcaaaattcggaacctgtggcggcaagtgaagatcacgtacttgtaaaatttgaggaagagatccattgtgaaatcgtcaataaagacgacgagaaacgtagtagtatagaaagtgttgtatgtaatatcgttaataaaaacgttaaagttgttggtgtaccatcagatcaatggcaaagagttcgaacggagtatttacaaaatcgtaaaaacgaaggcgatgatatgccaaagcaacaagtacaacaaacagatattgctcaaaaagcaaaagatcttttcggtgaagaaactgtacatgtgatagatgaagagtga

SEQ ID NO: 8068 - DNA, 318 bp, Staphylococcus aureus
  CDS (1)...(318)
atgcgcggtggcggaaacatgcaacaaatgatgaaacaaatgcaaaaaatgcaaaagaaaatggctcaagaacaagaaaaacttaaagaagagcgtattgtaggaacagctggcggtggcatggttgcagttactgtaactggtcataaagaagttgtcgacgttgaaatcaaagaagaagctgtagacccagatgatattgaaatgctacaagacttagtgttagcagctactaatgaagcgatgaataaagctgatgagcttactcaagaacgtttaggtaaacatactcaaggcttaaacatccctggaatgtga

SEQ ID NO: 8069 - DNA, 597 bp, Staphylococcus aureus
  CDS (1)...(597)
atgcattatccagaacctatatcaaagcttattgatagctttatgaaattgccaggcattggtccaaagacagcccaacgtctggcttttcataccttagatatgaaagaagacgatgttgttcagtttgccaaagcattagtagatgttaagagagaattaacatattgtagcgtatgtggtcacattactgaaaatgatccatgttatatttgtgaagataagcaaagagatcgttcagttatttgtgttgtggaagatgacaaagatgtcatagctatggaaaaaatgagagaatacaaaggtttatatcacgttttacatgggtctatttcgcctatggatggaattggaccagaagatattaatattccttcattgattgaacgcttgaaaaacgatgaagttagcgaattaatcttagctatgaacccgaacttagagggggaatctacagccatgtatatttctagattagttaagcctataggtatcaaagtgacgagattagcacaagggttatcggtaggtggcgatttagagtatgctgacgaagtaacattatctaaagcaatcgcaggtagaacagaaatgtaa

SEQ ID NO: 8070 - DNA, 660 bp, Staphylococcus aureus
  CDS (1)...(660)
atgtttggttctgatttagacagtgcacagttattacaagcattatacgaaacgctatatatggtatctattgctttatttttaggagcagtgattggtattccattaggtgtcttattggtaattactcgaaaacaaggcatatggcccaatatagtgatacatcaagttttaaatcctttaatcaatattttaaggtcactaccatttattattttgttaattgcgattgtgccattcacaaaattagtagtaggtacttcaattggtacgactgctgccatcgtgcctttaacagtatatgtggcaccttacattgcaagacttgttgaaaactcattattagaagtagacgaggggattattgaagcggcgaaagcgatgggcgcttcaccactacaaatcattagatattttttaattcctgaagcgttaggttcattagtattagcaattaccactgcgattattggacttattggaagtacggcgatggcaggagctgttggcggtggtggtataggagacttagctttagtgtatggttatcaaagatttgatacgacggtcattattattaccgttattgtattagtcattattgtccaagtgattcaaacgctagggaatgtcctagctagattcatacgtagacattaa

SEQ ID NO: 8071 - DNA, 405 bp, Staphylococcus aureus
  CDS (1)...(405)
gtgtcaaagatgattaaatgtgtctgtttagttgaagaaacagctgataaaatattgcttgttcaagtaaggaatcgcgaaaagtattatttcccaggtggtaaaatagaagaaggggaatcacaagtacacgcgctgttaagagaagtaaaagaagaattaaatttaacattaacaatggatgaaattgaatatatcgggacaattgtaggtcctgcatatccacaacaggatatgttaactgagttaaatggatttcgcgcattaaccaaaatcgattgggaaaacgtaactatcaataatgaaattacggatatacgctggattgataaagataatgatgcgttgattgcgcctgctgtcaaagtttggattgaaacgtatggtggtaaacatgacaaataa

SEQ ID NO: 8072 - DNA, 846 bp, Staphylococcus aureus
  CDS (1)...(846)
atgaaaagtgaggatgtcattgtgaaggagaaacatattaaatgggataaaatattttatggggacgactgggtaaataacgtagtcgaaacgataagaacgaaagatatattacaaagcgtttatttaaaacgttatttattacgcgctatgatggcaggatttattatcggtattattacggtcttcgtgctatcagttaaagcaacacacgaaccagatttaccaccaggtatagtgaatatggccagcgccattacattcagctttgcgttagtactcattttatttacaaactccgaactactaactagtaacttcatgtactttactgtaggcctgtattataaagtaattaaaccaactagagtattgaaaatatttttattatgctttgcaggaaatattttaggtgctgctattttatttagtttcatgcgtttttcaaatgtaatgacgccagatatgttaaatcaattatcagcagttatagaacataaaacgttgtctactgggtttgtaagtatattaatgaaagcgatattcgccaacttttttattaatatttcattagttatcgccatgcaaattgacgatgtacttgcaaaaatgtttgtcatgatgttcggtgttaccatattcgcctttatgggttatgaacatgtcgtttacaacagttgcttgtttatgggaggcttaatttatcaagttgatacattgcacttcattcctgctatttcaaatattgctgccgcttttatcggtaactatatcggaggcggactcattataggtttattctatgcttacttgaatgatcatcatcaattttataaaaataattaa

SEQ ID NO: 8073 - DNA, 1278 bp, Staphylococcus aureus
  CDS (1)...(1278)
atgttattttcactattttttggagccggaaatttaatattcccgcccatgcttggccatacagcgggtcaaaatatgtggattggtatgctaggctttgcccttacaggcatattactcccctttattactgttattgttgttgcattttatgatgaaggtgttgaaagtgtaggcaatcgtatacatccatggttcgggtttatttttgctgtcgtgatttacatgtctatcggagcattttacggtattccacgtgctgcaaatgtcgcgtacgaaattggtacaagacacattttacctgtgcacaaccaatggactttaattatattcgcagcagtcttttttgccatcgtttactggattagtttaaatccatcgaaaatcgttgataatttaggtaaattattaacaccgttattactattaatggtcgctctattaagtattgctgtcattttcaaccctgaatctgcactaagtgcacctaaggataaatatataacacatcctttcatttcaggaagtttggaaggctattttacaatggaccttgttgctgcgttagctttttccgtagtcattgtcaatggctataagtttaaaggcctcacagatcgcacgaaaatattaaagtatgtctgcttttcaggatttattgcagctatattacttggtatgatttactttgcgttggcatatgtaggtgcgtcaacagctccaggaaactttaaagatggtactgatatattgacatacaattcattacgcgtatttggttcgttcggtaacctcgtatttggaatgacggttattcttgcatgcctaacaacatgtataggactcgtcaacgcttgtgcaacatttactaagaaacacgtgcctaagttttcttataaaatattcgcacttgttttctctatcataggatttttatttacaacacttggtttagaaatgattttaaaaattgctgtaccattgttgacattaatatatcccgtgtctattgcacttgtactgatatcatttgctaacatgtttagcacattcagattcagttgggcctatcgactcgcaactgttattacattgattatttcaattttacaaatactaaatagtttcaacttattacacggtgttattttgaaatggtttatgatgttacctttagcagatatcgatttagcttggcttgtaccattcattcttttggcaatcataggtttcatcatcgatgtagttatacgccgtccgaaacaagcgacaacttaa

SEQ ID NO: 8074 - DNA, 924 bp, Staphylococcus aureus
  CDS (1)...(924)
atggcaaatttacaaaagtatattgagtattctcgagaagttcagcaagcacgggagaacaatcaaccgattgtagcattagaatcaacaattatttcgcatggtatgccgtacccacaaaatgttgaaatggcaacaacggtagagcaaattatcagaaataatggtgccattccagcaaccatagccattatagagggcaaaattaaaattggtttagaaagtgaagatttagaaatacttgcaactaataaagacgttgctaaagtgtctagaagggatttagcagaaattgttgcgatgaagcgtattggtgctactactgtagcgacgacgatgatatgtgctgcaatggctggtattcaattttttgttactggaggtattgggggtgtccataaaggtgcagaacatacgatggacatttcagcagacttagaagaactgtctaaaacaaatgtcactgttatctgtgcaggtgccaaatcaattttagacttacctaagacaatggagtatttagaaacaaaaggcgttccagttattggatatcaaacgaatgaattgccagcattcttcactcgcgaaagcggtgttaagttaacaagttcggttgaaacgccagaacgacttgctgacattcatttaacaaaacagcagttaaatcttgaaggtggcattgttgttgctaatcccattccatatgagcatgccttatcaaaagcatatattgaggcaatcataaatgaagctgttgttgaagccgaaaatcaaggtattaaaggtaaggacgccacaccgttcttgttagggaaaattgtagaaaaaacgaatggtaaaagtttagcagcaaatataaaacttgttgaaaacaatgcggcgttgggtgctaaaattgctgtcgctgttaataaattaatgtag

SEQ ID NO: 8075 - DNA, 903 bp, Staphylococcus aureus
  CDS (1)...(903)
atgaaaatatttttcaaaatcaatagaaatggagtgagtaaggtgtattacatcgcaattgatattggaggtactcaaattaaatcggcagttattgataagcaattgaatatgtttgactatcaacaaataccaacgccggacaataaaagtgagcttattactgacaaagtatatgagattgtaacaggatatatgaagcaatatcagttaatccaacctgtcataggtatttcatcagcaggcgttgttgatgaacaaaaaggcgaaattgtatacgcagggccaaccattccgaattataaaggtactaattttaagcgattattaaaatccctgtctccttatgtcaaagtaaaaaatgatgtaaacgctgcattactaggcgaattgaaattacatcaatatcaagcagaacggatcttttgtatgacgcttggtacaggcattgggggtgcgtacaaaaataatcaaggccatattgataatggtgaacttcataaggcaaatgaagttgggtatttattgtatcgtccaactgaaaatacaacgtttgagcaacgtgctgcaacgagtgcattgaaaaagcgcatgattgacggagggtttacaagaagcacacatgtgccagtattgtttgaagcagctgaagaaggtgatgatattgcaaaacaaatattaaatgagtgggcagaagatgtagcagaagggattgcccaaatacaagtcatgtatgatccagggcttatattaattggtggcggtatatctgaacaaggagacaacctcattaaatatatcgagccgaaagttgcacactatttaccaaaagactatgtttatgcaccgatacaaacgactaagagtaaaaatgatgcagcattatatggctgtttgcaatga

SEQ ID NO: 8076 - DNA, 801 bp, Staphylococcus aureus
  CDS (1)...(801)
atgaaatttgagaatcgtgttcaacgttatcaacatttatttacaaaaactgataaacgcatcgtcaattatataagacaaaatggttatagcgatgccttttcaacgattaactccttagcccatgcgattggtacatcaccagcaacgatgacacgctttagtcataagctggattatgagaatttccaagatttaaaatttaatattcaacaagaaatgacagagacagttattgaaaatagcccaatcattcaaagaattcataaatatcatcaacaaatcattcaacaaactggtgaatttattgataacgacattatccaaacctttatcgacaaacttcaatcaagtcgacatatactctttgctggactaggtagctctggtttatcagcgactgaattttattatcgtatgattcgtatggggctaaaaggtaatgttactaccgattcacatttaatgaaaatatcggcatctctactatctcattcggacatgtttattgctatgtcaaatagtggtaatacttcggaattaatttcagcagcggaagtcgccaaatctcatggtgcatatgtcgttgccatcacaaatttcgaaggtagtaaacttacagattgtgcagatttagtacttttaacaacggatcaatcgcgtaataccgaccatcaatttatcaacacacaaattgcgacactctttttaatcgatatcgtgagttatcatttattagaaaatacaaatctgagtcaaacttatcaacatactaaatctattatcctagacaacaaataa

SEQ ID NO: 8077 - DNA, 1386 bp, Staphylococcus aureus
  CDS (1)...(1386)
atgattcatctcattaaggggaagatgcatcatacagttttgtgtattcatttaaacaaaggggttgctttaatgaatcaatatcattctaatgcacaacaaccaagtgcatggcgtttttttgtctatagtttagtgggcatactatgtttctttattccttttacgattaatggtaacaacactattttcgtcgatcatgttcatctagccattcgctcaatcataggtccacttatgccctatgttgcactgattatgattttaattggtacagcgttaccaatagtgagacgtacttttatgacttcaatcacaaacttggtcattacattatttaaagttgcaggtgcaataatcggtataatgtatgtatttaaaatcggtccatcaatactatttaaagctaactatggtccgtttttgtttgaaaaattaatgatgccattaagtatcttaattccagtaggtgcaattgcgctttctttattagtgggctatggcttattagaatttgtcggtgtttatatggagcctattatgagacctatttttaaaacaccaggaaaatccgctgtcgatgcagtggcttcgtttgtcggcagttattccttaggattattgattactaatcgtgtctataagcaagggatgtacaacaaaagagaagccacgattattgcgactggcttttcaacagtttcagcaacttttatgattatcgttgctaaaactttagggctaatgccgcattggaatttatacttttggataactttagtcatcacatttgtcgtgactgcaattactgcatggctaccgccaatcaccaatgaatcaacagaatattataacggacaagaaggagaacaagaagttgctattgaaggaagcagactgaaaactgcatatgcagaggcgatgaaacaaaatgcattaacaccatccctcgtgaagaacgtttgggacaatttgaaagacggtttagaaatgactgttggtattttaccttctatattatcgattggttttttagggctgattgtagcgaactatacaccattcattgattggcttggctatatattctatccatttatttatattttcccaattgctgatcaggctgtacttgcaaaagcttcagcgatttctattgtagaaatgtttctaccatctttgttagtaactaaagctgcaatgagtactaaatttgtcgtcggtgtagtaagcgtatcagccattatctttttctcagcattagtgccatgtatactagcaactgaaattaaaatacctgtctggaaactcatcatcatttggtttttacgcgtggcattgtcgctattaatcactatccccgtcgctttactcatttttggataa

SEQ ID NO: 8078 - DNA, 612 bp, Staphylococcus aureus
  CDS (1)...(612)
atggctaaagaaattgcaaaatcattattagatattgaagctgtaacattatcaccaaatgatttatatacatggagttcaggtattaaatcaccgatttactgtgataaccgtgttacgttaggttatcctttagttcgaggcgcaatccgcgatggtttaattaacttaattaaagaacactttcctggagtagaagttatttctggtactgcaacagctggtattccacatgcagcttttattgctgaaaaattaaaattaccaatgaattatgttcgttcatcaaataagagtcatggtaagcaaaatcaaattgaaggtgctaaaagtgaaggtaaaaaagtagttgtgatagaagatttaatttcgacagggggatcttcagtcacagcagttgaagccttaaaacaagcaggtgcagaagtattaggtgttgtagctatctttacttacggtttgaaaaaagcagatgatacatttagcaatattcaactacctttttacactttaagtgattataatgaattaattgaagtggctgaaaatgaaggtaaaatttctagtgaagatatccaaacattagttgaatggagagacaacttagcataa

SEQ ID NO: 8079 - DNA, 1698 bp, Staphylococcus aureus
  CDS (1)...(1698)
atggcttatgatggcttatttacaaagaaaatggttgagtctctacaatttttaacaacaggacgcgttcacaaaatcaatcaacctgataatgacacgatactaatggttgtacgtcaaaatagacaaaaccatcaattgttattgtcaatccatccaaacttttcaagattacaattgactactaaaaaatatgataatccatttaatccacccatgtttgcgcgtgtttttagaaaacacttagaaggtggtattatcgaatcgattaagcaaattggtaatgatcgtcgcattgaaatcgatataaagagtaaagatgaaattggcgatactatttaccgcactgtcatccttgagattatgggtaaacatagtaacttaattttagtagatgaaaatcgtaaaataattgaaggatttaaacacttaacaccaaatacgaatcactatcgtacagtaatgccaggttttaattatgaagcaccacctactcagcacaaaatgaatccgtatgatattacaggtgcagaggtgttgaaatatatcgattttaacgcaggtaatattgctaaacaattattgaatcagtttgaaggatttagccctttaattacgaatgaaatcgttaatcgtcgtcaatttatgacttcatcaacattaccagaagcattcgacgaagtaatggcagaaaccaagttaacacctactcctatttttcataaaaatcatgaaacaggtaaagaggatttctattttataaagttaaatcaatttaatgatgatacagttacgtacgattcattaaatgatttacttgatcgtttttatgatgcgcgtggcgaacgtgaacgcgttaaacaacgtgcgaatgatttagttcgatttgttcaacagcagttgcacaaatatcaaaataaattagcgaagctgattgaagaatatgagcagtctaaaaataaagatactgaacagttatatggtgaattgatcactgctaatatatatcgaattaagcaaggcgataaagaagtgacggcattaaattattatacgaatgaagaagttgtcattcctttaaatcctacaaaatccccatctgcaaatgctcaatattattataaacaatataatcgtatgaaaacgagagaacgtgaattacaacatcaaattcaattgacgaaagacaatatagattatttttcaacaatcgaacaacaattacatcatatttctgtccatgagattgatgaaattagagatgaattagcagaacaaggctttatgaaacagcgtaaaaatcaaactaagaaaaagaaagagcagattcaattacaacattatgtatcaactgatggcgacgatatatatgttggcaagaataacaagcaaaatgattatttaacaaataaaaaagctaaaaaaactcacacatggttacacacaaaagatattcctggttcacatgtcgttatatttaatgatgcaccaagtgatacgacaatcaaggaagcggctatgttagcaggatatttttcaaaagctggtaattctggacaaatacctgttgattacacgttaattaaaaatgtgcacaaaccatcaggggcaaagcctgggtttgtaacatatgacaatcaaaaaactttgtatgctacacctgattatgaacatattcaaaaaatgaaacaatcataa

SEQ ID NO: 8080 - DNA, 564 bp, Staphylococcus aureus
  CDS (1)...(564)
gtgagccacttggctttaaaagatttatttagtggattttttgtaatagatgatgaagaggaagtagaagtacctgacaaacaacaacaggtaaatgaagcgccagcaaaagagcagtcacaacaaacaacaaaacaaaacgcaatcaaatcagtccctcaaaaatctgcatcaagatatacaacaacgtcagaagaaaggaataaccgtatgtctaattattcaaaaaataattcacgtaatgttgtaactatgaacaatgctacaccaaacaatgcatcacaagaaagttcaaaaatgtgtttattcgaaccacgtgttttttcagatacacaagatattgctgatgagcttaaaaaccgccgtgcgacacttgtcaatttacaacgtattgataaagtatcagcgaaaagaattattgattttttaagcggtactgtttatgcaatcggtggagatatccaacgtgtaggtactgatattttcttatgtacgcctgataatgtggaagtagctggaagcattacagaccatattgaaaatatggaacattcattcgactaa

SEQ ID NO: 8081 - DNA, 1995 bp, Staphylococcus aureus
  CDS (1)...(1995)
atgataggtaaaataataaatgaacgatataaaattgtagataagcttggcggcggcggcatgagtaccgtttatcttgcagaagatacgatacttaacattaaagttgcaattaaggcgatttttataccacctagagaaaaagaagaaacattaaaacgttttgaacgcgaagtacataactcatcacagctatcacatcaaaatatagtaagtatgatcgatgttgatgaagaagatgactgttactacttagtaatggaatatattgaaggtccgactttgtctgagtatatagaaagtcatgggccattaagtgttgacacggcgattaattttacgaatcaaatattggatggcattaaacatgcgcatgatatgcgtattgtacatagagatattaagccacaaaatatattaattgacagcaataaaacgttgaaaatatttgattttggaattgctaaagctttaagtgagacgtctttaactcagactaatcatgtgttaggtactgtgcagtacttttcgccagaacaagcaaaaggtgaggcaacggatgaatgtacagatatttattctataggtattgtgttatatgaaatgcttgttggtgaaccaccatttaatggagaaactgcagttagcattgcgattaaacatattcaggattctgtgccaaatgtgacaacagatgtacgtaaggatattccgcaatctttaagtaatgtcattttacgcgctacagaaaaagacaaagcgaatcgttacaaaacgattcaagaaatgaaagatgatttgagtagtgttttacatgaaaatcgagcgaatgaagacgtctatgaactcgataaaatgaaaacgatagcggtacctttgaaaaaagaagatctagcaaagcatattagtgaacataagtcgaatcaacctaaacgtgaaacgacgcaagtacctattgtaaatgggcctgctcatcatcagcaattccaaaagccagaaggtatgttgtatgaaccaaaacctaaaaagaaatcaacacgaaagattgtgctcttatcactaatcttttcgttgttaatgattgcacttgtttcttttgtggcaatggcaatgtttggtaataaatacgaagagacacctgatgtaatcgggaaatctgtaaaagaagcagagcaaatattcaataaaaacaatctgaaattaggtaaaatttctagaagttatagtgataaatatcctgaaaatgaaattattaagacaactcctaatacaggtgaacgtgttgaacgtggtgacagtgttgatgttgttatatcaaaaggccctgaaaaggttaaaatgccaaatgtcattggtttacctaaggagcaagccttgcagaaattaaaatcgttaggtcttaaagatgttaagattgaaaaagtatataataatcaagcgccaaaaggatacattgcaaatcaaagtgtaaccgcaaatactgaaatcgctattcatgattctaatattaaactatatgaatctttaggcattaagcaagtttatgtagaagactttgaacataaatcctttagcaaagctaaaaaagccttagaagaaaaaggatttaaagttgaaagtaaagaagagtatagtgacgatattgatgagggtgatgtaatttctcaatctcctaaagggaaatcagtagatgaggggtcaacgatttcatttgttgtttctaaaggtgaaaaaagcgactcatcagatgtcaaaacgacaactgaatcggtagatgtaccatacactggtaaaaatgataagtcacaaaaagttaaagtttatattaaagataaagataatgacggttcaactgaaaaaggtagtttcgacattactagtgatcaacgtatagacattcctttaagaattgaaaaaggaaaaacagcaagttatattgttaaagtagacggtaaaactgtagctgaaaaagaagtcagctatgatgatatttaa

SEQ ID NO: 8082 - DNA, 618 bp, Staphylococcus aureus
  CDS (1)...(618)
atgccttttacaccaaatgaaattaagaataaagagttttcacgtgtaaagaatggtttagaacctactgaagttgctaattttttggagcaactaagcactgaaattgaacgtcttaaagaagataaaaaacaacttgaaaaagtaatcgaagagagagatactaatattaagtcttatcaagacgtgcatcaatctgtaagtgatgctttgatacaagctcaaaaagctggtgaagaaactaagcaagctgcagagaaacaagctgaagcgattatagctaaggcagaagcgcaagctaatcaaatggttggtgacgcggtagaaaaagcacgccgtttagcattccagactgaagatatgaaacgtcaatcaaaagtatttagatcgcgtttccgtatgttagttgaagcgcaattagacttattaaaaaacgaagattgggattacttgttgaattatgatttagacgctgaacaagtgacgcttgaaaatattcatcatttgcatgaaaatgatttaaagccagatgaagttgcagcaaatgcacaaaataatgcatcaaatacatcagataataatcaacaatccaatgattcagaaacaactaagaagtaa

SEQ ID NO: 8083 - DNA, 2763 bp, Staphylococcus aureus
  CDS (1)...(2763)
gtgaaaaaaatggattacaaagaaacgttattaatgcctaaaacagatttcccaatgcgaggtggtttaccaaacaaggaaccgcaaattcaagaaaaatgggatgcagaagatcaataccataaagcgttagaaaaaaataaaggtaacgaaacattcattttacatgatggcccaccatacgcgaatggtaacttacatatgggacatgccttgaacaaaattttaaaagactttattgtacgttataaaactatgcaagggttctatgcaccatacgtaccaggttgggatacacatggtttaccaattgaacaagcattaacgaaaaaaggtgttgaccgtaagaaaatgtcaacagctgaattccgtgagaaatgtaaagaatttgctttagaacaaattgaattacagaaaaaagattttagacgtttaggtgtgcgtggtgactttaatgatccatatattacattaaaacctgaatacgaagctgcacaaattcgtatttttggagaaatggcagataaaggtttaatttataaaggtaaaaagccagtttattggtctccttcaagtgagtcttcattagcagaagcagaaattgaatatcacgataaacgttcagcatcaatttacgttgcatttgacgttaaagatgacaaaggtgtcgttgatgcagatgctaaatttattatctggacaacaacgccatggacaattccatcaaatgttgcgattaccgttcatcctgaattaaaatatggtcaatacaatgtaaatggcgaaaaatatattattgcagaagccttatctgacgctgtagcagaagcactggattgggataaagcatcaatcaaattagaaaaagaatacacaggtaaagaattggagtatgttgtagcacaacatccattcttagatagagaatcgttagtgattaatggtgatcatgttactacagatgctggtacaggttgtgtacatacagcaccaggtcacggggaagatgactatattgttggtcaaaaatatgaattaccagtaattagtccaatcgatgataaaggtgtatttactgaagaaggcggccaatttgaaggaatgttctatgataaagctaataaagccgttactgatttattaacagaaaaaggtgcactattaaaattagactttattacacatagctatccacacgactggagaacaaaaaaacctgtaatcttccgtgctacaccacaatggtttgcctcaatcagtaaagtaagacaagatattttagatgcaatcgaaaatacaaacttcaaagtaaattggggtaaaacacgtatttacaatatggttcgtgaccgtggcgaatgggttatttctcgtcaacgtgtttggggtgtaccgttaccagtattttatgctgaaaatggcgaaattatcatgacgaaagaaacagtgaatcatgttgctgatttatttgcagaacacggttcaaatatttggtttgaaagagaagcgatagacttactaccagaaggatttacacatccaggcagccctaacggtacatttactaaagaaacagacatcatggacgtttggtttgattctggttcatcacaccgtggcgtgctggaaacaagaccggaattaagtttcccagcagatatgtatttagaaggtagtgaccaatatcgtggttggttcaactcttctattacaacttcagttgctacaagaggagtatcaccttataaattcttactttctcatggttttgttatggacggtgaaggtaagaaaatgagtaaatctttaggtaatgtgattgtacctgaccaagtggttaaacaaaaaggtgctgatattgcgagactttgggtaagtagtacggactatttagctgatgttagaatttctgatgaaattttaaaacaaacatctgatgtttatcgtaaaatcagaaatacattaagatttatgttaggtaatattaatgatttcaatcctgatacagatagcattcctgaatcagagttattagaagttgatcgttacttgctaaatcgtttacgtgaatttactgcaagtacgattaacaactatgaaaactttgactacttaaatatttatcaagaagttcaaaactttatcaatgttgaattaagtaatttctatttggattacggtaaagatattttatatattgaacaacgtgattctcatatccgtcgtagtatgcaaacagtgttatatcaaattttagttgatatgacgaagttgttagcaccaatcttagtgcatacagctgaagaagtttggtctcatacaccacatgttaaagaagaaagtgttcacttagcagacatgcctaaagttgtagaagtagatcaagctttattggataaatggcgtacatttatgaatttacgtgatgatgtgaaccgtgcattagaaactgctcgtaatgaaaaagttattggtaaatcattagaagccaaagttacgattgctagtaacgataaatttaatgcatctgaattcttaacttcatttgatgcattacatcaattatttatcgtgtcacaagttaaagttgtagataagttagatgatcaggcaacagcttatgaacatggtgatattgtcatcgaacatgcagatggtgaaaaatgtgaaagatgttggaactattcagaggatcttggtgctgttgatgaattgacgcatctatgtccacgatgccaacaagttgtaaaatcacttgtataa

SEQ ID NO: 8084 - DNA, 918 bp, Staphylococcus aureus
  CDS (1)...(918)
atggagacttatgaatttaacattacagataaagaacaaacaggtatgcgtgtagataagttgctgcctgaattaaatagtgattggtctcgtaaccagatacaagattggattaaagcaggtttagtcgttgcaaacgataaagttgttaaatctaattataaagtgaaacttaatgatcatatagttgtcactgaaaaagaagtggttgaagctgacattctacctgaaaatttaaatttagatatttattatgaagatgatgacgttgcagttgtatataaaccgaaaggcatggtagttcatccatcaccaggtcattataccaatacattagttaatggtttaatgtatcaaattaaagatttatcgggtattaatggagaaattcgtccaggtattgttcaccgtatagatatggatacttctggtttattaatggttgctaaaaatgatattgctcatcgtgggcttgtagaacaattaatggataaatctgttaaaagaaaatatatcgctttagttcacgggaatattcctcatgattacggtacaatcgatgcgccaattggtagaaacaaaaatgatcgtcaatctatggctgttgttgatgatggtaaggaagcagtgacacattttaacgtactagaacattttaaagattatacgcttgttgaatgtcaacttgaaacaggacgtacgcatcaaatccgtgtgcacatgaaatatattggcttcccattagttggtgatccaaagtatggaccgaaaaagacattggatattggtggtcaagctctacatgctggacttattggattcgaacatccagtaacaggtgaatatattgaaagacatgctgaaataccacaagactttgaagatttattagatacaattcgaaaaagagatgcataa

SEQ ID NO: 8085 - DNA, 615 bp, Staphylococcus aureus
  CDS (1)...(615)
gtggcaaacccgattaaaattggtattggtggtcctgtaggtgcaggtaaaacacaattaattgaaaaagttgtaaaacgtctttcaaaagaaatgagtatcggcgttattacaaatgatatatatacaaaagaagacgaaaagatattagtaaattcaggagttctacctgaaagtcgtatcattggtgttgaaactggtggatgtcctcatactgcgattcgtgaagatgcatctatgaactttgcagcaatagacgaattattagaacgtcatgacgatatagaactaattttcatagaatctggtggcgataacttagcagcaacatttagtccagaacttgttgacttttcaatttatattatcgatgttgctcaaggtgaaaagattccacgtaaaggtggtcaaggtatgattaagtcagatttctttgtaattaacaaaactgatttagctccctatgttggtgcatcattagaacaaatggctgaagatactaaagtatttcgtggtaaacgtccatttacttttactaacttaaaaaccgacgaaggtttggatgaagttatcgattggattgaacgcgacactttactcaaaggattatcataa

SEQ ID NO: 8086 - DNA, 411 bp, Staphylococcus aureus
  CDS (1)...(411)
atgataccaggagaaattattacaaaaagtacagaggttgaaattaataaccatcatcctgaaacagttatcgaagttgaaaatacaggagatcgaccaattcaagtgggctcacattttcatttttatgaagcaaatgcagcattagatttcgaacgcgaaatggcatatggaaaacatttagatattccagctggagcagctgttcgatttgaacctggggataaaaaagaagttcaattagttgaatatgctggcaaacgtaaaatttttggttttcgtggtatggtcaatggtcctatcgatgagtcacgtgtctatcgcccaactgatgaaaatgatgaatatgcaggtgtattcggagataacggtgatgaaaacgtgaataaaaaaggaggaaaaagatcatga

SEQ ID NO: 8087 - DNA, 270 bp, Staphylococcus aureus
  CDS (1)...(270)
atgattgtagtggcggcggaagttgcacgtcgtcgtaaagcacgtggtttgaaactaaatcatcctgaggcattagctttaatcagcgatgaattattagaaggtgcacgcgatggtaagaccgttgcagagttaatgagttatggtagacaaattctaaacaaagaagatgtcatggatggtgtcgaacacatgattacagatatcgaaatcgaggctacgttccccgatggcactaagttaatcacagtacatcaccctattgtttaa

SEQ ID NO: 8088 - DNA, 507 bp, Staphylococcus aureus
  CDS (1)...(507)
atgggcgaacatcaaaacgttaaattgaatcgtacagttaaagcagccgtactaacggtatcagatactagagactttgatacagataaaggtggtcaatgcgtgcgccaattgttacaagcagatgacgttgaagtgagtgacgcacattatacaattgtgaaagatgaaaaagtagccatcacgacgcaggtgaagaagtggttagaagaagatattgatgtcatcattacgactggtggaacgggtattgcacaacgtgatgtgacgattgaagcagtaaaaccacttttaactaaagagatagaaggctttggggaattgtttagatatttgagttatgttgaagatgttggcacgcgtgcattattgtctcgtgctgtagcaggtacagttaatgataaattgatattttcgattccaggatcaacaggcgcagttaaattagcattagaaaagctcattaaaccagaattaaatcatctgattcatgagcttacaaaataa

SEQ ID NO: 8089 - DNA, 1260 bp, Staphylococcus aureus
  CDS (1)...(1260)
atggtagtagaaaaaagaaacccaatcccagttaaagaagcaattcaacgtatcgttaatcagcagagttcaatgccggcaattacggtagcacttgaaaaaagtctaaatcatatcttagcagaagatattgtagctacttatgatataccaaggtttgataaatcaccttatgatggttttgcaattcgcagtgttgattcacaaggggcaagtggtcagaatcgcattgagtttaaagtgattgatcatattggtgcaggttcagtttctgataaattagttggggatcacgaagcggtgcgtattatgactggagcacaaatacctaatggcgcagatgctgttgttatgtttgaacaaacgattgaactagaagatatatttacaattcgtaaaccattttcaaaaaatgaaaatatatctttaaaaggtgaagaaacaacgacaggcgatgttgttctaaaaaaaggacaagtaattaatccaggtgctattgcggtccttgcaacatatggctatgcagaggttaaagttattaagcaaccaagcgtcgctgttattgcaacaggaagcgaattattagatgttaatgatgtattagaagatggaaaaattcgcaactctaatggtccaatgattcgtgccttagcagaaaaattaggtcttgaagttggtatttacaaaacacaacaagatgatttagatagtggtatacaagtcgttaaagaagctatggaaaaacatgatatcgttattacaacgggcggagtttctgttggagattttgactatttacctgagatttataaggctgtaaaggcggaagtgttatttaataaagtagcaatgcgtcctggtagcgtaacaacggttgcatttgcagatggaaaatatttgtttggattatctggaaatccatcagcttgttttacaggatttgaactatttgtgaaaccagctgttaaacatatgtgtggcgcactagaagtcttcccgcaaataattaaagcaacattaatggaagattttaccaaggcaaacccattcacacgatttatacgtgctaaagcaacgttaacaagtgctggagctactgtagtaccttcaggattcaataaatcaggtgcggttgtagcgattgcacatgctaactgtatggtcatgttaccaggagggtcacgtggttttaaagcgggtcatacagtagatattatattgactgaatctgacgctgctgaagaggaacttcttttatga

SEQ ID NO: 8090 - DNA, 1266 bp, Staphylococcus aureus
  CDS (1)...(1266)
atggaaaagatgcatatcactaatcaggaacatgacgcatttgttaaatctcacccaaatggagatttattacaattaacgaaatgggcagaaacaaagaaattaactggatggtacgcgcgaagaatcgctgtaggtcgtgacggtgaaattcagggtgttgcgcagttactttttaaaaaagtacctaaattaccttatacgctatgttatatttcacgtggttttgttgttgattatagtaataaagaggcgttaaatgcattgttagacagtgcaaaagaaattgctaaagctgagaaagcgtatgcaattaaaatcgatcctgatgttgaagtcgataaaggtacagatgctttgcaaaatttgaaagcgcttggttttaaacataaaggatttaaagaaggtttatcaaaagactacatccaaccacgtatgactatgattacaccaattgataaaaatgatgatgagttattaaatagttttgaacgccgaaatcgctcaaaagtgagattggcattaaaacgaggtacgactgtggaacgttctgatagagaaggtttaaaaacatttgctgaattaatgaaaatcactggggaacgcgatggcttcttaacgcgtgatattagttactttgaaaatatttatgatgcgttgcatgaagatggagatgctgaactatttttagtaaagttggatccaaaagaaaatatagcgaaagtaaatcaagaattgaatgaacttcatgccgaaattgctaaatggcagcagaagatggaaacatctgaaaagcaagctaaaaaagcgcaaaatatgattaatgatgcacaaaataaaattgctaaaaatgaagatttaaaacgagacctagaagctttagaaaaggaacatcctgaaggtatttatctttctggtgcactattaatgtttgctggctcaaaatcatattacttatatggtgcgtcttctaatgaatttagagattttttaccaaatcatcatatgcagtatacgatgatgaagtatgcacgtgaacatggtgcaacaacttacgatttcggtggtacagataatgatccagataaagactcagaacattatggcttatgggcatttaaaaaagtgtggggaacatacttaagtgaaaagattggtgaatttgattatgtattgaatcagccattgtaccaattaattgagcaagttaaaccgcgtttaacaaaagctaaaattaaaatatctcgtaaattaaaacgaaaatag

SEQ ID NO: 8091 - DNA, 3168 bp, Staphylococcus aureus
  CDS (1)...(3168)
gtgataaaaaaactattacaattttctttggggaataagtttgctatctttttaatggttgttttagttgtcttgggcggtgtatacgcgagtgctaaattgaaattagaattactaccaaatgtacaaaatccagttatttcagttacaacaacaatgccgggtgcaacgccacaaagtacccaagatgaaataagtagtaaaattgacaatcaagtaagatcgttggcatatgtgaaaaatgttaaaacgcaatccatacaaaatgcttcaattgtaacagttgaatatgaaaataatacagatatggataaagcagaagaacagcttaaaaaagaaatcgataaaattaaatttaaagatgaagttggtcaaccagaattaagacgtaattcgatggatgcttttccggttttagcatattcattttcaaataaagagaatgacttgaaaaaagtaacgaaagtactgaatgaacaattaataccaaaattacaaacggtagatggtgtgcaaaatgcgcaattaaatgggcagacgaaccgtgaaatcacccttaaatttaagcaaaatgaacttgaaaaatatggattgactgctgatgatgtagaaaactatctaaaaacggcaacaagaacaacaccacttggattgttccaatttggtgataaagataaatcaattgttgttgatggtcaatatcaatctgttgatgcttttaaaaacataaatattccattaacgttggcaggaggacaagggcaatctcaatcccaaagtgacaataaacaaaattcagccatgtcagatgttaatcaggcatcaccgcagcaaaattcaaaagcgtcagcatcaaataatataagtggtatgccgacagcgaaactaggagatttagctgatattacagttggtgatgtgcgtacttctatttcaaaaacgaatggcaaggatgcggttaatttacaaataactaaagctcaagatgccaatacagttcaagtagccaaagatgtacaacgtaaaattgatacattcgttgatgaaaataaagattttaatgtcacaaaaacaatggatactgcaaagcctgttgagaaatcactttatacgatggttgaaaaagcatcattaggtacaatcgtggcaattatagttattttgctgtttttaagaaacattcgtacgacggcaatttctattatatccattccgttatcacttcttatggcgcttattgctctgaaattgagtgatgtttcattgaatatactaacgttaggtgcattaacagtagcgattggacgtgtgatagacgattcgattgtagttgttgaaaatatttatcgacgcttaacagattcagaagaacaactaaaaggtgaaaatttaattatcagtgcgacaactgaagtatttaaaccaataatgtcatcgacactagttactattatcgtcttcttaccacttgtgtttgtatcaggttcagtaggcgaaatgtttagaccttttgcattggctattgcatttagtttattagcatcgttattagtgtcaattacactcgttccagcgttggcagctacactatttaaaaaaggcgttaaacgtcgtaataaacaacatcaagaaggattaggtgttgttagtacaacttataaaaaagtattgcattggtcactaaatcataagtggattgtaattatattaagtacattaattttggttgcaactattgtatttggaggaccgagactaggcactagctttatttcagcaggtgacgataaatttttagctattacttatacaccgaagcctggtgaaacggagcaagcagtgttgaatcatgcgcaagatgttgaaaaatatttaaaacagaaaaagcatgtaaaaacaattcaatactcagttggcggtagtagtccagtagatccaacgggtagtacaaatagtatggcaatcatggttgaatatgataatgacacgcctaattttgatgtagaagcggataaggttattaaacatgcagatggctttaaacatcctggagagtggaaaaatcaagatttaggaacaggtgcaggtaataaatctgtagaagttactgtaaaaggtccatcaatggatgccataaaatcaactgtaaaagatattgaacagaaaatgaaacaggttaaaggactagccaatgtcaaatctgatttatcgcaaacatatgatcagtatgaaattaaagttgatcaaaataaagcggcagaaaatggtatttctgcaagtcaacttgtaatgcacttgaatgaaaacttaccagaaaaaacagttacgactgttaaagaaaatggtaaaactgttggtgttaaagtcaaacaaaataagcaaacagactggtcagaagataagttgaataatataactttgaaaaagccgactggtggtacgattaaattgggagatatagctacgttagttaaaacaacgacaccaagtaaattgacgcaagaacaaggtgattatgcaacgacggtatctgctaaagtaacaaataaagatgtgggtggcacaacacgacaagtgatgtctaaaataaataatttggacaaaccgaataatgtaaaggttaatatcggtggtgcatcagatgatattaacaatgcaatgacacaattagcctttgcaatgttagctgcaatcattatcgtatatttaatcctagttattacatttaaaggtggcctagcaccatttacaattttattctctttaccatttacagttatcggtgtgattattgcactattaatcacaggagaaacaatatcagtaccaagtttaattggtatgctaatgttaattggaattgtagtaacaaatgccattgtgttaatagaccgtgtcattaataatgagcagcagggcatggagatgaaagaagcattaatcgaagcaggcggtactagaattagaccgatattaatgacggcgattgcaacaatcggtgcattagttcctttgttatttggtcaagatagctcgattcttatttcgaaaggattagctgctacagttattggtggtttaatttcatcaactttattaacacttgtagttgtaccagtaatatatgaaattctctttactttaaaaaaacgattcactaaacgatag

SEQ ID NO: 8092 - DNA, 2136 bp, Staphylococcus aureus
  CDS (1)...(2136)
atgaaatctttaatattagctgaaaaaccatcagtcgcaagagatattgctgatgctttacaaataaatcaaaagcgtaatggttactttgaaaataaccaatatattgtcacgtgggcgttaggtcatctagtgacaaatgcgacacctgaacaatacgataaaaatttaaaggaatggcgattagaagaccttccaattatacctaaatatatgaaaacggttgttattggtaaaacaagcaaacaatttaaaacagtaaaagcgttaattttagataataaagtgaaagatattattattgcaacagatgctggacgagaaggtgaactagttgcaagattgattttggataaagttggtaacaaaaagccactccgtcgattatggattagctcagttactaaaaaagctattcaacaaggttttaaaaatttaaaagacggtcgtcaatataacgatttgtattatgcagcgttagcgagaagtgaggtggattggattgttgggattaatgcaacgcgtgcactaacaacaaagtatgatgcacagctatccctgggacgtgttcagacaccaacgattcaattagtaaatacacgacaacaagagattaatcagttcaaaccacaacaatactatacattatcgttaacggtaaaagggtttgattttcagctagaatcaaatcagcgatataccaataaagaaactttagaacagatagttaataatttgaaaaatgtcgatggtaagattaaatctgttgctactaaacataagaagtcgtatccgcaatcactgtacaatttaacagatttacaacaagatatgtatagacgttataaaattggacctaaagaaacattgaatacacttcaaagtttatatgagagacataaagtcgtaacctatccaagaacagattcaaactatttaacaaccgatatggtagatactatgaaagaacgtattcaggcgacgatggcaacaacatataaagaccaagcacgcccattaatctctaaaacattttcatcaaaaatgtcgatatttaataatcaaaaagtatctgatcaccatgcaattattcctacagaagtgagacctgtcatgtcagacttaagtaatagagaattaaagttatacgatatgattgtcgagcgttttttagaaactttaatgcctccgcacgagtatgacgcgataactgtaactttagaggttgcagggcacacatttgttttgaaagagaatgtaacaactgtattaggctttaaatctattagacaaggtgaatctattacagagatgcaacagcctttttcagaaggcgatgaagtgaagatttcaaaaacaaacattagagaacatgaaacaacacctccagaatattttaatgaaggttcgttattaaaagcgatggagaaccctcagaactttattcaattgaaggataaaaaatatgcgcaaactttaaaacaaacaggtggtatcggcacagttgcaacaagggccgacattatcgataaattatttaatatgaatgccattgaatcaagagacggtaaaattaaagtaacgtcaaaaggtaaacaaatattagaattagcaccagaagaattaacgtcgccacttttaactgcacaatgggaagaaaaattacttttaattgaacgtggtaaatatcaggcgaaaaccttcattaatgaaatgaaagattttacgaaagatgttgtaaatgggattaaaaatagtgatcgtaaatataaacacgataatttaacaaccactgaatgcccaacatgtggtaaattcatgattaaagttaaaactaaaaatggtcagatgcttgtgtgccaagatccatcttgtaagacgaaaaagaatgtacagcgcaaaacaaatgcaagatgtccaaactgtaaaaagaaattaacgttgtttggtaaagggaaagaagcggtatatcgttgtgtttgtggacattctgaaacgcaagcacatatggatcagcgtatgaagtctaaatcctctggtaaagtatctcgtaaagaaatgaaaaagtatatgaataaaaatgaaggtttagacaataatccgtttaaagatgcattaaagaacttgaatttatag

SEQ ID NO: 8093 - DNA, 957 bp, Staphylococcus aureus
  CDS (1)...(957)
gtggtgggattgaaacgttcgtctaaaagtaaaatgagcctaccgaaaaaaatatttttatgggtattcggtattttagtaatcttagcgattgtagctgttgtgtatgtagctgctaaaatttttattactggtaataagatacacaatccgttagatcgcaatcattcagaattaagagataaaaaagtgagtttaaacgatggtgatccattcacaatcgctttatttggtgtcgattcagatgctgatcgtaagaaaaagggtggcggagagcgtagtgatagtattatgattttatctatcaaccctaaaacgaagaaaactgaaatagtaagtataccgcgtgatacaagagcggaaattgttggccgtggtactactgaaaaaattgcacatgcctatgcatatggtggaccaaatatggctgttaaatcacttgaaaaattaatgaatgtgccaattgatcattatgcgacaatcgatatggatggtttgcataatatgatagatagcatcggcggtgttgatgtagtaagtaatgatacattcactgttgatggtgttcgttttacaaaaggacagcaaacacatgtaaatggtgatcaagcattgaagtttattagaagtcgtaaagaagaaggtgctggtggtgactttggtcgacaacaacgtcagcaaattgtacttgaagcgatggctaataagattgcaagcccatcatcgattacacattttaatagtctaatgaatgaaattcaaaataatgttaaaacagatttaacattaggtgatttgaatacgattagaagcaattataaagatgctaatgacacaattaataaacatcaattgagtggtcaaggcggcattcaaagtgacggattgtactacttcattcctagtgagcagtcaaaagctgaaagtactaagttattaaaagataatctagagtag

SEQ ID NO: 8094 - DNA, 2964 bp, Staphylococcus aureus
  CDS (1)...(2964)
gtgaatagtatgcaagaacatttggtggtcacgcttgatggtaaagattatcttgtagaaccagatacaaatttacttgaattcattaaatcgcaagatacttttgtaccttcaatttgttataacgaatcaatgggaccaatacaaacgtgtgatacatgtactgttgagattgatggtaaaattgaacgttcatgtagtacagtgattgatcgtccaatgacagtaaatacagtgaataatgacgtgaaagatgctcaaaaagaagcgcttgatcgaattttagaaaagcatatgctgtattgtacagtatgtgattataataatggtgattgtgaaattcataatacgatggatgcatggggacttcagcatcaaacgtatgaatataaagagaagccatacgaaaaagattacggcccattttatcgttatgatccaaatcaatgtatcttatgtgggcgttgtgtagaagcatgtcaagatattgaagtaaatgaaacaattagaattgattgggatcgtgagcatccacgtgtcatttgggataatgatgtaccgattaatgaatcgtcatgtgtatcttgtggtcaatgcgcaactgtatgcccgtgtaatgcgatgatggaagttaacatggaaggtaatgcgggttatatgactgatacggaacctggttcattagcggcaatgattgatttaactaaaaaagcagaacctggttatggtccactatttgcaatctcagattcagaagcagaaatgcgtaaagagcgtattaagaaaactaaaacagtgtgtacatattgtggtgtgggctgttcatttgaagtttggactaaagatagagaaattttaaaagtacaaccatcacatgattctccagcaaataaaattgcgacttgtgttaaaggtaaattttcatggggacatattaattcagatcaacgcttaacgaaaccattagtaaggaaaaatggtgagttccatgaagtagaatgggatgaagcattaaatgtcattgcagataattttacatctattaaagaaaagtatggcccagatgcactatcattcatttcttcttctaaagcgacgaatgaagaatcgtatttaatgcaaaaattagcaagacaagttattggcactaataacgttgataactgttcaagatattgccaagcacctgcaacaaaaggcttatttagaacggttggacacggtggtgactcaggtagtattgaagatttagaaaaagcagcaatgtctgtattgattggtacgaatacagccgaagcgcatccggttattgcatcacgcatgaagcgtgctcaaaaattatttggacaaaaaatacatgtgtttgatattagaaaacatgaaatggctgaacgcgcagatcgtttttatcaaccgaaaccaggtacagatttggcttggttaagcgcagtgacgaaatatatcattgatcatgacttacacgataaagcctttatcgaagagtgggttgaagattttgatgaatattacaagtcattagaaacatttacaatggcattcgctgaagaggctactggtattccagaagcagagttgattaagttcgctgaagaatgtgccaaagcagagtccgttgtcatttgttgggcaatgggtatcacacaacaagacattggaagtgattcaagtacagcaatttcgaacttattattagttactggaaattatcgtagacctggtacaggtgcgtatccattacgtggacataataatgttcaaggttgtagtgatatgggtagtatgcctgataaaattactggctatcaaagtattgaagcggacgatattcgcgctaaattcgaaaaagaatatggcgttaaattgaatcctaaagttggtaaagataatcatgaaatggttgaaggtgtccatgatggggaaattcattcattatatctatatggagaagatactggtattgtagattcaaatattaattttgtacaagctgcttttgaaaaattagatttcatggtagtccaagatgaatttttaacatttacagctacatttgcagatgttgtcttaccagcaagtccttcattagaaaaagatggtacttttacgaatactgagcgacgtattcaacgcttataccaagcattgaaacctttaggtgattctaaacctgactggaaaatattccaagcaattgctaataaattaggtttcgattggaattacaaacatccaagcgaaattatggatgaaattgctagactaacaccattatatgctggcgtaagctacgaacgtttagaaggatttaatagtttacaatggcctctgcatccagatggtacagatgaaccaatactttatttagaaggatttaatttcgataatggtaaagcaaagttattcccattatcatttgataattactttaagcaagatgaagtttatgatattcatgtaaataatggtcgattgttagagcacttccatgaaggtaatatgacttatcaaacaccaatgattaaatacaaagtgccacgtgcatttgttgaaatttctccagaacttgctgaagatagaggcattcatgaaggtgcagaagttaagttgatatctgaaacaggagaagcggtattacaagttcatgtgacagatcgtgttaaaggtaaagaaatctatattccattaaataatgatgcgatggaaaatggagatctaggtgcaattaacttattaactaatagtgatgttgatcaatacacggatacaccatcttataaacgtacaagctgtcgtttggaggtaattacgaaacgtggtaagtcaccgttgaaccctaataatttccgtgtcaataaaaaacgtcatccgcagtacagtgttcaagtacagaaaaaatgggaacgtccagattatgttttcccaggaaatcaggtggataaataa

SEQ ID NO: 8095 - DNA, 1536 bp, Staphylococcus aureus
  CDS (1)...(1536)
atgtcgtatttctcgaacgttccattattcattttaaaaagggggactgtatttgttatgacaacacaacatagcaaaacagatgtcatcttaattggtggcggtattatgagtgcaacattaggaacattacttaaagaattatcacctgagaaaaatattaaagtgtttgaaaaattagcacaacctggcgaagagagttcaaatgtatggaataatgccggtacagggcattcagcactttgcgagttgaactatacaaaagaaggtaaggatggcacagttgattgtagtaaagcaattaagataaatgagcagtaccaaatttcaaaacagttttgggcatatttagttaaaacaggacaattagataacccagatcgctttattcaagcggtgccacacatgagtttcgtcattggcgaagataatgtagcttttataaaaagtcgtgttgcaacgttaaagaaaagtgttttattcgaaaaaatgaaattatcgcaagatgaagaagaaatgaaatcttgggtaccgttaatgattgaaggtcgtaagtttgatgaaccaattgctttaacttatgatgaaactggtacagatgttaactttggtgcgttaactgcaaagttatttgataatttagagcaacgtggtgtgggaattcaatataagcagaatgtattagacatcaaaaaacagaaatctggggcatggctagttaaagttaaagatttagaaacaaacgaaacgacaacatatgaatctgattttgtatttattggtgctggtggtgcgagtttaccattactccaaaagactggaattaaacaatcaaaacatattggtggtttcccggtaagtggattattcctgcgctgtacaaatcaagaagtgattgatcgtcatcatgctaaagtgtacggaaaagcagcagtgggtgcgccaccaatgtcagtgccgcacttagatacacgttttgtagacggcaagcgttcattgttatttggtccatttgcaggtttctcacctaaatttttaaaaacaggttcacatatggatttaattaaatcggttaaaccaaataatatcgtgacgatgttatctgcaggtatcaaagaaatgagtcttacgaagtatttagtgtcacaattgatgttatctaatgatgagcgtatggatgatttaagagtctttttcccaaatgctaaaaatgaagattgggaagtgattacagcagggcaacgtgtccaagtaatcaaggatactgaggattctaaaggtaacttacaatttggtaccgaagtcattacgtcagatgatggcacattagctgcattacttggtgcatcacctggtgcgtcaacagctgtagatattatgtttgatgttttacagcgatgctatcgtgatgaattcaaagggtgggaaccaaagattaaagaaatggtgccgtcatttggttatcgcttaacagatcatgaggatttatatcacaaaattaatgaagaagtaactaagtatttacaagttaaataa

SEQ ID NO: 8096 - DNA, 1056 bp, Staphylococcus aureus
  CDS (1)...(1056)
atgaaattagcgataaaagagattatgttttacaaatttcgttatattttaatcacattaatcattcttttattaagtattatggtgttatttattagtggtttagctcaagggcttggtagggagaatatttcgttatttgaacactttgataatgatgaatatgttgttcaaaaaatgaaagagccgcaaattgagaaatcgcaacttagtgatacgcaacagaatcaaattaaaaaggtaattcatcaagaaccacataaaatgaatgttcaaacattgaaattatctaataaagaacaagatgtgattacaatgaatgacgttaaacaacaacgcttacaacttaaaaaaggtgattatcctaaaaatgctcatgaggtcgctattaatgataagttagctgcagacaacattagagtcggggatagattacattttaaaaataattcaactagttatagagtttctggtattttaaacgacacaatgtatgcgcatagttccattgtgctattgaacgataacggatttaatgcattgaataaggttaatacggcattttatccagtgaaaaatttaacgcaacaacaacgtgatgcgcttaataaaataaatgacgttcaagttgtgagtgaaaaagatttaacaggtaatattgcgagttatcaagcagagcaagcaccgttaaatatgatgattgttagtttgtttgctattacagcaattgttctaagtgcatttttctatgttatgacgattcaaaaaatatcacaaattggcattttgaaagcaattggtattaagacaagacatttattgagtgcgttagttttacaaattttaacactaacaataattggggtaggtattgctgtgatcatcatagtaggactatcatttatgatgccggtaaccatgcctttttacttaacaacgcaaaatattttattgatggtggggatatttatattagtagcgattttaggtgcctcactatcatttatcaaattatttaaagtggatcctatcgaagcaattggaggtgcagaataa

SEQ ID NO: 8097 - DNA, 666 bp, Staphylococcus aureus
  CDS (1)...(666)
atggcattagtcgttgaagatatcgtcaaaaatttcggagaaggtttgtctgaaacaaaagttttaaaaggtattaattttgaaatggaacaaggggaatttgtcattttaaatggtgcctctggttctgggaaaacaacattgctaacgatattaggcggattgttaagtcaaacgagtggtacagtgctttacaatgatgcaccattgtttgataaacagcatcgtcctagtgatttacgattggaagatattggttttatttttcaatcttcacatttagttccttatttaaaagtgatagagcaattgacactcgtaggccaagaagcgggaatgaccaaacaacaaagttcaaaaagagcaatacaacttttgaaaaatattggtttagaagatcgcttgaatgtatatccgcatcagttatctggcggtgaaaagcaacgtgttgcgattatgagagcatttatgaataatccgaaaatcattttagcagatgaacccacagcaagtttagatgccgatagagcaacaaaagttgttgagatgatacgtcaacaaattaaagaacaacaaatgattggtattatgattacacacgatcgaagattatttgaatatgcagatcgagtgattgaattagaagatggcaaaataactgattag

SEQ ID NO: 8098 - DNA, 1050 bp, Staphylococcus aureus
  CDS (1)...(1050)
atgagtgattttcaaagagaacagagaaaaaatgaacatgttgaaatagcaatggcccaatctgacgcaatgcattcagattttgataagatgcgttttgtgcatcattctatcccatcaattaatgtaaatgatatcgatttgacatcacagacacctgacttaacgatggcatatccggtttatattaatgcaatgacgggtggtagcgagtggacgaaaaacatcaatgaaaagctagctgtagttgcaagagaaactggcttagcgatggcagttggatcaacacatgcggcattgagaaatccacgcatggctgagacgtttacgattgcgcgaaaaatgaatcctgaaggcatgatttttagcaatgttggtgcggacgtaccagtagaaaaggctttggaagcagttgaattacttgaggcacaagcgttacaaatccatgttaattctcctcaagaattagttatgcctgaagggaatcgtgaatttgtgacttggttagataatatagcgtcgattgtatcacgagtgtctgttccagtcattataaaagaagttggatttggtatgagcaaagaattaatgcatgacttacaacaaataggcgttaagtatgtcgatgttagtggcaaaggtggtactaactttgtagatattgaaaatgaacgtcgtgcaaataaagatatggattacttatcatcatggggacagtctacagttgagtcattacttgaaacaacggcttatcaaagcgaaatttcagttttcgcgagtggtggtttacgtacaccactcgatgcaattaaaagtttagcacttggcgcaaaggcaactggtatgtcacgtccgtttttaaatcaagttgaaaataatggcattgcacatacagtagcttatgtagaatcatttattgaacacatgaaatcaataatgacgatgttagatgctaaaaatattgacgacttaacacaaaaacaaatcgtatttagtccggaaatattgtcatggatagaacaacgtagcttgaatatacatcgaggataa

SEQ ID NO: 8099 - DNA, 900 bp, Staphylococcus aureus
  CDS (1)...(900)
atgggacttgtaattgaacatgttacgaaacgttttggcaagatgacggcagtaaatgatatttcattagagttagaatcaggcaaaatgttaggttttctaggaagaaatggtgcaggtaaaacaacgacatttcgtatgattttaggcttaagtgaaccaactgaaggacacattacgtataacggtaaaaaactagataaaacaatgtacaatcgtattggttatttgccggaagaacgcggtttacatgggaaactgacagttgaagaagaattgaaatatttggcaactttaaagggaatgtcaaaaacagaaatacaacagcaaatatcgtattggcttgagcgttttgatattactgaaaaccgtaaaaaacgaattgatagtctatcaaaagggaatcaacaaaaaattcagctgttagcaagtatgttacataaaccagaattactaatattagatgagcctttcagtggtctagacccagttaatgttgagttattaaaagaagcagttaaagacttaaatgattggggcagtacaatcgtttatagttctcaccgtatggagcatgttgaagaattatgtgatgatgtttgtattttagataaaggtcaacttgttgtttctggtgatatcaatcatgtacgtgcatctaatggtaacaagaaagttgtcattgagtcagaaacaacactaccagatttaacacacattagaggcatcattcatagtgaaaacatgaagcaaggtattcagttgacgattgagaatgaagacgtagccaaagatatttatcaagttgtagcacatcaaggttatgttaaacgattccaagttgtagaaccatcattacaagatatattcattgagaaggttggtggcaaggatgcataa

SEQ ID NO: 8100 - DNA, 1662 bp, Staphylococcus aureus
  CDS (1)...(1662)
atgagaaaaattcaagcaaaaaaaggtttgagtattgagtgtaaaggttgggaacaagaagcagtacttagaatgttatacaacaatttagacccagaagttgctgaaagaccagaagatttagttgtttatggtggtattggaaaagcagctcgtaattgggaagcttttgaagcaatagagaaaacgttacgagaattagaatcagatgagacaatgttagtacaatcaggaaagccagttgctgtatttaaaacacatgaagaagcgccacgtgtattaatttcaaattcagtattagtacctgaatgggcaaactgggatcattttaatgaattagataaaaaaggtttaatcatgtatggacagatgacagccggtagttggatatatattggttctcaaggtattgtgcaaggtacttatgagacatttgccgagctaggtaatcaacactttaatggagatttagcaggcactgttacactgacagcaggtttaggtggtatgggtggtgcgcaaccgttagcaattactatgaatcatggggtagcaatttgcgtggatgttgatgaaacacgtgttgataagcgaattgatacgaaatactgtgatgttaaaacagctgatttagatgaagcattaaaattagcagaagaggcgaaagaacgtggagaaggattatcaatcgggttagttggaaatgctgtagacatccatcaagcgattctagaaaaaggatttaaaattgacattattactgaccaaacaagtgcacatgatccgctaaatggatatgtgccacaaggatactctgtagaagaagcgaaagtattgcgtgaaaaagatccgaaaaaatatgttgaactgtcacaagcttcaatggcaaagcatgttgaattaatgcttgaattccaaaaacgtggcgctgtagcatttgattatggtaacaatattcgacaagtagccttcaataacggagtgaaaaatgcttttgacttcccaggttttgtaccagcttacattagaccattattctgtgaaggtaaagggccattccgctttgctgcgttgagtggtgattcaaaagatatcgagcgtgcggatgaagaaatgcgcaaacttttcccagaaaatgaaaagttattaagatggcttgatttagctgaagaaaaaatttcatatcaaggactaccatcacgtattgcttggttaggctatggagaaagagcgaaaatgggcctagctttaaatcgtcttgtacgtgacggtgaaatttcagcaccaattgttattggacgagaccatttagatgctggttcagttgctagtcctaaccgtgaaacagaaagtatgaaagatggtagtgacgcggttggtgattgggctgtattgaatgcactaattaacacagctgcaggtggttcatggatttcattccatcacggtggcggtgttggcatgggatattcacttcatgcgggtatggttgttgtagcagatggatcagagcgtgctgaaagaagattggaacgcgtattgactactgatccaggcatgggtgttgcccgacatgttgatgctggctatgacatcgctattcaaacagctaaagaaaaaggtattcatattccaatgattgataaagcaggtgataagtaa

SEQ ID NO: 8101 - DNA, 882 bp, Staphylococcus aureus
  CDS (1)...(882)
atggcagctcaagatcctagaacaaaatttaaaacaacggattatgaaaaacaagaacaagaggtaccgggtttacaatctgaaatgacgccagcacctgattgtggcgaaacgtcttaccaaggtcatcaacgcttacaaggctataaaatgttagttacaggtggtgactcagcaatagggcgtgcagcagcgattgcgtatgctaaagaaggtgcagatgtagcgattaactatcttccgagtgaagaacaagatgcacaagaagtacgccaagtgattgaagaaagtggtcaaaaggcagtgttaattcctggtgatataagagatgagcagttcaactatgaccttgttgaacaagcatatcaacaattaggtggcttagataatgttaccttagttgctggacatcaacagtatcatgatgatattcatggatttacaactgaggcatttacagaaacgtttgaaacgaatgtctatccgctattttggacaattcaaaaagctttggaatatttaaaaccgggtgcgtcaattacgacgacatcatctgtacaaggttataatcctagtcctattcttcatgattatgccgcttcaaaagcagcaattatttcattaactaaaagtttttcagaagaattaggaccaaaaggaattagagtgaactgtgtagcgcctggtccattctggtcgccattacaaatttctggtggacaacctcaaagtaaaattccaacatttggtcaaaaaacacctttaggtcgtgcaggtcaaccagttgagttatgtggaacttatgtgctattagcatcagaagaatcaagttatacaactggacaagtgttcggtgttagcggtggagtgcaaatagattag

SEQ ID NO: 8102 - DNA, 414 bp, Staphylococcus aureus
  CDS (1)...(414)
gtggggtatataatggttaaagtgacatatgatattccgtcttgcgaggattattgcgcattaaggattaatgcaggtatgagtccaaagacgcgcgaagcagctgaaaaaggattacctaatgccttatttacagtaaccttgtatgataaagaccggttaattggtatgggtagagtgattggcgatggaggaactgtttttcaaattgttgatattgcagttttgaaaagttaccaaggtcaaggttacggcagtcaaattatggaacatattatgaagtatattaaaaatgtatctgtcgaaagtgcatacgttagtctgatcgcagactacccagcggataaattatatgcaaaatttggatttatgcctaccgaaccagattcaggcggtatgtatatcaaatactaa

SEQ ID NO: 8103 - DNA, 516 bp, Staphylococcus aureus
  CDS (1)...(516)
atggctgggataatcaaagagatttcaaaacaagatgctagtgaattagttgaattagcaactagaacattttatgacacgtttggttcttactatgatgacaaagattttgatcaatttttcgaagacaattatactgtagaaaaatttacacaagagattaaccatgtagattcatttcattatttttatcaagaagatggtgcgaatgttggttatataaagatgaatattaatagtgctcaaactgaagaaatgggggagacttatttagaagtgcagcgcatatactttttgaaagactttcaaggtggcggaagaggttcacaattgatagaattggccgaaaaaattgcacaagaacataataaacataaaatttggctaggagtttgggagcataatcctcgtgctcaagcattttataaacgtcatggatttaaagtggttggtgaacatcattttcaaacaggtgatgtaacggatacagatttaattatggaaaaagagttataa

SEQ ID NO: 8104 - DNA, 630 bp, Staphylococcus aureus; identical to SEQ ID NO: 4700
  CDS (1)...(630)

SEQ ID NO: 8105 - DNA, 1491 bp, Staphylococcus aureus
  CDS (1)...(1491)
atgatgactttacaaatacatacagggggtattaatttgaaaaagaaaaacatttattcaattcgtaaactaggtgtaggtattgcatctgtaactttaggtacattacttatatctggtggcgtaacacctgctgcaaatgctgcgcaacacgatgaagctcaacaaaatgctttttatcaagtgttaaatatgcctaacttaaacgctgatcaacgtaatggttttatccaaagccttaaagatgatccaagccaaagtgctaacgttttaggtgaagctaaaaaacttaatgactctcaagctccaaaagctgatgcgcaacaaaataacttcaacaaagatcaacaaagcgccttctatgaaattttgaacatgcctaacttaaacgaagagcaacgcaatggtttcattcaaagtcttaaagacgatccaagccaaagcactaacgttttaggtgaagctaaaaaattaaacgaatctcaagcaccgaaagctgacaacaatttcaacaaagaacaacaaaatgctttctatgaaatcttgaacatgcctaacttaaacgaagaacaacgcaatggtttcatccaaagcttaaaagatgacccaagtcaaagtgctaaccttttagcagaagctaaaaagttaaatgaatctcaagcaccgaaagctgacaacaaattcaacaaagaacaacaaaatgctttctatgaaatcttacatttacctaacttaaacgaagaacaacgcaatggtttcatccaaagcttaaaagatgacccaagccaaagcgctaaccttttagcagaagctaaaaagctaaattatgcacaagcaccaaaagctgacaacaaattcaacaaagaacaacaaaatgctttctatgaaattttacatttacctaacttaactgaagaacaacgtaacggcttcatccaaagccttaaagacgatccatcagtgagcaaagaaattttagcagaagctaaaaagctaaacgatgctcaagcaccaaaagaggaagacaataacaagcctggtaaagaagacagcaacaaacctggcaaagaagacggcaacaagcctggtaaagaagatggcaacaaacctggtaaagaagacggcaacaagcctggtaaagaagatggcaacaaacctggtaaagaagacggcaacaagcctggtaaagaagacggcaacggagtacatgtcgttaaacctggtgatacagtaaatgacattgcaaaagcaaacggcactactgctgacaaaattgctgcagataacaaattagctgataaaaacatgatcaaacctggtcaagaacttgttgttgataagaagcaaccagcaaaccatgcagatgctaacaaagctcaagcattaccagaaactggtgaagaaaatccattcatcggtacaactgtatttggtggattatcattagcgttaggtgcagcgttattagctggacgtcgtcgcgaactataa

SEQ ID NO: 8106 - DNA, 1011 bp, Staphylococcus aureus
  CDS (1)...(1011)
atgaatagagagatgttgtatttaaatagatcagatattgaacaagcgggaggaaatcattcacaagtttatgtggacgcattaacagaagcattaacagcgcatgcgcacaatgattttgtacaaccgcttaagccgtatttaagacaggatcctgaaaatggacacatcgcagatcgaattattgcaatgccaagtcatatcggtggtgaacacgcaatttcaggtattaagtggataggtagtaagcacgacaatccatcgaaacgtaatatggagcgtgcaagtggtgttattattttgaatgatccagaaacgaattatccaattgcagttatggaagcaagtttgattagtagtatgcgtactgcagcagtttcagtgattgcagctaagcatttggctaaaaaaggatttaaagacttaacaatcattggttgcgggctaatcggagacaagcaattacaaagtatgttagagcaattcgatcatattgaacgcgtgtttgtttacgatcaattctctgaagcatgtgcacgctttgttgatagatggcaacaacagcgtccggaaattaattttattgcgacagaaaatgctaaagaagcagtatcaaatggtgaagtagtcattacatgtaccgtaacggatcaaccatacattgaatatgattggttacaaaggggtgcatttattagcaacatttctatcatggatgtgcataaagaagtctttattaaagctgacaaagtcgtagtagatgactggtcacaatgtaatcgagaaaagaaaactattaaccaattggtgttagaaggtaaattcagcaaagaagcacttcatgctgaactaggacaacttgtgacaggtgacataccaggacgtgaagacgatgatgaaatcatattacttaatccgatgggtatggctatcgaagatatttcaagtgcttactttatttatcaacaggcacaacaacaaaatattgggacaacattgaacctatattaa

SEQ ID NO: 8107 - DNA, 1563 bp, Staphylococcus aureus
  CDS (1)...(1563)
atgtttcgttatgaaagttcacaaccaattacgatagaaagaaggacgtctaaacaaccactaactgcagctgaattttggcaaacaatcgctaatatgaattgtgatttaagtcatgaatgggaagtggctcgcgttgaagaaggactgactactgctgtcacacagcttgctaaacaattatcagaattagatttagcgtcacatccttttgtgatgtcagagcagtttgcaagtttaaaagatcgtccatttcatccattagctaaagaaaaaagaggattaagagaagcggattatcaagtgtatcaagctgaattaaatcaatcatttcctttaatggttgcagcagttaaaaagacacatatgattcatggcgatactgcaaatatcgatgaattagaatcattgacagcacctataaaagaacaagcgacagatatgttaaatgatcaagcgttatcaatagatgactatgtactatttccggtacatccttggcaatatcagcatattctgccgaacgtctttgcgaaagagattagtgaaaagttggttgtactattaccgttaaaatttggagattatctgtcatcttcaagtatgcgttcattaattgatattggcgcaccgtataaccatgtcaaagtaccatttgcaatgcagtcattaggcgcattaaggctaacgcctacgcgttacatgaaaaacggagaacaagcagaacaattattacgtcagcttatagaaaaagatgaagcactagctaagtatgtcatggtttgtgatgaaacagcttggtggtcatatatgggtcaagataatgatattttcaaagatcaattaggccatttaactgttcagctaagaaaatatcccgaagtgctagccaaaaatgatacgcaacagctagtgtcaatggcagcactcgcggcaaataatcgcaccttatatcaaatgatttgtggaaaagataatatttctaaaaatgatgtcatgacgttatttgaagatatcgcacaagtctttttaaaggtaacactatcatttatgcaatacggcgcattaccagagttgcatggtcaaaatatattgttgtcatttgaagatggacgtgtacaaaaatgcgtgttacgtgatcatgatactgtcagaatttataaaccatggctaacagcacatcatctttcattgccgaagtatgtcgttagagaagatacacctaatacgctaattaatgaagatttggaaacattctttgcttatttccaaacattagctgtatcggtaaacatatatgccattattgatgcaattcaagatttatttggtgtaagtgagcatgaacttatgtcgttgttaaaacaaattttaaaaaatgaagtggcaactatttcctgggttacaactgatcagctagctgtcagacacattttatttgataaacagacgtggccattcaaacaaattttattaccattgctatatcaacgtgatagtggtggaggtagtatgccttcaggtttaactaccgtaccaaatccaatggtgacatatgattaa

SEQ ID NO: 8108 - DNA, 1737 bp, Staphylococcus aureus
  CDS (1)...(1737)
gtgcaaaataaagaattaatacaacatgcagcgtatgcggctatcgaacgcattttaaatgaatattttagagaagaaaatttatatcaagtaccacctcaaaatcatcaatggtctatacaattatctgagctcgaaacgttaacaggtcaattcgcttattggtctgcgatggggcatcatatgtatcattcagaagtatggcttattgatggtaaaagtaagaaattaacaacatataaagaagccattgcgcgtattttgcaacatatggctcaaagtgcagataatcaaacggcagtgcaacaacatatggcgcaaattatgtctgacatcgataatagcattcatcgcacggcgcgttatttgcaaagtaacacaatagactacgcagaggatcgctatatcgtttcagaacaatctttatacttaggtcatccatttcatccgactcctaagagtgcaagtgggttttcagaagcagatttagagaaatatgcacccgaatgtcatacatcattccaattgcattatttagctgtgcatcaagatgttctgctcacgcgctatgtagaaggtaaagaagatcaggttgagaaagtgttgtatcaattagcagatatagacatatcagagatacctaaagattttattttattaccaatacatccttatcaaatcaatgtgttgcaacagcatccacagtatttgcaatatagtgaacaaggtttaataaaagaccttggcgtttccggtgattcagtttacccgacgtcttcggttagaactgtattttcaaaagcattaaacatttatttaaaattaccgatacacgttaaaattactaattttatacgtacgaatgatcttgaacagattgaacggacaatcgatgctgcacaagttatcgcatcagtcaaagatgaggttgaaacaccccattttaaattgatgtttgaagaaggatatcgtgcattgttaccgaatccattagggcaaacagttgaacctgaaatggatttattaacaaatagtgccatgattgttcgtgaagggataccgaattaccatgctgataaagatattcatgtattggcgtcattatttgaaacgatgcctgattcaccgacctctaagttatcacaagtgattgagcaaagtggtttagcgccagaagcatggcttgaatgttatttggatcgtacattattgccgatattaaagctgtatagtaacacaggcattagtctagaagcacatgtacaaaattcattaattgaattaaaagatggcatacccgacgtatgctttgtcagagatcttgaaggcatttgtctatctagaacgattgctactgaaaaacaacttgtgccaaatgttgtggcagcatctagccctgttgtatatgcacatgatgaagcgtggcatcgtcttaaatattacgttgtagtaaatcacttaggacatttagtatcaactattggtaaagcgacaaagaatgaagttgtgttatggcaacttgtagcgcatcgtcttatgacttggaaaaaagaatacgcgaataacgcagtatttgttgactgtgtagaagatttatatcaaacgccgaccattgcggctaaagcgaatttgatgagtaaattgaatgattgtggtgcaaaccctatttatacacatataccaaatccaatctgtcataacaaggaggtatcgtattgtgaatcaaacaattcttaa

SEQ ID NO: 8109 - DNA, 777 bp, Staphylococcus aureus
  CDS (1)...(777)
atgcaacaactatctctgaaacatagattaaacaatggtgattcagtttatggcatttttaattctataccggacccattaatgatagaggttatcgcagcaagcgggtatgactttgttgtgattgatacagaacacgtggcgattaatgatgagacactagcgcatttaattcgtgcagctgaagcagcgcatattataccaattgtacgtgtcactgcagtgatagatagagatatcattaaagtgttggatatgggtgcgagaggtattattgtgccacacgttaaagatcgtgagacagttgagcatattgtgaaattaagtcgttattacccgcaaggattaagaagtttgaatggtggtcgcatggcaagatttggacgtacaccattacttgatgcaatggagatggctaatgagcatattatggtgattgccatgatagaagatgttgaaggggttatggccattgacgatatagcacaagtcgaaggtttagacatgatagtcgaaggtgccgcagatttatcccagtcacttggcataccatggcaaacgcgtgatgatcaagtaacatcacatgttcaacatatttttgaagttgtgaatgcacatggtaaacatttttgtgcattaccacgtgaagatgaagatattgcaaaatggcaggcacaaggtgtacaaacatttattttaggtgatgatcgtggaaaaatatatcgccatttaagtgcatctctagcgacgtctaaacagaagggggatgaagactaa

SEQ ID NO: 8110 - DNA, 1203 bp, Staphylococcus aureus
  CDS (1)...(1203)
atgcgtatagttcaacccgttattgaacaattaaaagcacaatcttatccagtttgtcattatatctatgacttagtcggactggaacatcatttgcaacatattacatcatcattgcctaataattgtcagatgtactatgcaatgaaagcaaatagtgaacgaacaatcctagatacaattagtcagtatgttgaaggattcgaagttgcatctcaaggtgaaatagcaaaaggtcttgcttttaaaccagcaaatcatattatttttggtggccctggtaagacagacgaggaactaagatatgcagtaagtgaaggtgttcagcgtattcatgttgaaagtatgcatgaattacaacggctaaatgccatcttagaagatgaagataagacacaacacattttattgcgtgttaatttagcaggaccatttcccaatgcaacgttgcatatggcaggacgcccaacacaatttggtatttctgaagacgaagttgatgatgtcattgaagctacgctagcaatgccaaatattcatttagatggatttcattttcattctatttctaacaatttagactcgaatttacatgtcgatgtagtgaaactttattttaaaaaagcaaaggcatggtctgaaaaacatcaatttcctctcaaacatatcaatcttggtggtggcataggtgttaactatgcagatttaactagccaatttgagtgggataattttgtagaaaattttaaaacacttatcgttgagcaagaaatggaagatgtgacattgaactttgaatgtgggcgctttattgtggcacacattggttactatgtgacagaagtgctagacattaagaaagtacatggtgcttggtatgccattttaagaggaggtacgcaacaatttagactgccggtatcttggcagcataaccatccttttgacatttatcgctataaagacaatccatattcatttgaaaaagtttcaatttcgagacaggacacaacgttagtcggtcaattatgtacaccgaaagatgtctttgctagagaagtacagatagacgcaatcagtacaggcgacgttattgttttcaaatatgcaggtgcatacggatggtctatttcacatcacgatttcttaagccatccacatcctgaatttatttatttaacgcaaacaaaggaggatgaataa

SEQ ID NO: 8111 - DNA, 2238 bp, Staphylococcus aureus
  CDS (1)...(2238)
atgcaacgtgattatttaattcgagtagaaactgaaagtatgtcagatttcaaaaggctcaatggtttaatgattggttttgttattaaaggtgaggcacatatttatgatgaacataatatgatgcaatgcaacagtggcgacattttcatcattaaccaccgcgacttgtatcgatttcaacttcaacaagatggcatcatatgttatatccaattccaaatgaaatatttagcagacaagtttgatgatgtgcattgtctatattttcacttaacagatgcgaccacaaccaaaaatatacatcaactgagaaatataatggcaagactggtttcaacacatattcgacataatgagttgtctaaattgactgagcaacaacttgtgattcagttgcttatgcatatgattcattatgtcccgcgtacatatcattcgaaccaaagtatcttaaatgatgataaagtgaatcaagtatgcgactatatcgagttacattttcatgaagacttaagcctttcggaattaagcgaatatgttgggtggtcagagagccatctgtctaaaaagtttgcagaatcgctaggtgtaggattccagcatttcttaaatacgacgcgaattgagcatgtgaaactcgatttgacatacacagatgaaacgattactgatattgcattgcaaaatggcttttcaagtgcagcgagctttgcgagaacatttaaacactttacgcatcaaacgcctaaacaatatcgaggtgatcgtccagcaatcactgaaaatcagcaatcggcacaacataattatcacgaccgtgaattgatattacttttaaatgactacattgaagaaatgaatcatttcattgaagatattgaaaaggtgaactataaagagattacctttcaaccaaccaatcaccaactaaatcaatttaatcatattactcaagtgggctatttgaggaatttactcaatacacagtatcaatcacagttacttacatgtcatcatgattttcatgtcaatgaagtattagcatatgatgtgatgccatatattatgaaaaagctcaatgcgccattcacgtatgatgcagaaatttcgaatatattttatgatatcgatttgtgtttagactttttattagataataactttagtttgaccatgcatttggatcagtatgactcacgtgattatatcgatgcatttaaaatttttatccatcacgttgccctgcatgtcagtcatagaaaagatttgaagttcaatttgtatgtgacgacattgcacacgtctttgattgaaatgattgattattttaaagcattattccctaatggtggcttgtacattcacttagatcaagctacggaaagacatctaccattgctgaaacgacttgagccacacatcgaccattttgtatttgatgccaattcaaatgatgctgttgattttaataaaatgaatgatgatgaatttaaaaccgcaagtcaaatgattattaataaaacgaattaccttatcgatttaatgcatcgtcatcatctaaagcgtccactcattttactcaattggaatacattgacgggtgatacatttattacaaacggcgaatattttagaggtggtatcatcattgagcaattattaaaattaagttctaaagtagagggtatcgggtattggttgaattatgatttgcatgtcagtcattgtagaaatgaacgggattatatgaattctattgaactgtttcatcaatataatggaaaacgtccggtctatttcacggcattgctatttaataaattaacaagcaatattttgtattctgatgatacttgtattgtcacgggaactgattcaaattttcaaatattgttatatgatgcaaagcattttaatccatacttagcgttggacaatcaaatgaatatgcgtgcgacggaaatgattcatttgaacattaatgccctggaagaaggtatgtataagattaaacattttaccttagataaagaaaatggtgcattatttaatctttggcgcaaacatcatacgatacatggtatggacaaggactctatagattacgttaatcgaatgagttttccaaaattagaagtgtacgatatagatatgatggatacgctggcattaaatattaaaatgattacaaatggaattcacttaattgaagtaaaacgttacccaagttcataa

SEQ ID NO: 8112 - DNA, 942 bp, Staphylococcus aureus
  CDS (1)...(942)
atgagaaatatagagaatctaaatcccggagattcagttgatcactttttcttagtgcataaagctacacagggtgtaacagcacaaggtaaagattatatgacattacatttgcaagataaaagtggtgaaattgaagcgaaattttggacggctacaaaaaatgatatggcaacaatcaagcctgaagaaattgtacatgttaaaggtgacatcataaactatcgcggaaataaacagatgaaagtcaaccaaattagactagcgacaactgaagatcaattaaaaacagaacaatttgtagatggtgcacctttatcaccggcagaaatacaagaagagatttctcattatttgctagatattgaaaatgctaatttacaacgtatcacacgtcatttattgaaaaaatatcaagaacgattttacacatatccagctgctagttctcatcatcataactttgcgagtggcttaagctatcatgtattaacgatgttacgtattgcaaaatcaatttgtgacatttatccattgttaaacaaaagtttgttatatagtggtattattttgcatgatattggtaaagttagagaattaagtggtcctgttgcgacgtcgtatacagtcgaaggtaacttattaggacacatctcgattgcgagtgatgaagtagttgaagcagctcgtgaattgaacattgaaggagaagaaatcatgttgttaagacatatgattttatctcatcatggtaagttagagtatggttcgccaaaactgccatacttaaaagaagcagaaattttatgctatattgataatatcgatgctagaatgaatatgtttgaaaaggcttataaaaaaactgacaagggtcagtttacagataaaatatttggtcttgaaaatcgtagattctacaatcctgaatcactcgattaa

SEQ ID NO: 8113 - DNA, 2946 bp, Staphylococcus aureus
  CDS (1)...(2946)
gtgaacaaaatgataattaaatcacttgaaatttatggttacggtcaatttgttcaacgtaaaattgaatttaataaaaacttcactgaaatttttggtgaaaatgaagcgggtaaatcgacgattcaagcattcatccattcgatattatttggttttccaactaaaaagtctaaagagccaagactagaaccacgtctaggtaaccaatacggtggtaaattagtacttattcttgatgatggcttagagattgaagttgaacgaattaaaggcagtgctcaaggtgatgtgaaagtatatttacctaatggtgctgtgcgtgatgatgcttggttacaaaagaaacttaattatatttctaaaaagacatatcaaggtatcttttcatttgatgtactagggcttcaagacattcatagaaacctaaatgaaaaacaattgcaagattatttattacaagcaggggctttaggatcaactgaattcacgtcaatgcgcgaagtgattaatcgtaaaaaagatgaattatataaaaaatcaggtaaaaatccaatcattaatcaacaaattgagcaattaaaacaactagaaagtcaaattcgtgaagaagaagctaaactagaaacatatcatcgcttagtagatgatcgagataaatcatcacgtcgattagagaatttaaagcataatttaaatcaattatcaaaaatgcatgaagaaaaacaaaaagaggttgctttacatgatcattcacaagaatggaagtctctagaacaacagttaaatattgagccaatcacatttccagaaaaaggtgtggatcgttacgaaaaagcacgagcgcataagcaatcgttagaaagagatattggtttaagaaatgagcgtttagctcaacttaaagaagaagcgactcaattagagccagttaaacaatctgatattgacgccttcatcagtttgaatcaacaagaaaatgaaattaaaaataaagaatttgaacttactgcaatcgaaaaggatattgcgaataaacaacgtgataaagatgaattgcaagcaaatattggttggtctgaaacgcatcatgacgtagatagttctgaggcaatgaaaagttatgtcagtgagcaaatcaagaataaacaagaacaagcggcatacattaagcaattagaacgtagtttagaagaaaataaaatcgaagataatgcggttcatagcgaactagattctgttgaagaaaaaatagttcctgaagagacttttgaaaagaaaaaagaatactcacaacaagtcattgaattaaacgaaaaagagaacttgtatagcaaattgaaagaacgtttcgaaattgagcaacaagaaaaacaaaaacgtcaaaaattgttacgaacaacgtttattcttttaacattagtaggtattggtttaactgccttctcatttatttcaaacaacatgttgtttggtattattttcgcagtattaactttagtatttgttatcggtatcatcatgtctaaatcaaaagaagtagattatagcgaggccatcacagatgaaatcgaagaaattaaagaacaactagccattttagatgaaaactatgacttagattttgatcttgatgagcaatatcgcattcgtgatcactggcaacaagctttgaaaaataaagatattttagaagagaaacgtcagtatattgaaggtcgtttaaatgatgcgaaagggcgtcatgatgaattgcaatcgacagttgaaaacgttaaggatgaattatacttatcatctaaaatttcaaatgatttaattgttgatagtatttctacaatggcgaatattaaagcattagatcaacacatcagtgatttaaatcaacaacgccagcaattggttcaagaattagatacattctacaatcatgctgaagctgttacaaaatcacaatttgtttatttcaacaaattatctttattccacgatgtgcaacaatggttgaaatcagctgaagacacgaatgaaaaatggcgtattaatgctgaaaataccaaacttgttacaaatgaattaaatcatttaaatgctcaattagaagaaaataataaaaaaattacagcactattcgattttatcaatgttggtactgaagaagatttttaccaacatcatgaagattaccaaacttatactagtaatttgagtcgttttaatgatttaactaaatatcttgagaaccaaaactattcttatgaattaagttctagtttaagtgaaaaaacaacagcacaacttgaagaagaagatcatttattggctactcaagttgacgaatataatgagcaatatcttgaaatgcaagcacaagtcagtgatttaagtgcacaaatcaatcacatggaaactgatacaacacttgctaatttaagacatgaatatcacagtcttaaaaatcaacttaatgatattgcaaaagattgggcaagtttaagttatttacaaagtttagttgatgaacacattaaacaaattaaagataaacgtttgcctcaagttattaatgaagcggtagaaatattgaagcatttaacagatggcagatatacgatgattaactataatgaagattcaattacggttaaacatgttaatggtcaattatatgatcctgttgaactaagtcaatctacaaaagaattactttatgtagctttacgtatcagtttaattaaggtactacgaccatattatccgttcccattaattgttgatgatgcatttgttcattttgataaaaaacgtactgaaaaaatgttgaattatttacgatcattatcagaacactatcaagtactatactttacatgtgtaaaagataatattgttccatcaaaagaagtgattacattaaacaaaatagaggaaggcgggaaacgatga

SEQ ID NO: 8114 - DNA, 1197 bp, Staphylococcus aureus
  CDS (1)...(1197)
atggttaaatttattcattgttcggatttacatttagatagtcctttcaaatctaagagtcatataagccctaaaatttttgaggatgttcaaaaaagtgcttatgaaagttttaaaaatattgtagatattgcattacaacaagatgttgattttgtaattatcgcgggtgatttatttgatagtgaaaacagaacattacgtgctgaaattttcttaaaacagcaatttgaacgtttacaaaatgaacaaatctttgtttatgtttgtcatggtaatcacgacccattatcatcaaagatttcatcaaactggccagataatgtttctgtattttcaaataaagttgagacgtatgaagcaattactaaatctggtgaaacaatttatattcacggatttagttatgaaaatagagcaagttatgagaacaagattgatgaatatccatcaagtcaaggacaaaaaggcatacatattggtgtcttgcatggtacgtacagtaaatcttctgttaacgaaagatataccgagttcattttagaagatttaaacagtaaattgtatcattattgggctttaggtcatatacatgaacgtcaacaattaagtgatatgcctgtaattaactattcaggtaatattcaaggtagacattttaatgagcaaggtgaaaaaggttgcttattaatcgagggtgaccacttaaaattaaaaactaaattttatcctacacagtatattagatttgaagaagcaactattgaaacggataagacatctaagcaaggtttatacgaggtcattcaaaactttaaagaacaagtgagagaagaaggaaaagccttttatcgtttaacgcttgttattaatagtgagacattaatttcacctcaagatttattacaagttgaagaaatgattacagattatgaagaaaacgaaaatcaatttgtatatattgatgagttaaaaatacaatatgcacaaaatgatgagtcacctttagttaatgaattttcagcggaattattagtcgatcaaactgtttttgataaagcgatgtcagacttatatttaaatccaagggcatctaagttcttagacgattatggaacattcgaccatacagcattagttaatcgtgctgaagaaatattaaaagctgaaatgagaggtgaacaaaatgataattaa

SEQ ID NO: 8115 - DNA, 555 bp, Staphylococcus aureus
  CDS (1)...(555)
atgacagatgtaatcattgtacattctatgcatggaaatagtagaaatcattggtatcagtggttggagcataacttaactttagaaggatatgacgtaacattatttaattttgaatcccctgaagcgaatacagtggaacagtggattgaagctatgacgaaacaaattaatgtacgcaaaaaggatacatattttgtaacacatggtttaggttcaatcacagctttaaaatatattgaaatgattgatcagccgattgaaggcttttttagtatagcgggctttaaagaagatgcagaaaatatagatttagatattgatttaagtaatgtaaccattgattacgataatattaaaaagaaagttgacaatttttacggattgagttctaaaaatgacaaatacgtttcatataaagaaactcagcgtttaatgaatgcattagaggggaacttgcgaatcgtggaagatggagggcatttcttagaagaggatggcttcgaaacatttacagcgttgcaagatcggatgcaagattacatgacacgatag

SEQ ID NO: 8116 - DNA, 234 bp, Staphylococcus aureus
  CDS (1)...(234)
gtgaggaattgggtggtgaaacaaatgaaagctaaggaaattagagacttaaccacttcagaaatcgaagaacaaatcaaatcttcaaaagaagagctttttaacctacgctttcagttagctacaggtcaattagaagaaactgcacgtattcgtacagtaagaaaaacgattgcacgtctaaaaactgttgctcgtgaaagagaaattgaacaaagtaaggctaatcaataa

SEQ ID NO: 8117 - DNA, 264 bp, Staphylococcus aureus
  CDS (1)...(264)
gtgagcgaaagaaacgatcgtaaagtttatgtaggtaaagttgtttcagacaaaatggacaagactattacagtacttgttgaaacttacaaaacacacaaattatacggtaaacgagtaaaatactctaaaaaatacaaaactcatgatgaaaacaattcagctaaattaggagacattgttaaaattcaagaaactcgtcctttatcagcaacaaaacgttttcgtttagtagagattgttgaagagtcagtaattatttaa

SEQ ID NO: 8118 - DNA, 369 bp, Staphylococcus aureus
  CDS (1)...(369)
atgatccaacaagaaacacgcttgaaagtagcagacaactctggtgctcgtgaagttcttacaatcaaagtattaggtggatctggtcgtaaaacagctaacatcggcgatgttatcgtatgtactgttaaaaatgcaacaccaggtggcgttgttaaaaaaggtgacgttgtcaaagctgtaatcgtacgtactaaatcaggtgttcgtcgtaatgacggttcatatatcaaatttgatgaaaatgcatgtgttatcatccgtgatgacaaaggcccacgtggtactcgtatcttcggacctgttgctcgtgaattacgtgaaggtaacttcatgaaaatcgtatcattagcaccagaagtactttaa

SEQ ID NO: 8119 - DNA, 318 bp, Staphylococcus aureus
  CDS (1)...(318)
atgcatatcaaaaaaggtgacaacgttaaagttatcgcaggtaaagacaaaggtaaagaaggtaaagtaatcgctactctacctaaaaaagaccgtgtcgttgtggaaggtgttaacattatgaaaaaacaccaaaaaccaactcaattaaatcctgaaggtggaatcttagaaacagaggcagcaatccatgtttctaatgtacaattattggaccctaaaacaaacgaaccaactcgtgtaggttacaaatttgttgatggtaaaaaagttcgtatcgctaaaaaatctggcgaagaaattaaatctaataattaa

SEQ ID NO: 8120 - DNA, 492 bp, Staphylococcus aureus
  CDS (1)...(492)
atgaaaaaattcaattatagttcagtaatggaagtaccaaaaatagataaaatcgttgtgaacatgggtgtaggtgacgcagtacaaaattctaaagtattagacaatgctgttgaagaattagaattgatcactggtcaaaaaccattagtaactaaagctaaaaaatcaatcgcgactttccgtttacgtgaaggtatgccaatcggtgcgaaagtaacacttcgcggtgaaagaatgtatgaattcttagacaaattaatttcagtatcattaccacgtgtacgtgacttccaaggtgtttctaaaaaagcatttgacggacgcggtaactacactttaggtgttaaagaacaattaattttcccagaaatcgactatgataaagtaagtaaagttagaggaatggatattgttatcgtaacgactgctaacactgatgaagaagctcgtgaattgttagctaacttcggtatgccattccgtaaataa

SEQ ID NO: 8121 - DNA, 399 bp, Staphylococcus aureus
  CDS (1)...(399)
atgacaatgacagatccaatcgcagatatgcttactcgtgtaagaaacgcaaacatggtgcgtcacgagaagttagaattacctgcatcaaatattaaaaaagaaattgctgaaatcttaaagagtgaaggtttcattaaaaatgttgaatacgtagaagatgataaacaaggtgtacttcgtttattcttaaaatatggtcaaaacgatgagcgtgttatcacaggattaaaacgtatttcaaaaccaggtttacgtgtttatgcaaaagctagcgaaatgcctaaagtattaaatggtttaggtattgcattagtatcaacttctgaaggtgtaatcactgacaaagaagcaagaaaacgtaatgttggcggagaaattatcgcatacgtttggtaa

SEQ ID NO: 8122 - DNA, 537 bp, Staphylococcus aureus
  CDS (1)...(537)
atgagtcgtgttggtaagaaaattattgacatccctagtgacgtaacagtaacttttgatggaaatcatgtaactgttaaaggtcctaaaggtgaattatcaagaactttaaatgaaagaatgacattcaaacaagaagaaaacacaattgaagttgtaagaccatctgattctaaagaagatagaacaaaccatggtacaactcgtgctttattaaacaatatggtacaaggtgtttctcaaggatacgtaaaagtacttgaacttgttggtgtaggttaccgtgctcaaatgcaaggtaaagacttaatccttaacgttggttattctcacccagtagaaattaaagctgaagaaaacattactttctcagttgagaaaaacacagtcgttaaagttgaaggtatttcaaaagaacaagttggagcattagcatctaacatccgttcagtaagacctccagagccttacaaaggtaaaggtattcgttaccaaggtgaatacgttcgccgtaaagaaggtaaaactggtaaataa

SEQ ID NO: 8123 - DNA, 360 bp, Staphylococcus aureus
  CDS (1)...(360)
atgatcagtaaaattgataaaaataaagtgcgtttaaaaagacatgctcgtgttcgtactaacttatcaggtacagctgaaaagccacgtttaaacgtatatcgttcaaacaagcatatctacgctcaaattattgatgataataaaggcgtaacattagctcaagcttcttcaaaagacagcgacattgctactacagcaactaaagttgaattagcaactaaagtcggtgaagcaattgctaaaaaagctgctgacaaaggcattaaagaaatcgtatttgaccgtggaggatatttatatcacggacgtgttaaagcattagctgaagcagcaagagaaagcggattagaattttaa

SEQ ID NO: 8124 - DNA, 501 bp, Staphylococcus aureus
  CDS (1)...(501)
atggctcgtagagaagaagagacgaaagaatttgaagaacgcgttgttacaatcaaccgtgtagcaaaagttgtaaaaggtggtcgtcgtttccgtttcactgcattagttgtagttggagacaaaaatggtcgtgtaggtttcggtactggtaaagctcaagaggtaccagaagcaatcaaaaaagctgttgaagcagctaaaaaagatttagtagttgttccacgtgttgaaggtacaactccacacacaattactggccgttacggttcaggaagcgtatttatgaaaccggctgcacctggtacaggagttatcgctggtggtcctgttcgtgccgtacttgaattagcaggtatcactgatatcttaagtaaatcattaggatcaaacacaccaatcaacatggttcgtgctacaatcgatggtttacaaaaccttaaaaatgctgaagatgttgcgaaattacgtggcaaaacagtagaagaattatacaattaa

SEQ ID NO: 8125 - DNA, 180 bp, Staphylococcus aureus
  CDS (1)...(180)
atggctaaattacaaattaccctcactcgtagtgttattggtcgtcctgaaacacaacgtaaaactgttgaagctttaggtcttaaaaagactaacagttcagtagttgttgaagataaccctgctattcgtgggcaaatcaacaaagttaagcacttagtaacagtagaagaaaaataa

SEQ ID NO: 8126 - DNA, 204 bp, Staphylococcus aureus
  CDS (1)...(204)
gtttctggaccaattccgttaccaactgagaaatcagtatacacaatcatccgtgccgtgcataagtataaagattcacgtgaacaattcgaacaacgtacacataaacgtttaatcgatattgtaaacccaacaccaaaaacagttgacgctttaatgggcttaaacttaccatctggtgtagacatcgaaatcaaattataa

SEQ ID NO: 8127 - DNA, 441 bp, Staphylococcus aureus
  CDS (1)...(441)
atgaaattacatgagttaaaaccggcagaaggttcacgtaaagaacgcaatcgtgttggacgtggtgttgcgacaggtaacggtaaaacaagtggtcgcggacacaaaggtcaaaaagctcgttcaggcggtggtgtaagaccaggattcgaaggtggtcaattaccattattccgtcgtttaccaaaacgtggttttactaacataaatcgtaaagaatatgctattgttaacttagaccaacttaataaatttgaagatggtactgaagtaactccagctttattagtagaatctggtgttgttaagaatgaaaaatctggtatcaaaatactaggtaatggttcacttgataagaaattgacagtgaaagctcataaattctcagcttcagcagcagaagctattgatgctaaaggtggagcacacgaggtgatctaa

SEQ ID NO: 8128 - DNA, 1293 bp, Staphylococcus aureus
  CDS (1)...(1293)
atgattcaaacccttgtgaacttctttagaacaaaagaggttcgtaacaagattttcttcacactagcaatgttagtaatttttaaaatagggacttatataccagctccaggagtaaatcctgcagcttttgataatccccaaggttctcaaggtgccactgagttattaaatacttttggtggcggagccttgaaacgattttctatttttgcaatgggtattgtaccctacatcactgcatcaatcgtaatgcaattattacaaatggatattgtccctaaattctcagaatgggcaaaacaaggtgaagtaggtagaagaaagttaaataacgttactcgttatttagcaatttctttagcatttatccaatctataggtatggcattccaatttaataattatctcaaaggtgcgctgattatcaatcagtcaattatgagttatttattaatagcactagttttgacagcaggaactgctttcttaatatggcttggtgatcaaatcactcagttcggtgttggtaatggtatttctattatcatatttgcgggtattttatcaacgttgccagccagtctaattcaatttggacaaactgcgttcgttgggcaagaagatacatcattagcatggttgaaagtattaggacttttagtgtcactgatactattaactgtaggtgctatttatgtacttgaagccgttcgtaaaattccgattcaatatgctaagaaacaaactgctcaaagattaggttcacaggcaacttatctacctttaaaagtgaactcagccggtgttattcctgtaatctttgcaatggcgttcttcttactgcctagaacattaacgttgttctatccagataaagaatgggcacaaaacattgcgaatgctgcaaatccttcaagtaatgttggtatggttgtatatattgtactaattatactattcacatacttctatgcatttgtacaagttaatccggaaaaaatggctgataaccttaagaaacaaggtagctatgttccaggtattagacctggtgaacaaaccaaaaaatatattactaaagttttatatcgtttaacttttgtaggttctatcttcttagccgttatttcaattctaccgatattagcaactaagtttatgggattaccacaatcaattcagattggtggtacaagtttacttatcgttattggtgtagcgattgaaacaatgaaatctttagaagcgcaagtatctcaaaaagaatataaaggctttggtggtagataa

SEQ ID NO: 8129 - DNA, 675 bp, Staphylococcus aureus
  CDS (1)...(675)
gtggtagataattttaggagggcacttatgaatatcattttgatgggtttacctggcgcaggtaaaggaactcaagcaagtgaaattgtcaagaaattcccaataccccacatttcaactggtgacatgttcagaaaagctataaaagaagaaactgaattaggtaaagaagctaagtcttatatggaccgtggcgaattagttcctgatgaagtgactgtaggtatcgttaaggaaagaatttctgaagacgatgcaaaaaaaggctttttattagatggcttcccaagaacaatcgagcaagctgaggcattaaataatattatgtctgagcttgacagaaacattgatgctgtcatcaatatcgaagttccggaagaagaattaatgaaccgtcttacaggtcgtcgaatctgtgagtcatgtggtacaacgtatcatcttgtatttaatcctccgaaggtcgaaggtatttgtgatatcgatggtggtaaattgtatcaacgagaagatgataatcctgaaacggtagctaatcgtttgagtgttaatattaaacaatctaaacctattttagatttctatgatcaaaaaggtgtattgaaaaatattgatggttcaaaagatattagcgacgttaccaaagatgtcattgatattttagatcatttgtaa

SEQ ID NO: 8130 - DNA, 219 bp, Staphylococcus aureus
  CDS (1)...(219)
atggctaaacaagatgtaattgaattagaaggtactgtattagatactttaccgaacgcaatgtttaaagtagaattagaaaatggtcatgagattttagctcacgtaagtggtaaaatcagaatgaattacattcgtattctacctggcgacaaagtaactgttgagatgtctccgtacgatttaacacgcggaagaattacttatcgttataaataa

SEQ ID NO: 8131 - DNA, 366 bp, Staphylococcus aureus
  CDS (1)...(366)
atggcacgtattgcaggagtagatattccacgtgaaaaacgcgtagttatctcattaacttatatatacggtatcggtacgtcaactgctcaaaaaattcttgaagaagctaacgtatcagctgatactcgtgtgaaagatttaactgatgacgaattaggtcgcatccgtgaagttgtagacggttataaagtcgaaggtgacttacgtcgtgaaactaacttaaatatcaaacgtttaatggaaatttcatcataccgtggtatccgtcaccgtcgtggtttaccagttcgtggtcaaaaaacgaaaaacaacgcgcgtactcgcaaaggaccagttaaaacggtagctaacaagaaaaaataa

SEQ ID NO: 8132 - DNA, 390 bp, Staphylococcus aureus
  CDS (1)...(390)
atggcacgtaaacaagtatctcgtaaacgtagagtgaaaaagaatattgaaaatggtgtagcacacatccgttcaacattcaacaacactattgtaactatcactgatgagttcggtaatgctttatcatggtcatcagctggtgcattaggattcaaaggatctaaaaaatcaacaccatttgcagcacaaatggcttctgaaactgcatctaaatcagctatggagcatggtttaaaaacagttgaagtaacagttaaaggacctggtccaggtcgtgaatcagctattcgtgcattacaatctgcaggtttagaagtaactgcgatcagagacgttactccagtacctcataacggttgtcgtccaccaaaacgtcgtcgtgtataa

SEQ ID NO: 8133 - DNA, 945 bp, Staphylococcus aureus
  CDS (1)...(945)
atgatagaaatcgaaaaacctagaattgagacaattgaaattagtgaagatgctaaattcggtaagttcgttgttgaaccactagaacgtggctacggtactacactaggaaactccttacgtcgtatcctactatcttcattaccaggtgcagccgttaagtatattgaaattgagggagttttacatgaattctcagcagtagacaatgtagttgaagatgtttctacaattattatgaacattaaacaattagcattgaaaatttactctgaagaagataaaactttagaaattgatgtacgtgatgaaggcgaagtaacagcaagcgacattacacatgacagtgatgttgaaattttaaacccagagcttaaaattgcaacagtatctaaaggtggtcacttaaaaattcgtctagttgctaacaagggtagaggttacgcattagcagaacaaaataatactagtgatttaccaattggtgtaatccctgttgattcattgtattcacctgttgaacgtgtgaactatactgttgaaaatacacgtgtaggtcaaagcagtgattttgataaattaacattggatgtttggactaatggttcaatcacaccacaagaatcagtttcattagcagcaaaaataatgactgaacacttgaatatcttcgttggtcttactgatgaagcgcaaaacgctgaaatcatgattgaaaaagaagaagatcaaaaagaaaaagtattagaaatgtctattgaagaattagacttatctgtacgttcatataactgcttaaaacgcgcaggaatcaattctgttcaagagttagctgacaaatctgaagctgacatgatgaaagtgcgtaatttaggtcgtaaatctttagaagaagttaaatacaaattagaagatttaggattaggattaagaaaagaagattga

SEQ ID NO: 8134 - DNA, 369 bp, Staphylococcus aureus
  CDS (1)...(369)
atgggttacagaaaattaggtcgtacttctgatcaacgtaaagctatgttacgtgacttagctacatcacttattattagtgaacgtattgaaactacagaagctcgtgcaaaagaagttcgcagtgttgttgagaaattaatcactttaggtaaaaaaggagatttagcttctcgtcgtaatgcagctaaaactttacgtaatgttgaaatcttaaacgaagatgaaactacacaaactgcacttcaaaaattatttggtgaaatcgcagagcgttacacagaacgtcaaggtggttacactcgtatccttaaacaaggccctcgtcgcggtgacggtgctgaatcagtaattatcgaattagtataa

SEQ ID NO: 8135 - DNA, 921 bp, Staphylococcus aureus
  CDS (1)...(921)
atgagtcagaaaatactagtaatatatagcaaacccagtcaatgtcatatacagcgatttataaatattgtaaaatatgatagatacacgaatcgtaaaggagagagacaagtggaggataagaattcagttattgtatttaaaaatgtttcatttcaatatcaaagtgatgcatccttcacattgaaagatgtttcttttaatatacctaaaggtcagtggacatctattgttggtcataacggttctgggaaatctacaattgccaagttaatgattggcatagagaaagttaaatctggagaaattttttataataatcaagctataacagatgataattttgaaaagttaagaaaagacataggaattgtatttcagaatccggataatcaatttgttggttcaattgtaaaatacgatgtggcatttggactcgaaaatcatgcggttccacatgacgaaatgcatagaagagtcagcgaagcacttaaacaagttgatatgttagaacgtgcagattatgaacctaatgcattatctgggggacagaagcagcgtgtggctatagcaagtgtattagcacttaacccctctgtcattatattagatgaggcgacttctatgttagatcctgatgcacgtcaaaatttattggatttagtgagaaaagttaaatcagaacataatattacaatcatttctattacgcatgatttatctgaggcgatggaagcagatcatgttatcgttatgaataaagggactgtctataaagaaggcacagcgattgaaatttttgaccatgcagaagagttaacaacaataggtctagatttgccattcccaatcaaaataaatcaaatgctgggacaccaaacatcattcttaacttatgaagggctggtggaccaactatga

SEQ ID NO: 8136 - DNA, 861 bp, Staphylococcus aureus
  CDS (1)...(861)
atgactatacgctttgacaatgtaagttatacctatcaaaaagggacaccataccagcatcaagctattcatgatgttaatacagaatttgaacaaggtaaatattacgccatcgttggacaaacgggtagtggtaaatcaacattgatacaaaatattaatgcactgttaaagccgactactgggacagttacagttgatgacattactattacacataagaccaaagataaatatattagacctgtaagaaaaagaattggaatggtatttcaattccccgaatctcaattatttgaggacacagtagagcgtgaaatgatatttggacctaaaaactttaaaatgaatttagatgaagccaaaaactatgcccatcgtctgttgatggatttaggcttttcaagagatgtaatgtcacaatcaccatttcaaatgtcaggtggacaaatgcgtaaaatagcgattgtatctatattggcaatgaatcctgatattatcgtggttgatgaacctacagcaggacttgatccacaaagtaaacgacaagtaatgcgattactaaagtcactacaaacagatgaaaataagacaattatcctaatttcacatgatatgaatgaagtcgcgcgttatgcagatgaagtcatcgttatgaaagaaggtagtatcgtgtcgcaaacatcaccaaaagagctcttcaaagataaagaaaaattggcggattggcatattggtttgccagaaattgttcagttacaatatgactttgaacaaaaacatcaaacaaaattaaaagatattgccttaactgaagaagcatttgtaagcttgtataaggagtggcaacatgaaaaataa

SEQ ID NO: 8137 - DNA, 663 bp, Staphylococcus aureus
  CDS (1)...(663)
atgaccaaaggaatcttaggaagaaaaattgggatgacacaagtattcggagaaaacggtgaattaatccctgtaacagtagtagaagctaaagaaaatgttgtattacaaaagaaaactgtagaagttgatggatacaacgcaatccaagttggatttgaagacaaaaaagcatacaaaaaagatgcaaaatctaataaatatgctaataaaccagctgaaggtcacgctaaaaaagctgacacagcacctaagcgcttcattcgtgaattccgcaatgtagacgtggatgcttacgaagtaggtcaagaagtctcagtagatacttttgtagctggcgacgttattgacgtaacaggcgtatcaaaaggtaaaggtttccaaggtgcaattaaacgccacggacaatctcgtggacctatgtcacacggttctcatttccacagagcaccaggttctgtaggtatggcttcagatgcttctagagtatttaaaggccaaaaaatgccaggacgtatgggtggaaacactgtaactgttcaaaacttagaagtagttcaagttgacacagaaaacaaagttatcttagtaaaaggtaacgtacctggacctaaaaaaggtttagtagaaatcagaacttcaattaaaaaaggtaataaataa

SEQ ID NO: 8138 - DNA, 807 bp, Staphylococcus aureus
  CDS (1)...(807)
atgaaaaataaattgattatagggcgatatttaccaattaattcttttgttcatcatcttgatccaagagcaaagttaatgtttgtttttctttttattatattaatatttttctgtcattcaccattaacatacctttgggtgtttgcacttatcttattctttatgagattagcaaaaattcaattatggttcctaatcaaaggtttaacgccaatatttttctttttaatcttcacattaatgatgcatatatttttaactaaaggtggatatgtattagttgaatggcatggtatcacgattgaaactaatggtattttagaagggctatatatatcactgcgtttaattgggattgtgatgattgcaacaattatgacactatctacaagtccaattgatttaacagatgcgtttgaaagattacttgcgccactaaagatgtttaaattaccagttcatcaattaagtatgataatgtccattgcgttacgattcatcccgacgttaatggatgagttagataaaatcattttggcgcaaaagtcacgtggttctgaaataagttcagggaacattgcaacacgtattaaatcatttattccattactagtgccactattcatctcagctttccaacgcgccgaagaattagcggtcgcaatggaagttaggggttatgatgccaatgttaagagaacgagctacagacagcttaaatggcaattgagagatacgttatctttaatcatgattatcccaattgcaattattttattcgtattaaaatattcaggagtgtaa

SEQ ID NO: 8139 - DNA, 438 bp, Staphylococcus aureus
  CDS (1)...(438)
atgcgtcaaacatttatggcaaatgaatcaaacattgagcgcaaatggtatgttatcgatgctgaaggccaaacattaggtcgtttatcatcagaagtagcatctatcttacgcggtaaaaataaagtaacttacacaccacacgttgatactggtgattatgtaatcgttattaatgcatcaaaaatcgaatttactggtaacaaagaaactgacaaagtttactaccgtcactcaaatcacccaggtggtatcaaatcaatcactgctggtgaattaagaagaactaacccagaacgtttaattgaaaactcaattaaaggtatgttaccaagcactcgtttaggcgaaaaacaaggtaaaaaattatttgtatatggtggcgctgaacatccacacgctgcacaacaaccagaaaactacgaattacgtggttaa

SEQ ID NO: 8140 - DNA, 399 bp, Staphylococcus aureus
  CDS (1)...(399)
atgactttggcacaagttgaatatagaggcacaggccgtcgtaaaaactcagtagcacgtgtacgtttagtaccaggtgaaggtaacatcacagttaataaccgtgacgtacgcgaatacttaccattcgaatcattaattttagacttaaaccaaccatttgatgtaactgaaactaaaggtaactatgatgttttagttaacgtacatggtggtggtttcactggacaagctcaagctatccgtcacggaatcgctcgtgcattattagaagcagatcctgaatacagaggttctttaaaacgcgctggattacttactcgtgacccacgtatgaaagaacgtaaaaaaccaggtcttaaagcagctcgtcgttcacctcaattctcaaaacgttaa

SEQ ID NO: 8141 - DNA, 717 bp, Staphylococcus aureus
  CDS (1)...(717)
gtgggaaattttatggctagtgttttatatcaacatggtacattaggcacattaatggcaggtttattaaaaggaactgcatcaataaatgaattattgcaacatggtgatttaggtatcgctacactaacaggttcaaatggtgaggtcatctttttagatggaaaagcctatcatgcaaatgaacataaagaatttgtggaattaaaaggtaatgagttaacaccatatgcaactgtaactaaattcgtagcagatacaagctatgaaacgaaagataaatcttctgaagcagtttttgcagaaattaaggaaaagatgttgagtgaaaatttattttctgcagtaaaaatttcaggcttatttaaaaaaatgcatgtacgtatgatgccggcacaagagccaccttatacacgtttaattgattcagctagaagacaacctgaacaaactgaaacatacgtcaaaggttcagtcgttgggttctttacaccagaactattccatggtatcgggtcagcaggattccatgtacactttgcaaatgatgatcgtaactttggtggacatgtcttagattttgaagtagaagatgttaaggtagaaatccaaaatatagaaacatttgaacagcattttccaattcaagatgaagatttcataaatgcaaatattgactataaagatattgcagacgaaattagagaagctgaataa

SEQ ID NO: 8142 - DNA, 624 bp, Staphylococcus aureus
  CDS (1)...(624)
atggctaattatgatgttttaaaattagacggaactaaatcaggttcaatcgaattaagcgatgcagtattcggtattgagccaaataatagcgttttattcgaagctattaatttacaacgtgcttcattacgtcaaggtacgcatgctgttaagaatcgttcagcagtaagcggtggcggacgtaaaccatggaagcaaaaaggaacaggtcgtgctcgtcaaggtacaatccgtgctccacaatggcgtggcggtggtatcgtattcggaccaactccaagaagttatgcatacaaaatgcctaagaaaatgcgtcgtttagctttacgctcagcattatctttcaaagctcaagaaaatggcttaactgtagttgacgcattcaacttcgaagctccaaaaactaaagaattcaaaaatgtattatctacattagaacaacctaaaaaagtattagtagttactgaaaacgaagatgtaaatgttgaattatcagcacgcaacatccctggcgttcaagtgacaactgctcaaggtttaaatgttttagatatcactaatgctgacagcttagtaattactgaagctgctgctaaaaaagttgaggaggtgctcggataa

SEQ ID NO: 8143 - DNA, 849 bp, Staphylococcus aureus
  CDS (1)...(849)
atgaaacatattgaaataagtaaagatgtaaagataccagtattaggtttcggagtatttcaaattcctcaagaacaaacagcagaagcggttaaagaagcaattaaagcgggttatagacatattgatacagcacaaagttatttaaatgaaactgaagtaggtcaaggtattgaagcttcaggtattgatagaagtgaactattcattacgactaaagtatggattgaaaatgttaactatgaagatactatcaaatcaatcgaacgatcattacaacgattaaatttggactatcttgatctagtgcttattcaccaaccttacaatgatgtatatggctcatggcgtgcattagaagagttaaaagaaactggtaaaattaaagcaatcggtgtatctaacttcagcgttgatcgaattgtagatttaggtattcataatcaaattcaaccacaagtgaaccaaatagaaattaatccattccatcaacaagaagaacaagttgcagcacttcaacaagaaaatgttgtcgtagaagcttgggcaccatttgcagaaggtaaaaatcaattattccaaaatcaattgttgcaggccattgcagataaatacaacaaatcaattgcacaagttattttacgctggttagtagaacgtgacattgttgtactcgcaaaatcagtgaatccagaacgtatggctcaaaacttagatatatttgattttgaacttacagaagaagataaacaacaaattgcgacattagaagaaagtaatagccaatttttctcacatgctgatccagagatgattaaagcacttacaagcagagaattagatgtttaa

SEQ ID NO: 8144 - DNA, 276 bp, Staphylococcus aureus
  CDS (1)...(276)
atggaagcaagagatattcttaagcgccccgtaatcactgagaaatcttctgaagcaatggctgaagacaaatacactttcgacgttgatactcgtgttaataaaacacaagtgaaaatggcagttgaagaaatcttcaacgtaaaagttgcaagtgttaatatcatgaattacaaacctaagaaaaaacgtatgggccgttaccaaggctatacaaacaaaagaagaaaagcgattgtaactcttaaagaaggatcaatcgacttatttaactaa

SEQ ID NO: 8145 - DNA, 429 bp, Staphylococcus aureus
  CDS (1)...(429)
atggcgattattattggttcagatgaagctggcaaacgattaaaagaagtcatcaaatcatacttattagacaataaatatgatgttgttgacgtaacagaaggacaggaagttgactttgttgatgcaactttggctgtagcaaaagatgttcaaagtcaagaaggtaacttaggtattgttattgatgcatttggtgcaggtagctttatggttgctacaaaaatcaaaggcatgattgctgctgaagtatcagatgaacgctctggatatatgactagaggccataacaattcaagaatgatcactatgggatctgaaattgttggagacacattagcgaaaaatgtcgttaaaggttttgttgaaggtaaatacgatggtggtagacaccaaatccgcgtagatatgcttaataaaatgtgctaa

SEQ ID NO: 8146 - DNA, 516 bp, Staphylococcus aureus
  CDS (1)...(516)
atgaagattgcattaggatgcgaccatattgttacagatacaaaaatgcgtgtatctgaatttttaaaatcaaaaggacatgaagtcattgacgtaggaacatacgatttcacaagaacacattatccaatttttggtaaaaaagttggcgaacaagttgttagcggtaatgcagacttaggtgtttgtatttgtggaacaggtgttggtattaacaatgctgtaaataaagtacctggcgttcgttctgcactagtacgtgatatgacatcagcgctatatgctaaagaagaattaaatgcgaacgttattggctttggtggacgtattattggtgagttattaatgtgcgatattatcgatgcatttattaatgctgaatataaaccaactgaagagaacaaaaaattaatcgctaaaattaaacatttagaaacaagcaatgctgatcaagctgatccacatttctttgatgaattcttagaaaaatgggacagaggcgaataccacgattaa

SEQ ID NO: 8147 - DNA, 981 bp, Staphylococcus aureus
  CDS (1)...(981)
atgtcaaaatcgcatcaaaaaatcgcatcaattgaacaattaagtaataacgaaggtatcatttctgcattagcatttgatcaacgtggtgctttaaagcgcatgatggcaaaacatcaaactgaagagccaactgtagctcaaattgaacaattaaaagtattagttgcggaagaattaacacaatatgcatcttcaattttattagatcctgaatatggtttaccagcttcagatgcacgtaacaaagactgtggattattacttgcttatgaaaaaactggatatgacgtaaacgctaaaggtcgtttacctgactgtttagtagagtggtctgcaaaacgtttaaaagaacaaggtgcaaatgctgttaaattcttactttactatgatgttgatgatgctgaagaaattaacattcaaaagaaagcatacattgaaagaatcggttcagaatgtgttgcagaagacattcctttcttcttagaagtattaacatacgatgacaacattcctgataacggtagtgttgaattcgcaaaagttaagcctagaaaggttaacgaagcaatgaaattattctcagaaccacgctttaatgttgatgtattgaaagttgaagtaccagtaaacatgaagtatgtagaaggctttgctgaaggtgaagtggtttatacaaaagaggaagcggcacaacactttaaagatcaagatgcagcaactcatttaccatacatttacttaagtgctggtgtttctgcggaattattccaagaaactttaaaatttgctcacgaagctggtgctaaattcaacggggtactttgtggccgtgctacatggtctggtgctgttcaagtatacattgaacaaggtgaagatgctgctcgtgaatggttacgtacaactggtttcaaaaatattgatgacttaaataaagtattaaaagatactgcgacatcttggaaacaaagaaaataa

SEQ ID NO: 8148 - DNA, 312 bp, Staphylococcus aureus
  CDS (1)...(312)
atgaatagagaagaagtccaattattaggttttgaaattgttgcatttgcaggggatgcacgttctaagtttttagaagcattaacagcagctcaagctggagattttgcaaaagcagatgcactgattgaagaaggaaacaattgcattgcggaagcgcatagagcacaaacaagcttgttagctaaagaagcgcaaggtgatgatattgcatacagtgtaacgatgatgcatggtcaagaccatttaatgacaacaattttactgaaagatttaatgaagcatttattagaattttataaaagagggtga

SEQ ID NO: 8149 - DNA, 1722 bp, Staphylococcus aureus
  CDS (1)...(1722)
gtgatgacaatgatgcaaaaattgatcgcacaaattgaaaaagggaagccatttttcgagaaattatcacgtaacatatatttaagagccatccgtgatggatttatttctgcaatgcctgtcatcttattctcaagtatctttctattaattgcatacgtgccaaatatatttggttttaaatgggataaaggcatggaagccattttaatgaaaccatataactatacgatggggcttgtagcatttttagtagcaggaacgacagcgaaatctttaacagattcatttaaccgtaagctagaaagtacaaatcaaattaactttatttctacaatgctagcagcgatgtgtggattcttgttcttagcttctgatccagccaaagatggtggattcttaagtgcatttatgggaactaaaggtttattaacagcattcttatcagcatttgtaactgttattgtttataacttctgtgtgaagcgcaatattacaattaaaatgccgaaagaagtaccgccgaatatttcacaagtatttaaggacttaattccattttcagcggtaatcatcattctttatgcattagatttagtcattcgcaacagctttaaatcaaatgtagcggaaggtattttaaaattattcgaaccattatttacagcagcagatggatggattggtgtcacaattatctttggtgcctttgcattattctggtttgtaggaattcatggtccatcaatagtagagccagcaattgcagccattacatatgcgaatatcgaagcgaacttcaagttgcttcaagctggagaacacgcagataaaattattacatcaggtacacaaatgtttatcgttacttttggaggtacgggtgcaacattggtcgtcccgttcatgtttatgtggatgacgaaatctaaacgaaacaaagcgattggacgtgcatcagttgtaccaacattctttggtgtaaacgaaccaattttatttggtgcaccactagtattgaatcctgtgttctttattccatttgtattagcaccaattgttaacgtatggattttcaaacttttcgttgaagtgttaggaatgaatagttttagtgtgaatttaccttggacaacaccaggtccattgggcattatcatgggtacaggttttggtttatggtcattcgtactagctattactttgattgttgtagatattattatttactacccattcctaaaagtttatgatagtgaaattcttgatgaagaagaaggacgtaaagaaagtaattcagatttaaaagaaaaagttgcagcaaactttgatacgaaaaaagctgattcaattttagcggcaagtggtgtatcagacgatgcagctaaagcttcaaatatcacagaacaaacaaatgtcttagtactttgtgccggtggtggtacaagtggattattagccaatgcacttaataaagcagctgaagaatatcatgtgccagtgaaagcagcagctggcggatatggcgcacatatggacattatgaaagagtaccaattaatcattttagcgccacaagttgcgtctaactatgaagatattaagcaagatacagatagattaggtattaaattagcgaagactcaaggtgctgaatatatcaaattgacacgagatggccaagcagcccttgatttcgttcaacaacaatttgaaaattaa

SEQ ID NO: 8150 - DNA, 1413 bp, Staphylococcus aureus
  CDS (1)...(1413)
atgactaaaacattacctgaagattttatttttggtggagcaacagcagcatatcaagcagaaggtgcgacaaatacggatggtaaaggtcgcgtagcatgggatacgtatttagaagaaaactattggtacactgcagaaccagcgagtgatttttataacagatatccagtggatttagaattaagtgaaaaattcggtgttaatggtatccgtatttcaattgcatggtctcgtatcttcccaaatggatatggcgaagttaaccctaaaggtgttgagtattaccataagttatttgcggagtgtcataaacgtcatgttgaaccatttgtaacattgcatcattttgatacaccagaagtgttacacaaagatggcgattttctaaatcgtaaaacgattgactactttgtagattatgctgaatattgttttaaagaattcccagaagtaaaatattggactacattcaatgaaattggaccaattggtgatggccaatatttagtaggtaaattccctccaggtattaaatatgattttgaaaaagttttccaatctcatcataatatgatggttgctcatgcaagagcagtaaaattatttaaagatggtggctatcaaggagaaattggtgttgtacacgcattgccaacaaaatatccgttcgatccatcaaatcctgaagatgttcgtgcagcagaattagaagatatcatccataataaattcatcttagatgcaacatatttaggtaagtattctcgtgaaacgatggaaggtgtgcaacatatcttatctgttaatggcggtaaattaaacattacagatgaagattatgccattttagatgcagccaaagatttaaacgacttcttaggtatcaattactacatgagtgactggatgagaggttacgatggagaatctgaaatcacgcataatgcgacaggtgataaaggcggttctaaataccaacttaaaggtgtcggacaacgtgaatttgatgtcgacgtacctcgcacagactgggactggatgatctatcctcaaggtttatatgatcaaatcatgcgtgttgttaaagattatcctaactatcataagatttatatcactgaaaatggtttaggatataaagatgaatttattgaatctgaaaaaacagttcatgatgatgcacgtattgattatgtaagacaacatttaaacgttattgcagatgctattaaagatggtgcaaatgttaaaggttactttatttggtcattaatggatgtgttctcttggtcaaatggttatgaaaaacgatatggtttattctatgtcgattttgagactcaagaacgctatcctaagaaaagtgcttattggtacaaagagttagccgaaacaaaagaaattaaataa

SEQ ID NO: 8151 - DNA, 834 bp, Staphylococcus aureus
  CDS (1)...(834)
atggctattaaaaagtataagccaataacaaatggtcgtcgtaatatgacttcgttagatttcgcagaaatcacgaaaactacacctgaaaagtcattattaaaaccgctaccgaaaaaagcgggacgtaacaaccaaggtaaattgactgtaagacaccatggtggtggacacaaacgtcaataccgtgttatcgatttcaaacgtaacaaagatggtatcaatgcaaaagttgattctattcaatatgatccaaaccggtcagcaaacatcgctttagttgtatatgcagacggtgaaaaacgatatatcattgctcctaaaggattagaagtaggtcaaatcgttgaaagtggtgctgaagctgacatcaaagttggtaacgcattaccattacaaaacattccagttggtacagtagtacacaacatcgagcttaaacctggtaaaggtggacaaatcgctcgttcagctggtgcaagtgctcaagtacttggtaaagaaggtaaatacgtattaatcagattaagatctggtgaagttcgtatgatcttatctacttgccgtgctacaatcggtcaagttggtaacctacaacacgaattagttaacgttggtaaagccggacgttcaagatggaaaggtatccgtccaacagttcgtggttctgtaatgaaccctaacgatcacccacacggtggtggtgaaggtcgtgctcctatcggtagaccatctccaatgtcaccatggggtaaacctacgcttggtaagaaaactcgtcgtggtaaaaaatcatcagacaaacttatcgttcgtggacgtaagaaaaaataa

SEQ ID NO: 8152 - DNA, 1008 bp, Staphylococcus aureus
  CDS (1)...(1008)
atgatgcaaaataaacaaatactttttaataaaataccagaaggcatgcctcaagaggatacattcaaaattgaagatgttgacacgcctaaacttgagagcgatggtgtacttgtacaaacactgtatatttcagtggatccatatatgagaggacgtatgactaaggcagattcgtatgtacagccttttgaaatcggtaaaccgattgttagccatgtcgttgcaaaagtaattgattcgacactcgcagattataaaaaaggagatgtcgttgtaggtatgttgccttggcgaatcattaatcatgtccaagcggatcaaattactaaagttccaacgacagatgtaccacttgatttatatttaagtgttttaggaatgccaggacaaacagcatatcatggtctgcttgatattggacaacctaaagacggtgatactgttgtggtttcagctgcatctggtgctgtaggttcagttgtaggtcaaattgctaagattaaaggttgccgtgtagtaggtattgcgggtggcgacaaaaaagtaaattatttaacagagacactgggctttgacgctggtattgattataagaaagaggattttgcagaagcgttagcacaagcagtaccagatggtattgatgtttattttgaaaatgttggtggtacagttggcgatgaagtatttaagcatttaaatcgttttgcacgtgtaccagtatgtggcgcaatttcgtcatataatcatcctgaagcaggtatcggaccacgtattcaaggtacgcttattaagaagcaagtaatgatgagaggcttcttagtaagtgaattcgctgatgattttaaagaagctagtgaacagcttgcaacatgggttcaagaaggtaaaattcagtcacaagtaaccattgaagatggttttgaaaatgcgccacgtgcatttaaaaatttatttactggcgataactttggtaaacaagttattaaagtatcggaattataa

SEQ ID NO: 8153 - DNA, 1008 bp, Staphylococcus aureus
  CDS (1)...(1008)
atgaaaatgataggatttgaaaagccctttaaattggaagaaggaaatttatttaaagtatacgaacaaagaaagccaacgccagaaaacgatgatatcttagtcaaagtaaatagcattagtgtaaatcctgtagatacaaagcaacgacaaatggaagtcactcaagtacctcgtgtacttggatttgatgctattggtactgttgaagctatcggaccagacgttacattatttagtccgggtgacgttgtattttatgctggatcgccaaatagacaaggatcaaatgcgacatatcaattggtgtcagaagctatagttgcaaaagctccacacaacataagtgctaatgaagcggttagtctaccgctaactggtattacggcatatgaaacgttttttgatacatttaaaatttcacataatccttctgaaaatataggtaaatccgtgttaatcattaatggcgctgggggtgtaggaagtattgccactcaaattgctaaacggtatggtttaactgtcattacaacagcatcacgacaagaaacaacagagtggtgtgaaaagatgggcgcagatatcgtattgaatcatagagaggatttagtgcttcaatttaaagaaaaagaaattccattagtagattatatattttgcacctataatacagacttgtattacaatactatgattgaactgataaaaccgttagggcatattacaactatcgtagcttttaatgaagatcaagatttaaatgcattaaaattaaaaagtataacatttacacatgaatttatgtttgcgcgtccaattcatcgaacgcctgatatgattaaacaacatgagtatttagaagatattacgaaaaatatagaatcaggacattaccaaccaacaacgacacaagtttttgaaggtttgtcacctgaaaacttatatcaagcacatcaattattggaaaaacagtcaatgattgggaaattagtaattaatatatag

SEQ ID NO: 8154 - DNA, 549 bp, Staphylococcus aureus
  CDS (1)...(549)
gtgtcgttaggggtgaaacgacttaaaaactttatccttggcttattaatagtagtaatcgtggggttcctgttattcatgtatatccaagatggacgtataactgaatatcaagactacttccttcaatttgaatggttccaaccattacttatttcacttgctgcactattgatattaataggtcttatattagtatttagtatcttcaaacctacgcatcgaaaacctggattatacaaagacttcgatgatggtcatgtttacgtatctcgtaaagctgttgaaaaaactgcatttgatacagttgcaaaatatgaccaagtaagacaaccgaatgtagttgcaaaactatataacaaaaaaaataaatcttatatcgacattaaaactgactttttcgtaccaaataatgttcaagtacaatctttaactgaagcaattcgtgcggatattaaaaagaatgtagaatatttcacagaaatgccagtacgtaagttagaagttaatgtgagagatcagaaaacttctggtccacgagtgttgtaa

SEQ ID NO: 8155 - DNA, 1977 bp, Staphylococcus aureus
  CDS (1)...(1977)
atgaacttgaacttaatttttaaagaacagacattaaaatttaacaaagaagaacaagaaacatatttatttttacaacaacataatagcgattgggctaatatttttaaagagatgattttacaaggaagagataaagtcactcagagattagtgacatcaatgcatcgcgaaaacttagttaaagcgcgcactcaaagtaagaaaatattgagtcgtgatttgattatgttagatatctcaacgactcatacactagaaatccagttcccacaagctaagcaaacattatatgctcctatcactggagaacacgcctttgatcgaattgatgttgaaggccctttctacattaaagatgacattacaaatacgattacacgagtacaccatccaaatgaaattcttgagtgtattttaattgaagcaccagatttaaaaaatgctgctagtgatcaatttcagcaagatttaataaacagtgcaactaatatgacatttgcaattagctatcaagcactgtcaatgcaacatgattctgcacctttatttaatattatcgaaaatagcgaagatagttacttgcgttcagagcaagccgttattgaaggtcatccgctacatcctggggctaaattacgtaaaggtttaaatgcattacaaacattcctatattcttcagaattcaatcaacctattaagttgaaaatagtactgattcacagtaaattaagccgtactatgtcactgtctaaagattatgatacaactgttcatcaactatttccggacttaattaaacaattggaaaatgaatttacgccaaactttaactttaatgattatcacattatgattgtacatccatggcaattagatgacgtattacattctgattatcaagcagaagtagataaaaaattaatcattgaagcaaaacatacgttggattattatgctggtttatctttcagaacattagttcctaaatacccagctatgtcgccacacatcaaattgtcgacaaacgttcatattacaggtgaaattcgtacattatcagaacaaacgacgcacaatggtccactaatgacacgtattttaaatgatattttggagaaagatgtcatatttaagtcctatgcatcaacaattattgatgaagttgctggtattcatttttataatgagcaagacgaagcagactatcaaactgaacgaagtgaacaattaggtacattatttagaaaaaacatataccaaatgattccacaagaagtcacaccaatgattccttcaagcttagttgcaacctacccatttaacaatgaatcacctatcgtgacattgattaaacgttatcaatcagctgcatcattgtctgattttgaatcatcggcgaaatcgtgggttgaaacttatagtaaagcattgcttggtctcgtaatcccactagttactaaatatggcattgcattagaggctcacttgcaaaatgctattgcaacattccgaaaagatggtctattggacacgatgtatattagagactttgaaggtttaagaattgataaagcacaactaaatgaaatgggatacagtacatctcatttccatgaaaaatcaagaattcttactgattcaaaaacgtctgtgtttaacaaagccttttattctaccgttcaaaaccatttaggcgaattaattcttacaatctctaaagcatcaaaagattcaaacttagaaagacatatgtggtatatcgttcgtgatgtactagataacatctttgatcaacttgtactttcgacacacaaatctaatcaagtaaatgagaatcgcataaatgaaattaaagataccatgttcgcgccatttatagattataagtgtgttacaacaatgcgtcttgaagatgaggcacatcattatacttatattaaagttaataaccctttgtatcgagaaaataattaa

SEQ ID NO: 8156 - DNA, 1014 bp, Staphylococcus aureus
  CDS (1)...(1014)
atgaagttatacatattaaggagtggaacgatgagaggtctaaaaacttttagtatattgggattaatagttgccttatttttagttgcagcttgtggtaatacggataattcaagtaaaaaagaatcatcaactaaagatactatttcggtaaaagatgaaaatggtacagtaaaagtacctaaagatgcaaaacgtatcgttgtattagagtactcatttgcagatgcattagcagcattagacgttaaaccagttggtattgctgatgatggtaagaaaaaacgtatcattaaaccagttagagaaaaaattgggaattatacttctgtaggtacacgtaaacagccaaacttagaggaaattagtaaattaaaaccggatttaattatcgctgatagcagtagacataaaggtattaataaagaattaaacaaaattgcaccaacattatcattaaagagttttgatggagactacaaacaaaacattaattcgttcaaaacaattgctaaagctttaaataaagaaaaagaaggcgaaaagcgtcttgctgaacatgataaattaatcaaaaagtataaagatgaaattaagtttgatagaaatcaaaaagtgcttccagcagttgttgctaaagctggtttattagcacatccaaactattcatatgttggacaatttttaaacgaacttggatttaaaaatgcattaagtgatgatgtaacaaaaggtttaagtaaatacttgaaaggaccttacttacaattagatactgaacatttagctgacttaaatcctgaacgcatgattattatgacagataatgctaaaaaagattctgctgaattcaagaagttacaagaagatccaacttggaaaaagttgaacgcagttaaaaataatcgcgtggatattgttgaccgtgatgtttgggcaagatctcgtggcttaatttcttctgaagaaatggctaaagaacttgttgaattatcaaaaaaagaacaaaagtaa

SEQ ID NO: 8157 - DNA, 327 bp, Staphylococcus aureus
  CDS (1)...(327)
gtgtgcggcttaaagctgcacgcacataataagaagggaggcgcccaaatggctcgtagtattaaaaaaggacctttcgtcgatgagcatttaatgaaaaaagttgaagctcaagaaggaagcgaaaagaaacaagtaatcaaaacatggtcacgtcgttctacaattttccctaatttcatcggacatacttttgcagtatacgacggacgtaaacacgtacctgtatatgtaactgaagatatggtaggtcataaattaggtgagtttgctcctactcgtacattcaaaggacacgttgcagacgacaagaaaacaagaagataa

SEQ ID NO: 8158 - DNA, 540 bp, Staphylococcus aureus
  CDS (1)...(540)
atgctagataaaaatcaattagctaaatataaacaagatcatttatgtgaatatgaaaaaataatgagtaacaatgaaaaagaagcgcttgaagagaaggtagcgtcattagatttagattttattgccaaattatataacgatttatacatcaataagagaacaatagatgatgtatctgcagtttctgaagtgaaatatgatattaaatcacaaatgagtgatgatgagattaagcgtatagaggatcaaggacttcaagctattaaagaaggacagtttgcagtacttttgatggcaggtggtcaaggaacaagacttggttacaagggacctaaaggttcgtttgaaattgaaggtgtaagttcatttgaacttcaagctaaccaattacaaacattgaatcatcaatctggacatacgattcaatggtatattatgaccagtgatatcaatcatgaagaagctttagctaattgcaaagcacatagttatttgggaaatgaccaaaagccaatcccactctttaaaacaagataa

SEQ ID NO: 8159 - DNA, 687 bp, Staphylococcus aureus
  CDS (1)...(687)
atgaccaaaagccaatcccactctttaaaacaagataatattggggcgttaagtaaagaagggaagttatttttaaaccaacagggtcgtattatggaaacgccgaatggaaatggtggcgtgtttaaatctttagacaaggcaggatacttagaagaaatgtctaataatggcgttaagtatattttcttgaataatatcgataatgttttagtaaaagtgttggatccactatttgcaggatttacggtagaacatgattacgatattacttctaaaacgattcaaccaaaaccaggagaaagtgttggacgattagttaatgtcgattgtaaagatacagtattggagtattcagaattagatccagaagttgcaaatcaatttaacaatgctaatatcggtattcatgcatttaaacttggctttattttaaatgctgtaaatcgtgaattaccttatcatttagctattaagaatttgaagcaattagatgagaactttggggttattgaacaaccaactttaaaattcgaattgttctattttgacatatttacttatggaactagttttgtcacgttacaagttcctagagaagaagagttctcacctcttaaaaataaagaaggtaaagatagtgttgcaacagcaactgaagatttacgtagaatgggtttaatttaa

SEQ ID NO: 8160 - DNA, 354 bp, Staphylococcus aureus
  CDS (1)...(354)
atggaagcaaaagcggttgctagaacaataagaatcgcacctcgtaaagtaagactagttcttgacttaatcagaggtaaaaatgctgctgaagctattgcaattttaaaattaacaaacaaagcttcatcaccagtaattgaaaaagtattaatgtccgctttagctaatgctgaacataactatgacatgaacacagatgaattagtagttaaagaagcatatgctaacgaaggaccaacattaaaacgtttccgtccacgtgcgcaaggtcgtgcaagtgcgattaacaaacgtacaagccacattacaatcgtcgtaagtgacggtaaagaagaagctaaagaagcttaa

SEQ ID NO: 8161 - DNA, 654 bp, Staphylococcus aureus
  CDS (1)...(654)
gtgggtcaaaaaattaatccaatcggacttcgtgttggtattatccgtgattgggaagctaaatggtatgctgaaaaagacttcgcttcacttttacacgaagatttaaaaatccgtaaatttattgataatgaattaaaagaagcatcagtttctcacgtagagattgaacgtgctgcaaaccgtatcaacattgcaattcatactggtaagcctggtatggtaattggtaaaggcggttcagaaatcgaaaaattacgcaacaaattaaatgcgttaactgataaaaaagtacacatcaacgtaattgaaatcaaaaaagttgatcttgacgctcgtttagtagctgaaaacatcgcacgtcaattagaaaaccgtgcttcattccgtcgtgtacaaaaacaagcaatcactagagctatgaaacttggtgctaaaggtatcaaaactcaagtatctggtcgtttaggcggagctgacatcgctcgtgctgaacaatattcagaaggaactgttccacttcatacgttacgtgctgacatcgattatgcacacgctgaagctgacactacttacggtaaattaggcgttaaagtatggatctatcgtggagaagttcttcctactaagaacactagtggaggaggaaaataa

SEQ ID NO: 8162 - DNA, 435 bp, Staphylococcus aureus
  CDS (1)...(435)
atgttactaccaaaacgtgtaaaatatcgtcgtcaacatcgtcctaaaacaactggtcgttctaaaggcggtaactacgtaacatttggtgagtttggtttacaagctacaacaacgtcttggatcacatctcgtcaaatcgaatctgctcgtatagcaatgacacgttacatgaaacgtggcgggaaagtttggattaaaatcttcccacatacaccatatactaaaaaacctttagaagtacgtatgggtgctggtaaaggtgcggttgaaggctggatcgcagttgttaaaccaggtagaattttattcgaagttgctggcgtttctgaagaagttgcgcgtgaagcactacgtttagcaagtcacaaacttccagtaaaaactaagtttgtaaaacgtgaggaattgggtggtgaaacaaatgaaagctaa

SEQ ID NO: 8163 - DNA, 1206 bp, Staphylococcus aureus
  CDS (1)...(1206)
atgagtgaaaaaaagattttgattttatgtcagtatttttatccggaatatgtatcttctgcgacgttaccaacacaattggcagaagatttaattgcgaatcacattaatgtcgatgtcatgtgtggatggccatatgaatatagtaatcataaacaggtttctaaaaccgagatgcatcgtggtattcgcattcgacgtctcaagtattcgaggtttaataacaaaagtaaggttggaaggatcatcaatttctttagtttattttcaaaattcgtgattaatatacctaaaatgttgaaatatgatcagattcttgtttactctaatccaccaatcttgccattaataccagacgtactacacagactgcttaagaaaaaatattcttttgtggtgtatgatatagcacctgataatgcgattaagacaggtgcaacacgtccaggtagcatgattgataaactgatgcgttacattaataaacatgtctacaagaatgctgaaaatgtcattgtccttggtacggaaatgaaaaactatttagtaaatcatcaaatttctaaaaatcctgacaatattcatgtgatccctaactggtatgacatgcgtcagttacaagacaatcgtatctataatgacacatttaaagcttaccgtgagcaatacgacaaaattatattgtatagcggtaatatggggcagttacaggatatggagacacttatctcatttttaaaattaaataaggatcagcctcaaacgttaacaatactttgtggtcatggtaagaaatttgcagatgtcaaaacggcaatagaagaccatcgtattgaaaatgttaaaatgtttgagtttttaacaggtacagactatgctgacgtattaaaaattgcggatgtatgtattgcatcgctgattaaagaaggcgttggtttaggcgtgccgagcaagaattatggctaccttgcagctaagaagccgttggtactcatcatggataagcaatctgatatcgttcaacatgttgaacaatatgatgcgggtatccaaattgataatggcgatgcacatgccatttataacttcatcaacactcactcgagtaaggaattgcacgagatgggtgagcgcgcacatcaactgtttaaagataaatatacgagagaaattaatactatgaagtattacaatctgttgaagtga

SEQ ID NO: 8164 - DNA, 558 bp, Staphylococcus aureus
  CDS (1)...(558)
atgaagcgattattcgatgtagtgagttcaatatatggtttagtagttttaagtccgattctgttaattacagcattactaattaaaatggaatcacctggaccagccattttcaaacaaaaaagaccgacgattaataatgaattgtttaatatttataagtttagatcaatgaaaatagacacacctaatgttgcaactgatttaatggattcaacatcgtatataacaaagacagggaaggtcattcgcaagacctctattgatgaattgccacaattattgaatgttttaaaaggagaaatgtcaattgtaggtcctagaccagcgctttataatcaatacgaattaatcgaaaaacgtacaaaagcgaacgtgcatacgattagaccaggtgtgacagggctagctcaagtgatggggagagatgatattactgatgatcaaaaagtagcgtatgatcattattacttaacacatcaatctatgatgcttgatatgtatatcatatataaaacaattaaaaatatcgttacttcagaaggtgtgcatcactaa

SEQ ID NO: 8165 - DNA, 204 bp, Staphylococcus aureus
  CDS (1)...(204)
atggataaagaatctgtcgtagcaagtttagcaagaaataaaaagattgctgtagaaacaatggccggtcaaagatacatcatagaacgcattttacatacaaatgatgaaaaacatattcatattttgaaacctaaagatgtcgtgttagatgtagatagcatcaaagaaattgacgaaaatcatttaaatgatgcaacataa

SEQ ID NO: 8166 - DNA, 981 bp, Staphylococcus aureus
  CDS (1)...(981)
gtgacgatgaaaaggttaagcataatcgtcatcattggaatctttataattacaggatgtgattggcaaaggacgtctaaagaaccgtctaaaaatgcccaacagcagcaagtgattaaaattggatatttgccgattacacattcagctaatttgatgatgactaaaaaattattatcacaacacaatcatccgaaatataaattagaattagttaaattcaataattggccagatttaatggacgcattaaacagtggtcgtattgatggtgcatctaccttgatagagctcgcgatgaaatcaaggcagaagggctcgaatataaaggctgtggcattgggtcatcatgaaggcaatgtcattatgggacaaaaaggtatgcacttaaatgaatttaataataatggcgatgattaccattttggtataccacatcgttattcaacacattatcttttacttgaggaattacgtaaacaactgaagattgaaccgggtcattttagctatcatgaaatgtcgccagcggagatgccagccgcattaagtgaacacagaattacagggtattctgtagccgaaccattcggtgcactgggtgaaaagttaggcaaaggcaagactttgaaacatggtgatgacgttatacctgatgcgtattgctgtgtgctagtactgagaggcgaattgcttgatcaacacaaggatgtagcgcaagcatttgtacaagattataaaaagtctggctttaaaatgaatgatcgcaagcaaagtgtagacattatgacgcatcattttaaacaaagtcgtgacgttttaacacagtcagcggcatggacatcctatggtgatttaacaattaagccatccggctatcaagaaattacgacattggtaaaacaacatcatttgtttaatccacctgcatatgatgactttgttgaaccgtcattgtataaggaggcatcacgttcatga

SEQ ID NO: 8167 - DNA, 7194 bp, Staphylococcus aureus
  CDS (1)...(7194)
atgaaagaaggactttttatgattatgggtaatttgagatttcaacaggaatattttcgtatatacaaaaataatacagaatcaacgacacaccgtaatgcgtattgggttaaactcgctgaaaatgttgaagctactaaaatgatgtatgcattatcgacaattgtgcaacaacatgcatctataagacatttttttgatgttactaccgatgacaatttaacaatgatacttcatgaatttctgccttttattgagataaaacaagttccatcttcttccgcaaactatgatttagaagctttttttaagcaagaattaagtacttaccattttaatgattcacctttattcaaatttaaattgtttcagttcgctgatgctgcatatatactattagattttcatgtgtctattttcgatgatagtcaaattgatatttttcttgatgatttatgcaatgcatatcgtggcaatactgttattaacaatactcgacagcatgcacatttaaatagaaatgatgataaagacaatcaagatgcatcgcatatagcattagactcaaactattttcggttagagaaaaactctgacatccatattgatagttatttaccaattaagcatccatttgagcaagctttatatcaaacgtatttaattgatgatatgacatcaatagatatggcatcgttggctgttagtgtgtatttagctaatcatataatgagtcaacaacatgatgtcacattaggtatacatgtaccatcacatttaccaaatgatttacacggaaatattgtgccattaacgttaacaatcgatgcaaaagatgtatgtcaacgttttacaacagattttaataaatgtgtgttgcaaaatatgtcgcaattacagtgcgcgaagtcttcgctttcattagagactatttttcattgttatcatcaaatgatgccttgttgtaatgatgttattgaggatgtacatcaaatacatgatgcacatacatctttagcggatattgaaatttttccacatcaacacgggttcaaaattatatataacagtgcagcatatgatttgctctcaatcgagacgctgagtgacttagttcgtaatatttatttgcaaattactgaagaaaatggaaataaacgaacaactgtagatgaacttaatttgatgacagaacgtgatattcaattatatgacgatatcaatttaagtttgcctgatttagatgatgcgcaaacagttgttaccttatttgagcaacaagttgaagcaacgccgaatcatgtcgctgtacaatttgacggagtgtttataacatatcaaacattgaatgcacgcgcgaatgatttagcacaccgtttgagaaaccagtacggtgttgaacctaatgatcgtgttgctgtcatagctgaaaaaagtattgagatgataatagcgatgataggtgtgttgaaagctggtggggcttacgtgccaattgatccgaactatccaagtgatcgtcaggagtacattttaaaagatgcaacgcctaaagttgtaataacgtaccaagctttatatgaaaatagtaaacaaaatattaatcacattgatttgaacaagatagcgtggaaaaatattgacaatctttctgaatgtaacacgttagaagatcatgcgtatgttatttacacgtcggggacaactggtaaccctaaagggacactaattccgcaccgaggtattgttcgcttggtccatcaaaatcattatgtaccattaaatgaagagacgacgattttgttatcaggaactatagcctttgatgctgcaacatttgaaatatatggtgcattgctcaatggtggaaaactgattgttgctaaaaaagaacaattattaaatccaatagcgttagaacaattgatcaatgaaaatgacgttaatactatgtggttaacctcctcattatttaatcagattgctagtgaacgaatagaagtattggtaccgttaaagtatttattaattggtggagaagtattgaatgctaagtgggtggatttgcttaatcaaagaccgaagcatcctcaaattattaatggttatggaccaactgaaaatacaacatttacaacgacgtataatatacctaacaaagttccaaatcgtattcctattggtaaaccgattcttggtactcatgtttatatcatgcaaggcgagcgtcgatgtggcgttggtattcctggagaattatgtacaagtggctttgggttagctgcaggttatttaaatcagccagaattgacagcagataaatttatcaaagattcaaatataaatcagctgatgtatagaagtggtgatatcgttcgtctgttacccgatggcaacatagattatttatatcgaaaggacaaacaagttaagattcgagggtttaggattgagttgtcagaggttgagcatgcgctcgagcgtatacaaggtattaataaagctgttgttattgttcaaaatcatgatcaagatcagtatatcgttgcttattatgaagcgatgcatacattatcacataataagattaaatcacaattacgtatgaccttaccggagtacatgataccagttaattttatgcatattgagcaaattcctattactattaatgggaaattagataagaaggcattgccgatcatggactatgtcgatacggatgcctatgtagcaccgagcacagataccgaacacttgctatgccaaatttttgcagatattttacatgtgaatcaagtaggtattcatgataatttctttgaattaggcggccattcattaaaagcaacgttagtggtgaatcggatagaggcatctactgggaaacgattacaaattggtgatttattacaaaagccaactgtatttgaactagcacaagcaattgctaaggttcaagaacaaaactatgaagtgattcctgaagctatagttaaagatgattatgtgttgagctctgcacaaaagcgtatgtatttattatggaaatcaaaccataaagatacggtgtataacgtaccttttttatggcggttatcatcagaacttaatgtagctcaattgcgacaagcagttcagcatttgatagcgcgacatgagattctacgaacacaatatattgttgtagatgatgaggttcgacaacgtattgtggcagatgttgtagctgactttgaagaagttaacacgcattttacggatgaacaagaaatcatgcgccaatttgtggcaccttttaatttggaaaagccaagtcaaattagagtgagatacattagaagtccattacatgcatacctgtttatagatacacatcatatcattaatgacggtatgagtaatatacaattaatgaatgatcttaacgcactttatcaacataaattattgttaccacttaaattgcaatataaagactatagtgagtggatgtcgcatcgtgatatgacgaaacatagacaatattggttatctcaattcaaagatgaagtacctatcttaagcttaccgacagactatgttagaccaaatattaaaacgacaaatggagcaatgatgtcatttacaatgaatcaacaaacgagacagctacttcaaaaatatgtagaaaagcatcaaattactgattttatgttctttatgagtgtggtcatgacgttgttaagcagatatgctcgaaaagatgatgttgttgtcggtagtgtaatgagtgcgcgtatgcataaaggcgcggagcaaatgctaggcatgtttgctaatacgttggtatatagagggcaaccgtcacctgataaaatgtggacacagtttttacaagaagttaaggaaatgagtttggaggcatacgagcatcaagaatacccattcgaatgcttagtaaatgacttagatcaatcacatgatgcctcacggaatccattatttgatgtcatgttagtactacaaaacaatgaaacgaatcatgctcattttgggcatagtaaattaacacacattcaacccaaatcggtgacggcgaaatttgatttatctttcatcattgaagaagatcgcgatgactatacaatcaatatcgagtataataccgatttatatcactcagaaacagttcgtcacatgggtaatcaatgtatgattatgattgattatattttgaagcatcaagatacactacaaatttgcgatataccaaatggcacggaggaacttctaaattgggtcaatacgcatgttaacgatcgaatgcttaatgtcccgggaaataaatctatcataagttactttaatgaagttgtctcacgacaaggtaatcatgttgcgctagtcatgaatgatttgacaatgacatatgaaacattacgcaactatgtggatgccattgcgcacatactcctatcaaatggtgtgggcaatggtcaacgggttgccttgtttacagaacgtagttttgaaatgattgcggcgatgttggcgacagttaaagtaggtgcatcttatatacctatcgatattgattttccgaaaaagcgacaaggcgcaattttggaggatgctaaagtaactgcagtcatgtcttacggcattgaaattgaaacgacattaccagtcattcaattggaaaatgctaaaggttttgttgaatcaaaggaaaatgaacaatatgatgatttacatggcgatcaacttgaaaacacagcgatgttagataatgagatgtatgctatttacacatctggtacgaccgggatgcctaaaggggttgccatacgacaacgaaatttgttgaatttagtgcatgcatggtcaactgaattgcaattaggcgacaatgaagtatttttgcaacatgcaaatattgtttttgatgcatcagttatggagatttattgttgtttgttaaatggtcatacgcttgtgattccagatagagaggaacgtgttaatccagcacagttacaacaactcattaataagcatcgtgtgacggtggcgtcgattccattacagatgtgtagtgttatggaagacttttatattgaaaaattgattacaggtggggcaactagtacggcatcctttgttaaatatattgagaagcattgcggcacgtatttcaatgcctatggaccatctgagtcaacagtcatcacatcgtattggtcacatcaatgtggtgatttgatacctgagacgattccaattggcaaacccttatctaacatccaagtgtatattatgtcagagggtttgttatgcggtattggtatgccaggcgagttgtgtattgcaggtgatagtttagcgataggatatattaaccgtccagaattaatggctgataaatggcaaaataatccatttggtaaaggaaagttgtatcatagtggtgatttagcacgttatacatctgatggtcaaattgaatttttaggaagaatagataaacaagtgaaagttaacgggtaccgtattgaacttgatgaaattgaaaatgcaatattagctattcgtggtatatctgattgtgttgtcacagtaagtcactttgatacgcatgatatattgaatgcttattatgtcggagagcaacaagtggagcaggatttgaagcaatatttaaatgatcatctgcctaagtatatgattcctaagactataacgcatatcgattgtatgccattaaccacgaatgacaaggtggatactacgcgtttgccaaatccatcacctatacaacagtctaataaagtgtatagcgaaccatctaatgaaattgagcagacatttgttgatgtattcggagaggtattgaaacaaaatgatgtcggtgttgacgatgatttctttgaacttggtggtaactcattagaggcgatgttagttgtctcggatttaaaacgatttggccatcatatttcaatgcagacattatatcaatataaaaccgtgcgacagattgttaattatatgcaccaaaatcaacaatcattagttgcattaccggataatctttcggaattacaaaacatagttatgactcgttataatttgggtattttagaggatagtctaagtcatcgacctctaggaaatacactattgactggtgctacagggtttttaggtgcttatctgattgaagcactacaaggatacagtcatcgcatttattgtttcgtacgtgctgataatgaggaaatagcatggtataagttgatgacgaatttaaatgattatttttcagaagagacggttgaaatgatgttatcaaacattgaagtcattgttggtgattttgagtgtatggatgatgttgttttaccagaaaacatggatacgattattcatgcaggtgctcgtacagatcattttggtgatgatgatgaatttgaaaaagtaaatgttcaaggtactgttgatgtcatacgtttggcacaacaacatcatgcaaggttaatatatgtgtctacgataagtgtgggaacttattttgatatagacacagaagatgtgacattttcagaagcggatgtctataaaggacaactactaacatcaccatatacacggagtaaattttatagtgaattaaaagtattagaagctgtaaataatggcttagatggtcggattgtacgtgttggtaatttgacgagtccttacaatgggagatggcatatgagaaatataaagactaaccgtttttcaatggtaatgaatgatttgttacaactgaattgtatcggggttagcctcgctgaaatgcctgtagatttttcttttgtggatacgactgccagacaaattgtcgcattagcacaggtcaacacaccacaaatcatttaccatgtgctatcacctaataaaatgccggtgaaatctttgttagaatgcgttaagcgcaaagaaattgaactcgtcagcgatgaatcatttaatgaaattttacagaaacaagacatgtacgaaacgattggattaactagtgttgaccgtgaacaacaactagcaatgatagatacaaaattaacattaaaaataatgaatcacatcagtgaaaaatggccaacgataactaacaattggctgtatcattgggcgcaatatatcaaaacaatattcaataagtaa

SEQ ID NO: 8168 - DNA, 2610 bp, Staphylococcus aureus
  CDS (1)...(2610)
atgttaactatacctgaaaaagaaaatcgtggatcgaaagaacaagaagtggcaattatgattgatgctctagctgacaaagggaaaaaagcattagaagcattatctaaaaagtcacaagaagaaattgatcatattgttcatcaaatgagcttagcagctgttgatcaacatatggtgctagcaaaattagcacatgaagaaactggaagaggtatatacgaagataaagcgattaaaaatttatacgcttctgaatatatatggaattcaataaaagacaataagacagtagggattattggtgaagataaagaaaaaggattaacgtatgtagcggaaccaattggtgttatttgtggtgttacgccaacaacaaatcctacgtcgacaactatttttaaagcgatgattgcaattaagacaggaaatccaatcatttttgcattccatccaagtgcgcaagaatcgtcgaagcgtgcagcagaagttgtattagaagcggcaatgaaggcaggtgcacctaaagatattattcaatggattgaagtgccttctatcgaagcaacaaaacaattaatgaatcacaaaggtattgcattagttctagcaacaggtggttcgggcatggttaagtctgcatattcaactggcaaaccggcattaggtgtgggaccaggtaacgtgccgtcttacattgaaaaaacagcacacattaagcgtgcagtaaatgatatcattggttcaaaaacatttgataatggtatgatttgtgcttctgaacaagttgtagttattgataaagaaatttataaagacgttactaatgaatttaaagcacatcaagcatattttgttaaaaaagatgaattacaacgcttagaaaatgcaattatgaatgaacaaaaaacaggtattaagcctgatattgtcggtaaatctgcagttgaaatagctgaattatcaggtatacctgtccccgaaaatacaaaacttatcatagccgaaattagcggtgtaggttcagactatccgttatctcgtgaaaaattatctccagtattagccttagtaaaagcccaatctacaaaacaagcatttcaaatttgtgaagacacactacattttggtggattaggacacacagccgttatccatacagaagatgaaacattacaaaaagattttggactaagaatgaaagcttgtcgtgtacttgtaaatacaccatcagcggttggaggtattggtgatatgtataacgaattgattccgtctttaacattaggttgtggttcgtacggtagaaactcaatttcacataatgttagtgcgacagatttattaaacattaaaacaattgctaaacgacgtaataatactcaaattttcaaggtgcctgctcaaatttattttgaagaaaatgcaatcatgagtctaacaacaatggacaagattgaaaaagtgatgattgtctgtgaccctggcatggtcgaattcggttatacaaaaacagttgagaatgtattaagacaaagaacggaacagcctcaaattaaaatatttagcgaagtcgaaccgaacccatcaactaatacagtatataaaggtctggaaatgatggttgatttccaaccggatacaatcattgcacttggtggtggttcagcgatggatgctgcaaaagcaatgtggatgttctttgaacaccctgagacatcattcttcggtgctaaacaaaagttcctagacatcggtaaacgtacttataaaataggcatgcctgaaaatgcgacgttcatttgtatccctacgacatcaggtacaggttcagaagtaacaccatttgcagttatcacagatagtgaaacaaatgtaaaatatccgttggctgattttgctttaacacctgacgttgcaattattgaccctcaatttgtgatgagtgtgccaaaaagcgttacagcagatacaggaatggatgtactaacgcatgccatggaatcatatgtatctgtaatggcttcagattacacaagaggtttgagtctacaagcgattaaattgacgttcgaatatttaaaatcatctgttgaaaaaggtgataaagtttcaagagagaaaatgcataacgcatcaactttggctggtatggcatttgcaaatgcattcttaggcattgcacactcaattgcgcataaaattggtggggaatatggtattccgcatggtagagcgaatgcgatattactaccgcatattatccgttataatgctaaagacccgcaaaaacatgcattattccctaaatatgagttcttcagagcagatacagattatgcagatattgccaaattcttaggattaaaaggtaatacgacagaagcactcgtagaatcattagctaaagctgtctacgaattaggtcaatcagtcggaattgaaatgaatttgaaatcacaaggtgtgtctgaagaagaattaaatgagtcaattgatagaatggcagagctcgcatttgaagatcagtgtacaactgctaatcctaaagaagcgctaatcagtgaaatcaaagatatcattcaaacatcatatgattataagcaataa

SEQ ID NO: 8169 - DNA, 1185 bp, Staphylococcus aureus
  CDS (1)...(1185)
atgaattcaatcattgaattaactgattattatagttctaataattatgcaccgcttaagcttgtaattactaaaggtaaaggtgtcaaagtttgggatactgatggcaaacaatatatagattgcatttcgggtttttcagttgcaaaccaaggccattgtcatccaacaattgttaaagcgatgacagaacaagcttcaaagttgtctatcatttcacgtgtcctttatagtgacaatctcgggaaatgggaagaaaaaatttgtcatcttgctaagaaagacaaagtactcccccttaactctggtactgaagctgttgaagcagccattaaaattgctagaaaatggggctctgaagttaaaggcatcaatgacggtcaagttgaaatcatcgctatgaataacaattttcacggtcgtacacttggctcattatcactatctaaccacgacgcatataaagcaggatttcaccccctacttcaaggcactacaacagtagattttggagacattgaacaattaacacaagctatttcaccgaatacagcagcaattattttggaaccaattcaaggtgaaggtggcgttaatatgccaccgaaaggatatattcaagctgtgcgtcaactatgtgataaacatcaaatattattgattgcagatgaaattcaagttggtcttggtagaactgggaaatggtttgctatggaatgggagcaagtcgttccagatatttatattttaggtaaggcattgggtggtggcttataccctgtatctgctgtgcttgcaaataatgatgtcatgcgtgttctaacaccaggtacacatggttcaacatttggtggtaaccctttagccattgcaatatcgacggcagcgcttgatgtacttaaagatgaacaactggttgaacaatcagaacgcttaggttcatttttattaaaagaattactacaacttaaacatccaagcattaaggaaattagaggtcgtggtttatttataggcatcgaacttaacacagatgccgcaccttttgtggatcaactgattcaacgtggaatcttatgcaaagacacgcatcgtactatcattcgattgtcaccacctctagttattgataaagaggaaatcaatcaaattgttgcagcttttcaagacgtttttaaaaattaa

SEQ ID NO: 8170 - DNA, 1356 bp, Staphylococcus aureus
  CDS (1)...(1356)
atgaagaagaaactaacatttaaagaaaacatgtttataggttctatgttatttggtttattctttggtgccggcaatcttatcttcccaatacacttgggtcaagctgctggttctaacgtttttatcgctaacttaggatttttaattacagcaattggcttaccatttctaggtatcattgctattggcatttcaaagacatctggtttatttgaaattgcatcgcgtgttaataaaacatatgcttatattttcacgattgccttatatctagttatcggaccatttttcgccttacctagactggcaactacatcatttgaaattgcattttcgccatttttatcaccaaagcaaatcactttatatttatttatttttagcttcgtcttctttgtgattgcatggttttttgcgagaaagccatcaagaattttagaatatatcggtaaatttttaaatccggtattcttagtattattagcaattattttattatttgcttttatccatccattaggtggcatatctgatgcacctattagtaaacaatatcaatcaaacgccttatttaacggctttttagatggatacaataccttagatgcgctagcgtcattggcatttggtatcatcattgttgcaacgattaaaaagttaggtatcgaaaatccaactgatatcgctaaagaaacaattaagtctggtactatcagtatcattatgatggggatcatttataccctactagcaatcatgggtacattaagtattggtcatttcaaacttagtgaaaatggtggtattgccttagcgcaaattacgcaatactacttaggtaactacggtatcgtcttgttatcactcatcgttatggttgcttgtttaaaaacagctatcggtttaattacggcattttcagaaacatttgaacaccttttccctaaaatgaattacctagcgattgcaacagttgtgagctttatctcattcttattcgcgaatgttggcttaactaagattattatgtactcagtcccagtgttaatgttcttatatccattagcaattgccttgattgtactaacattatttagtagcaaattccatcattcaaaaattatttatcaatgtaccattttctttacaatgattgctgcattagtagatggattaaaagctagtccagagttcatttcaagcacatcattctcacaaactttgattaatttcagccaaaaatatttaccattatcagacattggtatgggctgggttgttctcagtttgattggtttcattatcggcttcattatttataaaattaagcatcgtaaaattccacaagcataa

SEQ ID NO: 8171 - DNA, 558 bp, Staphylococcus aureus
  CDS (1)...(558)
atgattaattttaataaaaccgctttagtgttaatcgacctgcaacaaggtattcttaaaatggattatgccccatatacagctgaaaaagtcgttcaaaacgctaataaattaatagatgttttcagaaaaaacaatggttttatcgtattcgttcgtgttaaattctatgatggtaaagatgcattgaaaccaaattcgatggtatcattaccaccaaaagaaggcgacgactacagtcgtttccatcatttattagacaagagagatggcgattttgtcatagacaaacgacaatttagtgcatttgtaggaacggatttagacttacagttgagacgtcgaagaattgatacgattgttcttggcggtgtagcaacacatgttggtgtagatacgacagcacgagacgcctatcaattaaactacgatcagtattttgttactgacatgatgagcgctcaaaacgaaacgctacatcaattcccaatagataatttattccctataatggggcaaacagtaactacaagcgacatactaaatatattgaactaa

SEQ ID NO: 8172 - DNA, 2046 bp, Staphylococcus aureus
  CDS (1)...(2046)
gtgaggaagaaacttttcggtcaattgcaacgtattggtaaggcactaatgttacctgttgcgattttaccagcagcgggtctgttattagctatcggtacagctatacaaggcgaagcattacaacactacttaccttttatacaaaatggtggcgttcaaaatgtcgctaaattaatgacagctgccggtagtattatttttgaaaacttacctatgattttcgcattaggtgtcgcaatcggattagctggcggtgatggcgtagcagctatcgcagcatttgtcggttacataatcatgaacaaaacaatgggtgactttttacaagttacacctaaaaatgttactgatccagcgagtggttacgctagcattttaggtattccaacattacaaacaggtgtgttcggcggtattattatcggggccctggcagcttggtgttataacaagttctataacattaacttaccatcttatttaggtttcttcgctggtaagcgcttcgtacctattatgatggctacaacatcatttattttagcattcccaatggcattaatctggccaacaatccaaacaggattaaatgcattcagcacaggattattagactcaaatactggtgttgccgtattcttatttggttttattaagcgtttattaattccattcggtctacatcacattttccacgcaccgttctggttcgagtttggttcatggaaaaatgcagctggtgaaattattcacggtgaccaacgtatctttatcgaacaaattcgtgaaggcgcacatttgacagctggtaaattcatgcaaggtgaattccctgttatgatgttcggtttacctgcagcagctttagcaatttatcactcagctaaacctgaaaacaagaaagtagtagccggtttaatgggttctgctgctttaacatcattcttaactggtattacagaacctttagaattctcattcttattcgtagcaccattattattctttattcacgcagtacttgatggtttatcattcttaacattgtacttattggatgttcacttaggttatacattctcaggtggtttcatcgactacgttttacttggcgtactacctaataagacacaatggtggttagttattcctgtaggtcttgtatacgcagtcatttactacttcgtattccgattcttaattgtaaaattaaaatacaaaacaccaggtcgtgaagataagcaatcacaagctgttactgcttcagcaactgaattaccatatgcagtattagaagctatgggtggcaaagcaaacattaagcatttagacgcttgtatcacacgtctacgtgttgaagttaacgacaaatctaaagttgatgttcctggtttgaaagatttaggcgcatctggtgtattagaagtcggcaataatatgcaagcaatttttggtccaaaatctgaccaaatcaagcatgaaatgcaacagattatgaatggtcaagtagtagaaaaccctactactatggaagacgataaagacgaaactgttgttgttgcagaagataaatctgcaacaagcgaattgagccatatagtgcatgcaccattaactggtgaagtaacaccattatcagaagtgcctgatcaagtgttcagcgaaaaaatgatgggtgacggtatcgctatcaaaccttcacaaggtgaagttcgtgcaccattcaacggtaaagtacaaatgattttcccaacaaaacatgcaattggtcttgtatcagatagtggtttagaactattaatccacatcggtttagacactgttaaattaaacggagaaggctttactttacatgttgaggaaggtcaagaagttaaacaaggtgatttattaatcaactttgatttagactacatccgcaatcatgcaaagagtgatattacgcctattatcgttacacaaggaaacattacaaaccttgattttaaacaaggtgaacatggcaacatttcatttggcgatcaattatttgaagctaaataa

SEQ ID NO: 8173 - DNA, 1041 bp, Staphylococcus aureus
  CDS (1)...(1041)
gtgtatttaggacaacctttagatgaagcgtatattaagcgaatgattaaacaaggttaccaaatgatttttacatctgtacaaataccagaagaagatgacgagacaaaatatcattatttcacaaaactactcaatttattaaaacatgaacaagtgacttacctcatagatgctaatccatctatattaacaccatctttttatgagcatcttcgacaatatgatgcacaatttatgattcgtatcgatcatagtacatcaattgaggcaatcgaagcgataatggcacagggtttaaagtgctgtttgaatgcaagtattatttcccgggaattgttaacaagcttacatcaacaattgaatgattttacattactttcattttgtcataactattatccaagaccagatacgggattatctgttgacttggtcaataagaaaaatgaactcatttatcaatttaatccaaaggcacaaatatatggttttattgtagggagtggtttgcgaggtcctttgcataaaggcttgccaacaattgaagcaacgagacatagtcatcctgtcgttgcagctaaattattacaagaaactggtgtatctgaagtgttagttggagactcattgattgaaatgaggcaggcaaaacaacttatagatttttgcaagcataggcatttcacgttatgtattgaagaagtgtttgatacgacagtgacttaccttttcgatatgtgtcataaagtacgtccggataatccggaaaatgtcattcgttcggaaacgtcaagacaaatatgtccacattcgattcaaccacagtttacgacgcaacgacgcattggttcagtaaccgttgataatttgaataacggtcgttatcaaggtgaaatgcaaattgtgagacaaacgcttagtgcacatgacaatgtgaatgttgttgcacaaattattaaagaagacttaccactgttaagttgtatcgagccgaatgatacatttgattttcaaaaaactagggagtgtaagaagtga

SEQ ID NO: 8174 - DNA, 1455 bp, Staphylococcus aureus
  CDS (1)...(1455)
atgaccaaagaacaacaacttgcagaacgaattattgctgcagtaggtggtatggataatatagatagtgtcatgaactgtatgacacgtgtgcgtattaaagtattagatgagaataaagtagatgaccaagaactaaggcacattgatggtgtcatgggtgttatacacgatgaacgcattcaggttgtggttggacctggtacagtcaataaagtggctaatcatatggctgagttaagtggtgttaaattaggagacacaataccacacaatcacaatgatagtgaaaaaatggactataaatcatatgcagctgataaagcaaaggcgaataaagaagcacataaagcaaaacaaaagaatggtaagttgaataaagtattgaaatcaattgccaatatctttataccgttgattcctgcatttattggagctggattaattggtggtattgcagcagtactgagtaacttaatggtggcaggctacatttcaggtgcttggattacgcaacttataacagtatttaatgtcattaaagacggtatgttagcatacttagctattttcactggtattaatgcggctaaagaatttggtgcgacaccaggacttggtggcgtgattggtggtacaacgttattaacgggtattgctggtaaaaatattttaatgaatgtcttcactggagaaccattgcaacctggacaaggtggaattattggcgttatttttgccgtttggattttaagtattgtcgaaaagagattgcataaaattgtgccaaatgcgattgatattattgtaacgccgactattgcattgttgattgtaggactattaactatctttatctttatgccattagcaggttttgtttcagacagtttagtttcagtagttaacggaattattagtattggtggcgtatttagtggatttatcattggtgcaagcttcctaccgttagttatgttaggacttcatcatatttttacgccaattcatatagaaatgattaaccaatctggtgctacttacttattgccaatagcagcgatggctggtgctggacaagtaggtgccgcattagcactttgggtaagatgtaaacgcaacacaacattacgtaatactttaaaaggtgcattgccagttggtttcctaggtattggagaaccattaatctatggtgtgactttgccattaggtcgacctttcttaactgcttgtattggcggtggtattggtggcgctgtaataggtggaattggacatattggtgccaaagcaataggcccaagtggtgtgtcactattaccattaatctcagataatatgtatttaggttatattgcaggattacttgctgcgtatgctggtggattcgtttgtacatatttatttggaacgacaaaggcgatgcgacagacagatttgttgggtgattaa

SEQ ID NO: 8175 - DNA, 2790 bp, Staphylococcus aureus
  CDS (1)...(2790)
atggcataccaaagtgaatacgcattagaaaatgaaatgatgaatcaacttgaacaattgggttacgaaagagtaacgatacgtgataataagcaattgcttgataattttagaacgattttaaatgagcgtcatgcggacaaattagaaggcaatcccttaacagataaagaatttcaacgtctgttaacaatgattgatgggaaaagtattttcgagagtgcccgtattttacgtgataaattaccacttagacgtgatgatgagtctgagatttatttgtcatttttagatacgaaaagttggtgtaaaaataagtttcaagtgacgaatcaagtatcggtcgaggatacatataaagcacgttatgatgtaacgatattaatcaatggactaccccttgtccaagttgaattgaaacgtcgaggcattgatattaatgaggcgtttaaccaagtaaaacgttaccgtaaacaaaattacacaggcttattccgctacatacaaatgtttatcattagtaatggtgttgaaacgcgatacttttctaataatgatagcgaactattgaagagtcacatgttttattggagtgataaacagaataaccgaatcaatacattgcaatcgtttgctgagtcatttatgagaccttgtcaattagctaagatgatatcgcgctatatgattattaatgaaacagatagaatactgatggcaatgcgcccgtatcaagtgtatgcggtagaagcactaattcaacaagcgactgagacagggaataatggatatatttggcatacaactggaagtggtaagacgttgacttcttttaaagcgagtcagattttatcacagcaagatgacattaagaaagttatctttttggttgaccgtaaagacttggatagtcaaacagaagaggaatttaataaatttgctaagggtgctgtagacaaaacttttaatacctcgcaactggtacgccaactaaatgataaaagtttgccacttattgtaacgacgattcaaaaaatggctaaagcgattcaaggtaatgcccatttattagaacagtataaaacgaataaagttgtatttattattgatgagtgtcatcgcagtcaatttggtgacatgcatcgtctagttaaacaacatttcaaaaatgcccaatactttgggttcactggtacgccacgattcccagaaaatagtagtcaagatggtagaacaactgcagatattttcggtagatgcttacatacgtatttaattagagatgccattcatgatggtaatgtacttggtttctcagttgactatattaatacttttaaaaataaagctttaaaagcagaggataacagcatggttgaagcaattgatactgaagaagtctggttagcggataaacgtgtggaattagtaacacgacatatcaccaataatcatgataaatatacacgtaatcgtcaatattcaagtatatttacagttcaaagtattcacgcgcttattaaatattatgagacatttaagcgacttaacaaaaagttggaacaaccattaacggtagctggtatatttacgtttaaacctaatgaagatgatcgtgatggtgaagtgccatatcattcgcgtgaaaaattagagaaaatgattagtgattataataaaaagttcgagacgaatttttcaacagacacgactaatgagtattttaatcatatttcaaaaaacgttaaaaagggcgttaaagatagtaaaattgatatcttaatcgttgttaatatgttcttaactggttttgatagtaaagtactgaacactttatatgttgataagaatttaatgtatcatgatttaattcaagcgtattcacgtacaaatagggttgaaaaagaatcaaagccatttggtaaaattgtaaactatcgtgacttgaaaaaagagacagacgatgctctgagagtattctcacaaacaaatgatacggatacaattttaatgcgtagttatgaagagtataaaaaagaatttatggacgcttatcgtgagcttaaaatgattgtgccgacaccacacatggttgatgacattcaagatgaagaagagctaaagcgctttgttgaagcttatcgtttattagctaaaataatattacgtttaaaagcatttgacgagtttgagtttacaattgatgaaattggaatggatgaacaagagaatgaagactataaaagtaaatatttagccgtgtacgatcaagtaaaaagagcgacggctgagaaaaataaagtatccattttaaatgatattgatttcgaaatagaaatgatgcgtaatgatacgattaatgtgaattatattatgaatatattgagacaaattgatcttgaagacaaagcggaacaacgtcgtaaccaagaacaaattagacgtattttagatcatgcagatgatccgacattgaggttaaaacgagatctaattagagaattcatcgacaatgttgtaccttctttaaataaggatgatgatatcgatcaagaatatgttaatttcgaaagcattaaaaaagaagcggagttcaaaggatttgctggagagagagctatcgatgaacaagccctaaaaacaatttcaaatgactaccagtatagtggtgttgtaaacccacatcaccttaaaaaaatgattggtgatttgccattgaaagaaaaacgtaaagcaagaaaagccattgaatctttcgtggcagaaacaactgaaaaatacggtgtgtaa

SEQ ID NO: 8176 - DNA, 765 bp, Staphylococcus aureus
  CDS (1)...(765)
atgattgatattcataaccatatattgcctaatatcgatgacggtccgacaaatgaaacagagatgctggatcttttaaaacaagcgacaacacaaggtgttacagaaatcattgtaacatcacatcacttacatcctcgatataccacacctatagaaaaagtgaaatcatgtttaaaccatattgaaagcttagaggaagtacaagcactaaatctaaagttttattatggacaggaaataagaattaccgatcaaatccttaatgatattgatcgaaaagttattaccggtattaatgattcacgctatttactaatagaatttccatcaaatgaagttccacactatactgatcaattatttttcgaattacagagtaaaggctttgtaccgattattgcacatccagagcggaataaagcaataagtcaaaaccttgacatactatacgatttaattaacaaaggtgctttaagtcaagtgacaacggcgtcattagcgggtatttccggtaaaaaaattagaaaattagcaattcaaatgattgaaaacaatctgacacatttcatcggttcagatgcgcataacacagaaatcagaccgttcttaatgaaagacttatttaatgataagaaattacgtgattattatgaagatatgaacggatttattagtaatgcgaagttagttgttgatgataaaaaaattcctaaacgaatgccacaacaagattataaacagaaaagatggtttgggttataa

SEQ ID NO: 8177 - DNA, 1119 bp, Staphylococcus aureus
  CDS (1)...(1119)
atgaagttgaagcgattattcaagacatcgtcaatgactttagtaaagaaaaaattattaactatgccaatggcaaaaagggagataattatgttcgatgacaaaattttattaattactgggggcacaggatcattcggtaatgctgttatgaaacggtttttagattctaatattaaagaaattcgtattttttcacgcgatgagaaaaaacaagatgacattcgaaaaaaatataataattcaaaattaaagttctacattggtgatgtgcgtgatagtcaaagtgtagaaacagcaatgcgagatgttgattacgtattccatgcagcagctttaaaacaagtgccgtcatgtgaattctttccagttgaggcagtgaagacaaatattattggtacagaaaatgtcttacaaagtgcgattcatcaaaatgttaaaaaagtcatatgtttatctacagataaggcagcgtatcctattaatgctatgggtatttcgaaagcaatgatggaaaaagtattcgtagccaaatcaagaaatattcgtagtgaacaaacgcttatttgcggtacaagatacggcaatgtgatggcatcaagaggatcagtaattcctttgtttatcgacaaaatcaaagctggagaacctttaacgattacagatcctgatatgacaagatttttaatgagcttagaagatgcggtagaactagttgttcatgcatttaagcatgcagagacaggcgatatcatggttcaaaaagcaccaagttcaacggtaggggatcttgcgaccgcattattagaattgtttgaagctgataatgcaattgaaatcattggtacgcgacatggagagaaaaaagcagaaacattgttgacgagagaagaatacgcacaatgtgaagatatgggtgattattttagagtgccggcagactccagagatttaaattatagtaattatgttgaaaccggtaacgaaatgattacgcaatcttatgaatataactccgataatacacatattttaacggtggaagagataaaagaaaaacttttaacactagaatatgttagaaacgaattgaatgattataaagcttcaatgagatag

SEQ ID NO: 8178 - DNA, 1125 bp, Staphylococcus aureus
  CDS (1)...(1125)
atggaaaaactaaaattaatgacaatagttggtacaaggcctgaaatcattcgcttatcatcaacgattaaagcatgtgatcaatattttaatcagatattagtacacactggtcaaaattatgattatacattgaatcaaattttctttgatgatttggaattaagacaaccggaccactacttagaggcagttggaagtaacttcggagaaacgatggggaatattattgcgaagacatatgatgttttattacgcgaacaaccagatgcacttttaattcttggtgatacaaatagttgtttagcagcagtatctgctaaacgattaaagattcctgtgttccatatggaagcgggtaatagatgctttgatcagaatgtacctgaagaaatcaatcgtaaaattgttgaccatgtcagtgatgtgaatctaccttatacagaacatagcagacggtatttattagatgaaggcttcaataaagcgaatatatttgtgacaggatcaccgatgacagaagtgatagaagcgcatcgagataaaattaatcacagtgacgttttaaataaactaggattagaaccgcaacaatacattttagtatctgcgcatagagaagagaatatcgataatgaaaagaattttaaatcattaatgaatgcgataaatgatattgccaaaaagtataaaatgcctgtgatttattcaacgcatccaagaagttggaagaaaattgaagaaagtaaatttgaatttgatccattagttaaacagctaaagccatttggtttctttgattataatgcattgcaaaaagatgcatttgttgtgctatcagatagtggaacattgtcagaagagtcgtctattttgaagttccctggtgtccttattcgaacttccacagaaagaccggaagtactagataaaggtacggttattgtaggtggtattacctataacaatctaatccaatccgttgaactagcaagagagatgcaaaacaataacgaaccgatgattgatgctattgattataaagacactaacgtttcgacaaaggtagttaaaattattcaaagttataaagatattatcaatcgaaatacttggaggaaatga

SEQ ID NO: 8179 - DNA, 765 bp, Staphylococcus aureus
  CDS (1)...(765)
atgtatctagatatcaaaataattaaaaaagaggaacttaaaatgaacaaaaacgtagtcatcaagagtttagcagctttaacaattttaacatctgtaacaggtattggagcaacattggttgaggaagttcaacaaactgccaaagcagaaaataatgtcacaaaaattaaagatactaatatttttccatatacaggtgtagttgcttttaatagtgcaactgggtttgtagttggaaagaatactattttaacaaataaacatgtgtcgaaaaattacaaagtgggcgatcgtattactgcacatccaaatagcgataaaagtaatggtggtatttattcgattaaaaagattattaattatccaggtaaagaagatgtatcagtcattcaagttgaagagcgtgcaatagaacgtggtccaaaaggatttaattttaatgataatgtaacgccgttcaaatatgcagcaggggctaaagctggtgaccgaattaaagtgatcggttatccacacccatacaaaaataaatatgttttacatgagtcaactggtcctgtgatgtcagtagaaggtagcagcattgtatattcagcgcatactgaaagtggaaactctggatcacctgtattaaacagcaacaacgaattaataggtattcattttgcttctgatgtaaaaaatgatgacaacagaaatgcatatggcgtctactttacaccagaaattaaaaagttcattgcagaaaacatagataaataa

SEQ ID NO: 8180 - DNA, 762 bp, Staphylococcus aureus
  CDS (1)...(762)
atgtctataacaaaacatcatgaaaaacagaggagcacaaaaatgaataaaaatataatcatcaaaagtattgcggcattgacgattttaacatcagtgactggcgtcggcacaacaatggttgaggatattcaacaaacagccaaagcagaaaatagtgtgaaattaattaccaacacgaatgttgcaccatacagtggtgttacatggatgggcgctggaacaggatttgttgttggaaatcatacaatcattaccaataaacatgttacttatcacatgaaagtcggtgatgaaatcaaagcacatcctaatggtttttataataacggtggtggactttataaagttactaagattgtagattatcctggtaaagaagatattgcggttgtacaagttgaagaaaaatcaacgcaaccaaaaggtagaaaattcaaagatttcactagcaaatttaaaatagcatcagaggctaaagaaaatgaatctatatcaatcattggttatccaaatcctaatggaaataaactacaaatgtatgaatcaactggtaaagtactatcagtgaatggaaatatagtgacatctgatgcggttgtccaacctggcagctctggttcacctatattaaatagtaagcgagaagcaattggtgttatgtatgctagtgataaaccaacaggtgaaagtacaaggtcatttgctgtttatttctctcctgaaattaagaaattcattgcagataatttagataaataa

SEQ ID NO: 8181 - DNA, 1557 bp, Staphylococcus aureus
  CDS (1)...(1557)
atgtctattactgaaaaacaacgtcagcaacaagctgaattacataaaaaattatggtcgattgcgaatgatttaagagggaacatggatgcgagtgaattccgtaattacattttaggcttgattttctatcgcttcttatctgaaaaagcggaacaagaatatgcagatgccttgtcaggtgaagacatcacgtatcaagaagcatgggcagatgaagaatatcgtgaagacttaaaagcagaattaattgatcaagtcggttacttcattgagccacaagatttattcagtgcgatgattcgtgacattgaaacgcaagatttcgatatcgaacacctggcgacggcaattcgtaaagttgaaacatcaacactaggtgaagaaagtgaaaatgactttatcggactgttcagcgatatggacttaagttcaacgcgactaggtaacaatgttaaagaacgtactgcactaatttccaaagtcatggttaaccttgacgacttaccattcgttcacagtgacatggaaattgatatgttaggtgatgcatacgaatttcttatcgggcgctttgcggcgacagcaggtaaaaaagcaggcgagttctatacaccacaacaagtatctaagatactggcgaagattgtcacagacggtaaagataaattacgtcacgtatatgacccaacatgtggttcaggttcattattgttacgtgttggtaaagaaacgcaagtgtatcgttatttcggtcaagaacgtaacaataccacatacaacttagcgcgtatgaatatgttattacatgatgttcgttatgaaaatttcgatatccgtaatgatgacacgttggaaaatccagcctttttaggccatacatttgatgcggttattgcgaacccaccatacagtgcgaaatggacagcagattcaaaatttgaaaatgatgaacgatttagtggttacggcaaacttgcgccaaaatccaaagcagactttgcctttattcaacacatggtacattacttagacgatgaaggtaccatggccgttgtactcccacatggtgtcttattccgtggtgccgcagaaggcgtgattcgtcgttatttaattgaagaaaagaactacttagaagccgtgattggtttgccagcgaatattttctatgggacaagtattccaacatgtattttagtgtttaaaaaatgtcgccaacaagacgacaacgtattatttatcgatgcatccaatgattttgaaaaaggaaaaaatcaaaaccatttaagtgatgcccaagtcgaacgtattatagacacatataagcgtaaagaaacaattgataaatatagctacagcgcgacattacaagagatcgccgataacgattacaacttaaacataccgcgatatgtcgatacattcgaagaagaagcgccaattgatttagatcaagtccaacaagatttgaaaaatatcgataaagaaatcgcagaaattgaacaagaaatcaatgcatacctgaaagaacttggggtgttgaaagatgagtaa

SEQ ID NO: 8182 - DNA, 1593 bp, Staphylococcus aureus
  CDS (1)...(1593)
atgtcagtagacacatacactgaaacaactaaaattgacaaattactgaaaaaaccaacgtcacattttcaactttcgacgacacaactttataataaaatcttagacaataacgaaggggtattaacagaacttggtgctgttaatgcaagtactggaaaatatactggtcgttcacctaaagacaaattttttgtctctgaaccttcatatagagataacattgactggggagaaattaatcaacctatcgatgaagaaactttcttgaagttataccataaagtactagactatttagataaaaaagatgaattatacgtatttaaaggctacgctggtagcgataaagatacaatgttaaaacttacagtcatcaatgaattagcatggcataatttatttgctaaaaatatgtttattagacctgaatcaaaagaagaagctacaaagattaaacctaacttcactatcgtttctgccccacattttaaagcagatccagaagttgatggtactaaatctgaaacttttgtcattatttcatttaaacacaaagtcattttaatcggcggtactgaatacgctggtgaaatgaaaaaaggtatcttctctgtaatgaattatctcttaccgatgcaagatattatgagcatgcattgctcagcaaacgttggtgaaaaaggcgatgttgcattattctttggtctatctggcactggtaaaacaaccttatcggctgacccacaccgtaaactaatcggtgatgatgaacacggctggaataaaaacggggtctttaatatcgaaggtggctgctatgcaaaagcaattaatctttccaaagaaaaagaaccacagatttttgacgcaatcaaatatggtgcaatcctagagaacactgtagttgcagaagatggttcagtggactttgaagacaatcgttatacagaaaacacgcgtgccgcttatccaattaatcacattgacaatattgtagtaccatcaaaagcagcacatccaaatacaattattttcttaactgcggatgcatttggtgttattccaccgatttcaaagttaaataaagaccaagcaatgtatcatttcttgagtggtttcacttctaaattagctggtacagagcgtggtgtgacagaacctgaaccatcattctcaacatgtttcggcgcaccgttcttcccgttacaccctactgtttacgctgatttattaggtgaacttatcgatttacatgatgttgatgtttatcttgttaatactggatggactggcggaaaatatggtgtaggacgtagaatcagcttacattacacacgtcaaatggtaaaccaagcgatttctggcaaattgaaaaatgcagaatatacaaaagatagtacgtttggtttaagtattcctgtagaaattgaagatgtaccgaaaacaattttaaatccaattaatgcttggagcgacaaagataaatataaagcacaagcagaagatttaattcaacgttttgaaaagaacttcgaaaaatttggtgaaaaagttgaacatattgctgaaaaaggtagtttcaacaaataa

SEQ ID NO: 8183 - DNA, 1296 bp, Staphylococcus aureus
  CDS (1)...(1296)
atggacgtattaggccttctctctatattaatagttagaaggtcttttttatttagctcacagagagagaattttcgtaatataaatttaaaggagcaaactatgttaaataacaaacgattatttacttcagagtctgttacagaaggacacccagataaaatcgctgaccaagtgtcagatgcaatattagatgctattttaaaagacgacccaaatgcacgtgtagcttgtgaaacaactgttacaacaggtatggcattgatcgccggcgaaatttctacaacaacatatgttgatattccgaaagttgttagagaaacaatcaaagaaattggatacacaagagcaaaatatggttatgattatgaaacaatggcaattttaactgcgattgatgaacaatcacctgacattgcacaaggcgtggataaagcattagagtatcgtgataaagatagcgaagaagaaattgaagcaacaggtgcaggtgaccaaggtttaatgtttggttacgcaacgaatgaaacagaaacgtatatgcctctagcaatttatttatcacatcaattggcaaaacgtttatctgatgtgcgtaaagatggtacgttaaattatttacgaccagacggtaaagttcaggtcactgttgaatatgatgaaaatgataacccagtacgtattgatacgattgtcgtatcaacacaacatgctgaggatgtgacacttgaacaaattcaagaagacatcaaagctcatgtcatttatccaactgttccagaaaacttgattaatgaacaaactaaattctacatcaatcctacaggacgctttgtaatcggtggacctcaaggtgatgcaggattaacaggacgtaaaatcattgttgatacgtacggtggctatgcacgtcatggtggcggatgcttcagtggtaaagatcctacaaaagtagaccgttcagctgcatacgctgcacgttatgtggctaaaaatattgttgcagcaggtttagcagatcaatgtgaagtacaattggcatatgcgattggtgttgcagaaccagtgtcaattgcaattgatacatttggaacaggtaaagtttctgaaggacaacttgtcgaagcagttagaaaacactttgacctaagacctgcaggtattattaaaatgcttgatttgaaacaaccgatttacaaacaaactgctgcttatggtcattttggacgtacagatgtcttattcccatgggaaaaattagacaaagtggaagaattaaaagacgcagtaaaataa

SEQ ID NO: 8184 - DNA, 834 bp, Staphylococcus aureus
  CDS (1)...(834)
atggaggttaaaacattttataatggaaacacgatgccacaaattggtttagggacatttcgtgtggacaatgatgaaaattgcatggaaagtgttaagtatgccattgaacaaggatatcgtagtattgataccgcaaaagtttatgggaatgaagaacaagtaggtgctggcattcgtgccggattggaatcaactggtattgctagagaagacttatttattacttcaaaattatattttgaggattttggtcgtgaaaatgtagcagctgcttacgaagctagtttatctagattaggtttaaaatacttagatttgtatctagtacattggccaggtacgaacgaagccgtaatggttgatacatggaaaggtatggaagatttatataaaaataataaagttaaaaatataggtgtcagcaattttgaacctgaacatttggaagctttgttggcacaagtgtcaataaaacctgtaattaatcaggttgaatatcatccatatttaacgcaacataaattgaaattatatttggcagcacaacatatcgtgatggaatcttggtcaccattgatgaatgcacaaattttaaatgatgagacaattaaagacattgctcaagaattaggaaagtcacctgcccaagttgttttaagatggaatgtgcagcatggtgtggttacaatccctaaatcggtgacaccaaacagaatctctgaaaacttccaaatatttgacttcgaattatcagatgaacaaatgacgcgaattgatagtttaaatcaagataagagaattggacctgatccaaaaacttttgaaggctag

SEQ ID NO: 8185 - DNA, 1074 bp, Staphylococcus aureus
  CDS (1)...(1074)
gtgaggatttttgtttatagaggtgatcatttgagtcaatttatggattatgcgattcaacttgcaaatatggtacaaggtcaaacaggtgttaatccacccgttggcgctgttgtagttaaagaaggtaggattgttggtattggtgcacacttgagaaaaggtgacaagcatgcggaggttcaagcacttgatatggcacaacaaaatgctgaaggtgcgacgatttatattacgttagagccatgtagtcattttggttcaacaccaccctgtgttaacaaaataattgattgtaagatagctaaagtagtttacgcaacaaaagacaattcgttagatacacatggtgatgatacgttacgggatcacggtattgaggttgaatgcgttgatgatgaacgttcatcacaattataccaagacttttttaaagcaaaagcaaagcaactgccacaaattacagtgaaagtatctgcaagtttagatggtaaacaagcgaatgataatggacaaagtcaatggattactaacaaagaggttaaacaagatgtctataagttaagacatcgacacgacgcagtgttaactggaagacgtacagttgaattagatgatccacaatatactacacgtattcaagatggaaaaaaccctataaaagtaatattgtctaagtctgggaatattcattttaatcagcaaatttatcaagatgaatcaacaccaatttggatatatacagaaaatccaaatttaacaaccaatcaaacacatattgaaattatttacttgaagtcttgtgatttaacaacaattcttcacaatttatataaaagaggagttggtactttgctagtcgaggcaggtccaaccactacttcagaatttctccaatctaattatatagatgaatttattctctattatgccccgaaattaattggcggatctggaaattatcaattctatcaaacaaatgatgtgattgagataccagatgcgaaccaatttgaaattgttcattccgagttattaaatcaaaatgttaaattaactttacgaaagaagtga

SEQ ID NO: 8186 - DNA, 633 bp, Staphylococcus aureus
  CDS (1)...(633)
atgtttactggcatcgttgaagaaataggtgtcgttaaaagtgttcaaattcgtcaatcagtcaggacgattgaaatcgaagcacataagattacggcagatatgcatattggtgattccatcagtgttaatggtgcatgtttaacagtgattgattttgatcagacatcttttactgttcaagtaattaaaggcactgaaaataaaacctatttagcagatgttaagcgacaatcagaagtaaatttagagcgtgccatgagtggtaacggtaggtttggtggacattttgtcctcggtcatgtagatgaactaggaacagtttcaaaaataaatgaaacagccaatgccaaaattattacgattcaatgtagccaacatattaataatcagttagttaagcaagggtctattactgtggatggtgtaagtctaacggtatttgataagcatgataacagttttgacattcatcttattccagaaacgaggcgttcaacgattttatcatccaaaaaattaggagataaagtacatttagaaacagacgttttgtttaaatatgttgaaaatattttaaataaagataaagaccaattatctgtagataaattaagagcatttggtttttag

SEQ ID NO: 8187 - DNA, 1182 bp, Staphylococcus aureus
  CDS (1)...(1182)
atgcaattcgataatattgacagtgctttaatggctttaaaaaatggagaaacaattattgtagtagatgatgagaatcgtgaaaatgaaggtgatttagtagcggtcactgaatggatgaacgataataccattaattttatggcgaaagaagcaaggggattaatatgcgcaccagtgtctaaagatattgcacaacgtttggatttggaacaaatggttgatgataactccgacatctttggtacgcaatttacagtgagtattgatcatgtagatacaacaacaggaattagcgcttatgaacgtacattgactgccaaaaagctcatagatcctagtagtgaagctaaagattttaatcgtcctggtcatttatttccattagtggcacaagataaaggggtgttagctagaaatggacacacagaagcggctgttgatttagctaaacttactggtgccaagcccgctggtgtcatttgtgagattatgaatgatgacggcacgatggcgaaaggacaagatttacaaaagtttaaagaaaaacatcaattaaagatgattacgattgatgatttaattgaatatcgtaaaaaattagaaccagaaattgaatttaaggcaaaagtgaaaatgcctacagatttcggaacatttgatatgtatggttttaaagcgacttacacagatgaagagatagttgtactgacaaaaggtgcaattcgacaacatgaaaatgtacgcttacattctgcgtgccttacaggcgatattttccatagtcagcgttgtgattgtggtgctcaacttgaatcgtctatgaagtatatcaatgaacatggcggcatgattatttatctacctcaagaaggtcgtggcataggattgttaaacaaattacgcgcatatgaattaattgagcaaggatatgatacagtaactgcaaatttagcattaggttttgatgaagatttgcgagattatcatattgctgcacagattttaaaatattttaacatcgaacatatcaatttattaagtaataatccaagtaaatttgagggattaaaacaatatggcattgatattgcagaaagaattgaagttatcgtaccagaaacggtacataatcatgattatatggaaacgaaaaaaataaaaatgggtcatttaatatag

SEQ ID NO: 8188 - DNA, 2418 bp, Staphylococcus aureus
  CDS (1)...(2418)
gtgttgaattacaaccacaatcaaattgaaaagaaatggcaagactattgggacgaaaataaaacatttaaaacaaatgataacttaggtcaaaagaaattttatgctttagacatgtttccatacccatcaggtgctggtttacatgttggacatcctgaaggctatacagcaacagatatcatttcaagatataagagaatgcaaggatataatgtgttacatccgatggggtgggatgcattcggattaccagcagagcaatatgctttagacactggcaacgacccacgtgaatttacaaagaaaaatatccaaacttttaaacgacaaattaaagaattagggttcagttatgattgggatcgtgaagttaatacaacagatccagaatactataaatggacacagtggattttcatacagttatataacaaaggtttagcatatgttgacgaagttgcagttaactggtgtcctgcattaggcactgtcttatctaacgaagaagtgattgacggtgtctctgaacgtggtggacatccagtttatcgtaaaccaatgaagcaatgggtacttaaaattacagaatatgcagatcaattattagcagatttagatgatttagattggcctgagtctttaaaagatatgcaacgtaactggattggacgttcagaaggtgccaaagttgcatttgatgttgataatgcggaaggaaaagtagaagtatttacgactagaccagatacaatctatggtgcatcattcttagtcttaagtcctgaacatgcattagttaattcaattacaactgatgaatataaagaaaaagtaaaagcttatcaaacagaagcttctaaaaagtcagatttagaacgtacagatttagcaaaagataaatcaggtgtgtttactggtgcatatgcaattaatcctttatctggtgaaaaagtacaaatttggattgctgattatgtattatcaacatatggtactggagcaattatggcagtaccagcgcatgatgacagagattatgaatttgctaaaaagtttgatttgccaatcattgaagtcattgaaggtggaaatgttgaagaagcagcatacactggtgaaggtaaacatattaattctggtgaacttgatggtttagaaaatgaagcggcaattactaaagctattcaattattagagcaaaaaggtgctggcgaaaagaaagttaattacaaattaagagattggttattcagtcgtcagcgttattggggtgaaccaattcctgtcattcattgggaagatggaacaatgacaactgttcctgaagaagagctaccattgttgttacctgaaacagatgaaatcaagccatcagggactggtgagtctccactagctaatattgattcatttgtaaatgttgtagatgaaaaaacaggtatgaaaggacgtcgtgaaacaaatacgatgccacaatgggcaggtagttgttggtattatttacgttacatcgatcctaaaaatgaaaatatgttagcagatcccgaaaaattaaaacattggttacctgttgatttatatatcggtggagtagaacatgcggttcttcacttattatatgcaagattttggcataaagtcctttatgatttgggtatcgtacctactaaagaacctttccaaaaattatttaaccaaggtatgattttaggagaaggtaatgagaagatgagtaaatctaaaggaaatgtaatcaatcctgatgatatagtacagtctcatggtgcagatactttacgtctttacgaaatgtttatgggacctttagatgctgcaattgcatggagtgaaaaaggattagatgggtctcgtcgattcttagatcgcgtatggcgtttaatggtaaatgaagatggaacattgagttcaaaaattgtaactacaaataataaatctttagataaagtttataaccaaactgttaaaaaggtaacagaagactttgaaacattaggatttaatactgctattagtcaattaatggtatttattaatgagtgttataaagttgatgaagtttataaaccttacattgaaggtttcgttaaaatgttagcacctattgcaccacatatcggtgaagaattatggtcaaaattaggacatgaagagtctattacgtaccaaccttggccaacttatgacgaagcactacttgtagatgatgaagtagaaatcgttgttcaagttaatggtaaattgagagctaaaattaaaattgctaaagatacatcaaaagaagaaatgcaagaaattgccttatctaatgacaatgttaaagcgagtattgaaggtaaagacatcatgaaagtcatcgctgttcctcaaaaattagtcaatattgtagctaaataa

SEQ ID NO: 8189 - DNA, 1269 bp, Staphylococcus aureus
  CDS (1)...(1269)
atgtatcaaacaattattatcggtggcggacctagcggcttaatggcggcagtagctgcaagcgaacaaagtaacaatgtgttactcattgaaaaaaagaaaggtctaggtcgtaaactcaaaatatctggtggcggtagatgtaacgtaactaatcgattaccatatgctgaaattattaagaacattcctggaaatgggaaatttttatatagtcccttttcaatttttgataatgaatccatcatagatttttttgagtctaggggtgttaaattaaaagaagaagatcacgggcgtatgtttccagtctccaacaaagcacaagacgtggttgatacattagtgacaactatcgaacgccaacatgtaacgattaaagaagaagaagctgttagtagaatcgaagttaatacagaccaaactttcactgtacatactcaaagcagcagctatgtaagtcattcacttgtgattgctacaggtggtacaagtgtccctcaaacaggttcaactggtgatggttataagttcgcacaagatttaggtcataccattacagagttattcccgaccgaagttccaattacatcagctgaacctttcatcaaatcaaatcgtctaaaaggtttaagtttaaaagatgttgaattgtcagtacttaagaaaaatggtaaaaaacgcatcagtcatcaaatggatatgttatttactcattttggtatcagtggtccagctacattaagatgtagtcagtttgtttataaagaacaaaaaaatcaaaagacacagcatatttctatggcaatcgatgcatttcctgaattaaaccatgaacaattaaaacaacacatcacatcattattatcggacacaccagataaaatcataaaaaacagcttgcatggactaattgaagagcgctatttactgttcatgctggaacaagctggaatcgatgaaaataccacatcacatcacttatcaaatcaacaattgaacgacttagtaaatatgtttaaagggtttgtatttaaggtaaacgggacattacctatagataaggcatttgtcacaggtggtggtgtgtcacttaaagaaatccaacctaaaacaatgatgtctaaattagttccgggattatttttatgtggtgaagtattagatatacatggttatactggtggttataatattacaagtgcactcgtaacaggacatgtcgctggattatatgccggtcattactcacatgcatcaatggaataa

SEQ ID NO: 8190 - DNA, 1662 bp, Staphylococcus aureus
  CDS (1)...(1662)
atgagtgaaagtaaagaaatggtgcgtggaacctttttaattaccattagtatattaattaccaaggtattgggcgtactttttatcattccattcaactatttaattggtggacaagaaaatatggcgccgttcacatacgcttatgcaccatataatattgcaattgcagttgcgacagcaggtgtacctttagcagcttcgaaatatgttgcgaaatacaatgctattggggcatataaagtcagtcagaaattttataaatcgagttttattgtaatgagtattaccggtgttttaggtttcttggtactgtatttcctagcaccttatatttctgaattaacattagctagaaacgttcatgataaaaacggttggtcagtcgatgatattacttggattataagaatcattagtatggttgttatctttattcctgtattagcgacatggaggggtatattccaaggttataaatctatggggccaacagcagtgtcagaagtaactgagcaaattgcacgcgtgattttcatattaatcggaagttatttagtactaaatgtctttgatggttctattttattagccaatggtattgctacttttgcagcagcagttggtgcgattattggtatattcacactctggtattactggagaaagcgtaagcataatattgatcgtatggtcgaatctgattacacagatatagatgtgtcatatggcaagatgtataaagaaattattgcttatagtattccgttcgttattgtaagtttgaattatccattatttaacttagtagatcaatttacacataacggtgctttatctttagttggtataccttcacagttacaagatatattctttaatatgttaaatatgtcaactaataaaattgtaatgattccgacatcattaagtgctggctttgcagtaagtttaattccttatattacaaaaacatttgcagaaggtcgcttacatgaaatgcatcatcaaattagaacatctattggtgtattaatgtttataactgttccagctagtattggaattatggccttggcacaaccattattcacagttttctatggttacgatccaattgttttaggtcatgaccctaaccatgatggtagtcgcttattattctattatgcgcctgtagcaatactaatttcactattaagtgtaacggcatcaatgttacaaggtatagataaacagaaattaacagtttatgttattttagcttctgtagttatcaagttagcgttaaactatccattaattatgttattccatacacctggtgcaattttaagtactagtatcgcattattatttgcaattggatgtaatttctatattcttaaaaaatatgcgaagtttaaattcagctatagttggattcattttgcaaaaatattcttgtattcatttattatgatgctaggtgtagaattagtattcttccttgcaaatctattcttagaacctactaaactgggttacttaatcattattattttaggtgttacagtaggtattctaatttacggtacaatcactattaaaacgcgtcttgcggacgaatttttaggtgaaattcctgaaaaattaagacgtagagttaggtttttacgatga

SEQ ID NO: 8191 - DNA, 696 bp, Staphylococcus aureus
  CDS (1)...(696)
atgagaatagataaatttttagcaaatatgggcgtcggtacacgtaatgaggtcaaacagttacttaaaaaaggccttgtaaatgtcaacgaacaagtaattaaatcaccaaaaacacatatagaaccagaaaacgataagatatcagttcgtggagaattaatagaatacgttgaaaatgtctatattatgttaaataagccaaaaggttatatatcggcaactgaagatcatcattcaaaaaccgttattgatttaatacctgaataccaacatctaaatatttttccggttggtcgtcttgataaagatacagaagggcttttattgataacgaatgatggtgattttaatcatgaattaatgagtccaaacaaacatgtttctaaaaaatatgaagttatttcagcaaatcctatcactgaagacgacattcaagcttttaaagaaggtgtaacactgtctgatggcaaggttaagcctgcaatattaacttatattgataatcaaacgtcgcacgtaacaatttatgaaggaaaatatcatcaagttaaacgaatgtttcatagcattcaaaatgaggtattacatttaagacgtatcaaaattgctgatttagaattggacagcaatttagattcaggagaatatcgtttattaactgaaaatgattttgacaaattaaattataaataa

SEQ ID NO: 8192 - DNA, 1410 bp, Staphylococcus aureus
  CDS (1)...(1410)
atgtggaaagaaaaagttcaacaatacgaagatcaaatcattaatgacttaaaaggattattagcaattgaaagtgtgagagatgatgcaaaagcatcagaagacgcaccagttggtccaggtcctcgtaaggcattagactacatgtatgaaattgcacatagagatggatttacaacacatgatgtggatcatattgcaggaagaattgaagcaggtaaaggaaatgacgtgttaggtatcttatgtcatgttgacgttgttcctgctggtgatggatgggatagtaatccgtttgagccggttgtaacagaagatgctatcatagctagaggtacacttgatgacaaaggtccaacaattgctgcttattatgcaattaagatattagaagatatgaatgtggattggaagaaacgtattcatatgattattggtacggatgaagaatctgattggaaatgtacggatcgctattttaaaacagaagaaatgccaacattaggttttgcaccagatgcagaatttccgtgtattcatggtgaaaaaggcattacaacatttgacttagttcaaaataaacttactgaagatcaagatgaacctgattatgaattaataacttttaaatctggtgaacgttacaacatggtgcctgatcatgcagaagcaagagtgcttgttaaagaaaatatgacagatgttattcaagactttgagtactttttagaacaaaatcatttacaaggtgatagtactgttgatagtggcattctagttttaacagttgaaggtaaagcggttcatggtatggatccatctatcggtgtgaatgcgggtctttacttactaaaattcttagcatcattaaatcttgataataatgcacaagcgtttgtagcatttagtaatcgctatttatttaattcagattttggtgaaaagatgggaatgaaattccatacagatgtcatgggtgatgtgacaactaatattggtgttattacatatgataatgaaaatgcgggtcttttcggtatcaacttacgctacccagaaggatttgaatttgaaaaagctatggatcgttttgcaaatgagattcaacaatatggctttgaaatgaaattaggtaaagtccaaccaccacattatgttgataaaaatgatccttttgtacaaaagttagttactgcatatagaaatcaaacaaatgatatgactgaaccttatactataggtggcggtacttatgcgagaaacttagacaagggtgtagcatttggcgcaatgtttagtgattctgaagatttaatgcatcagaaaaatgaatatatcactaaaaaacagttatttaacgcaactagtatttacttagaagcaatttattcattatgcgtggaggaataa

SEQ ID NO: 8193 - DNA, 801 bp, Staphylococcus aureus
  CDS (1)...(801)
gtggacgagttggagcagttttatcaattagggtggacacttgattctgcaggtggtgcatctggtgaagcatatatggctgaacaagatggacaaaagttgtttttaaaacgaaattcaaatccatttattgcggcattatcagcagaaggtattgtgcccaaattagtatggacgaaacgcatagaaacaggcgaggttgttacagcacaacattggaaaaatggccgtgaactatcttcaaatgaaatgaagcaaacaagagttgcacatttattaaagaagatacacaattctagacctttattaagtatgttaaagcgtatggaaatggaacccattactcctgagattatgcttaataaaattaatgcctctttatcaagagaagtattaacacatcatattgtgagaaaatcattaacttatttggaagagcatatgccgagtttagattcacgttttttcacagttgtacatggtgatgtgaatcataataattggttattatctgatcgtgatgaactatttttagtagattgggaaggcgcaatgattgcagacccagcaattgacatcggaatgctgctttacaactatgttccacaacaacaatggtctgaatggcttgaaacatatggtgttcaagagagcttgaatttaaataaacgtatgaaatggtatacggtaattcaatctataggtcttgtgcaatggtatgaagagcaaaaaagatataaggatatgaacacttggcttaaattcctaaatgaagttatgaatagtaacatgtttatttaa

SEQ ID NO: 8194 - DNA, 597 bp, Staphylococcus aureus
  CDS (1)...(597)
atgaatttattttacaatcctaaatatgtaggagatgtcgcatttttacaaattgaaccaattgaaggtgaattaaactacaataaaaaaggtaacgttgttgaaattactaatgaaggtaatgttgtaggttataatatttttgaaatttcaaaagatataacaattgaagaaacaggtcatattaaattaactgatgaacttgtaaatgtattccaaaagcgtatttcagaagctggttttgattataaattaaatgctgacctatcaccgaaatttgtagttggctatgttgaaactaaagacaaacatcctgatgcagataaattaagtgtactaaatgtaaatgttggaaatgacacattacaaattgtatgtggcgcgcctaacgttgaagctggacaaaaagtcgttgttgctaaagtaggtgcagtgatgcctagcggtatggtaattaaagatgctgaattacgtggtgttgcctcaagcggtatgatttgttcaatgaaagaattgaatttacctaatgcacctgaagaaaaaggtattatggtattaaatgacagctatgaaattggacaagcattttttgaataa

SEQ ID NO: 8195 - DNA, 1335 bp, Staphylococcus aureus
  CDS (1)...(1335)
atgagtaaggagttttatataatgacacactatcattttgtcggaattaaaggttctggcatgagttcattagcacaaatcatgcatgatttaggacatgaagttcaaggatcggatattgagaactacgtatttacagaagttgctcttagaaataaggggataaaaatattaccatttggtgctaataacataaaagaagatatggtagttatacaaggtaatgcattcgcgagtagccatgaagaaatagtacgtgcacatcaattgaaattagatgttgtaagttataatgattttttaggacagattattgatcaatatacttcagtagctgtaactggtgcacatggtaaaacttctacaacaggtttattatcacatgttatgaatggtgataaaaagacttcatttttaattggtgatggcacaggtatgggattgcctgaaagtgattatttcgcttttgaggcatgtgaatatagacgtcactttttaagttataaacctgattacgcaattatgacaaatattgatttcgatcatcctgattatttcaaagatattaatgatgtttttgatgcattccaagaaatggcacataatgttaaaaaaggtattattgcttggggtgatgatgaacatctacgtaaaattgaagcagatgttccaatttattactatggatttaaagattcggatgacatttatgctcaaaatattcaaattacggataaaggtactgcttttgatgtgtatgtggatggtgagttttatgatcacttcctgtctccacaatatggtgaccatacagttttaaatgcattagctgtaattgcgattagttatttagagaagctagatgttacaaatattaaagaagcattagaaacgtttggtggtgttaaacgtcgtttcaatgaaactacaattgcaaatcaagttatcgtagatgattatgcacaccatccaagagaaattagtgctacaattgaaacagcacgaaaaaaatatccacataaagaagttgttgcagtatttcaaccacacactttctctagaacacaagcatttttaaatgaatttgcagaaagtttaagtaaagcagatcgtgtattcttatgtgaaatttttggatcaattagagaaaatactggcgcattaacgatacaagatttaattgataaaattgaaggtgcatcgttaattaatgaagattctattaatgtattagaacaatttgataatgctgttgttttatttatgggtgcaggtgatattcaaaaattacaaaatgcatatttagataaattaggcatgaaaaatgcgttttaa

SEQ ID NO: 8196 - DNA, 1365 bp, Staphylococcus aureus; identical to SEQ ID NO: 4243
  CDS (1)...(1365)

SEQ ID NO: 8197 - DNA, 1137 bp, Staphylococcus aureus
  CDS (1)...(1137)
gtggtcaaggttatgaaagtattagtagccatggatgagtttcatggaattatttcgagttatcaagctaatagatatgttgaagaggcagttgcaagccaaattgaaactgcagatgtagttcaagtaccattgtttaatggaagacatgaattattagattctgtatttttatggcaatctgggcaaaagtatcgtataccagtacatgatgcagatatgaatgaagttgaaggtgtttacggacaaactgatacagggatgaccgttatcgaggggaatttatttttaaaaggtaaaaagccaattgttgaacgaacaagttatggtttaggagaaatgattaaccatgcattagataacgacgcaaaacatgttgtaatttcattaggtgggattgatagttttgatgctggtgcaggtatgttacaagcattaggtgctcaattctatgatgacgaaggacgtgtcgtagatatgagacaaggtgctggtgtaattaaatatattcgtcgtatggatatgtcgaacttacaccctaaaatggaaacagcaagaattcaagtaatgtcggatttttcaagtcgattatatggtaagcaaagtgaaatcatgcaaactcatgatgcgcatcagttgaatcataatcaagcagcagaaatcgataatttaatttggtattttagtgagttatttaaaagtgaattgaaaattgcaattggtccagttgaacgtggtggtgctggtggtggaattgcagcagtcttgaatggactgtatcaagctgaaatattaaccagtcatgcattagtagaccaactaacacatttagaaaatttagttgaacaagcggatttaattatttttggagaaggattaaatgaaaatgatcagttgctagaaacgacaacattgcgtattgcagaactttgtcataaacatcaaaaggttgccattgcaatttgtgcaactgctgaaaagtttgatttatttgaatcacaaggggttacagcaatgtttaatacatttatcgatatgccggaaacttatactgactttaaaatgggattacaaattaggcattatactgttcagtctttaaaactgttgaaaacacattttaatgttgagatttag

SEQ ID NO: 8198 - DNA, 1227 bp, Staphylococcus aureus
  CDS (1)...(1227)
atgaagaaccaattgatagatagattaacaagatatacgacaattgatacgcaatctgatccaaaatctacaacaacaccttcaactgaaaagcaatgggatttgttacatttattagataaagaattacaacaattaggattgccaactgatttagatgaaaatggctacttatttgctacattagaaagtaacatcgatgcagacgtcccaacagttggatttttggcgcatgttgatacatcacctgatttcaatgcttcaaatgttaaaccgcaaattattgaaaactatgatggtaagccatacaaactaggcaatactaaacgtgtcttagatcctaaagtatttccagaacttaacagtttagttggtcatacattaatggtaactgatggtacatcgttactaggtgcagacgataaagcgggtattgtggaaattatggaagctatttgttatttaaaagaacatccagaaattaaacatggtaccattcgcattggatttacaccagacgaagaaatcggtcgtggtccacataaatttgatgttgaccgcttcaatgctgattttgcttatactatggatggtagtcaatatggagaattacaatatgaaagctttaacgctgctgaagcggttattacatgccacggtgtgaatgttcatcctggttcagctaaaaatgcaatggtaaacgcaatacgtttaggtgaacaattcgatagtttgctacctgatagtgaagttccggagcgaacagaaggatacgaaggcttttatcacttaatgaactttgaaggaactgttgaaaaagcaactttgcaatacattattcgtgatcatgataaaaaacaattcgaattgcgtaagaaacgtattttagaaatacgtgacgatatcaatgcccattttgacaattatccagttaaagttgatatatcggatcaatatttcaatatggcagaaaaaatattaccattgcctcatattattgatatacctaaacgtgtctttgctaaattagatattccagcaaacactgaacctattcgtggtggtacagatggttcacaattgtcatttatggggttaccaactccaaacatctttacaggttgcggtaacttccacggcccatatgaatatgcatccattgatgtcatggaaaaggcagtacaagtaatcattggaattgtagaagatatcgctgaaaataactaa

SEQ ID NO: 8199 - DNA, 798 bp, Staphylococcus aureus
  CDS (1)...(798)
atgaatcgtttgcatggacaacaagttaaaattggttacggggataacacgattataaataaattagatgttgaaataccagatggcaaagtgacgtcaatcattggtcctaacggctgcggaaaatctactttgctaaaggcattgtcacgtttattggcagttaaagaaggtgaagtatttttagatggtgaaaatattcatacacaatctacgaaagagattgcaaaaaaaatagctattttacctcaatcacctgaagtagcagatggcttaactgttggagaattagtttcatatggtcgttttccacatcaaaaaggatttggtagattaactgctgaggataagaaagaaattgattgggcaatggaagttacaggaactgatacattccgacaccgttcaatcaatgatttaagtggtggtcaaagacaacgtgtttggattgcaatggcattagcacaaagaactgatattatctttttagacgaaccaacaacatatttagatatctgtcatcaattagaaatactagaattagttcagaagctaaatcaggaacaaggttgtacaattgtcatggttcttcatgatatcaaccaagcgattcgtttctcagatcatcttattgcgatgaaagaaggcgatatcatcgctacaggttcaacagaagacgtattaacacaggaaatattagaaaaagtttttaatattgatgttgttttaagtaaagatcctaaaactggaaaacctttactggtaacttatgacttatgtcgcagagcttattcttaa

SEQ ID NO: 8200 - DNA, 816 bp, Staphylococcus aureus
  CDS (1)...(816)
gtgaataaggaaggtctacaaatgaacgtttcggtaaacattaaaaatgtaacaaaagaatatcgtatttatcgtacaaataaagaacgtatgaaagatgcgctcattcccaaacataaaaacaaaacatttttcgctttagatgacattagtttaaaagcatatgaaggtgacgtcatagggcttgttggcatcaatggttccggcaaatcaacgttgagcaatatcattggcggttctttgtcgcctactgttggaaaagtggatcgtaatggtgaagtcagcgttatcgcaattagtgctggcttgagtggacaacttacagggattgaaaatatcgaatttaaaatgttatgtatgggctttaagcgtaaagaaattaaagcgatgacacctaagattattgaatttagtgaacttggtgagtttatttatcaaccagttaaaaagtattcaagtggtatgcgtgcaaaacttggtttttcaattaatatcacagttaatccagatatcttagtcattgacgaagctttatctgtaggtgaccaaacttttgcccaaaaatgtttagataaaatttacgagtttaaagagcaaaacaaaaccatctttttcgttagtcataacttaggccaagtgagacaattttgtactaagattgcttggattgaaggcggaaagttaaaagattacggtgaacttgatgatgtattacctaaatatgaagctttcctaaacgattttaaaaagaaatccaaagccgaacaaaaagaatttagaaacaaactcgatgagtcccgcttcgttattaaataa

SEQ ID NO: 8201 - DNA, 567 bp, Staphylococcus aureus
  CDS (1)...(567)
atgaagcgaatcgcagtttattgtggtgcaagcaaaggtcatgacccttcatatgtacaaaaagcatatgatttaggtaaatattttgctgaacaaggttatgaattagtatttggtgcagggtcaattggtattatgggtgccattcaagatggtgtattagatcatggtggcaaagctattggcgtcatgcctaaaatgttagatgaacatgaaatcacaagccaacgtttaactgaattaattttagttgattctatgcatgaacgtaaaaataaaatggcagaacttgcagatgcatttgtcatggctcctggtggcgcaggttcactagaagaatttttcgaaatgtatagttgggctcaaataggtatccatgaaaagcctattgccatttataatattaatggctttttcaatccactacaaacaatgattgaccatatgattgaggaaggttttattgatcctaagtatcgtgcacttgcgccgttatgcgacactaaggaatcattaatagaatcaatattgaatttcaaacctctaggtactcgttcatacgattaa

SEQ ID NO: 8202 - DNA, 921 bp, Staphylococcus aureus
  CDS (1)...(921)
atgatttatacagtgactttcaacccttcaattgactatgtcatttttacgaatgattttaaaattgatggtttgaacagagcaacagcaacatataaattcgctgggggaaaaggtattaatgtctcacgtgttttaaagacattggatgttgagtcaactgctttgggatttgcaggtggatttcctgggaaattcattgtagatacattaaataacagtgcaattcaatcgaattttattgaagttgatgaagatacacgtattaatgtgaaattaaaaacaggacaagaaacagaaatcaatgcaccgggtcctcatataacgtcaacacaatttgaacaactgttgcaacaaattaaaaatacaacaagcgatgatatagttattgttgctggaagtgtaccaagtagtattccaagtgatgcgtatgcgcaaattgcacaaattacagcacagacaggtgctaaattagtagtcgacgctgaaaaagaattggctgaaagcgttttaccatatcatccactatttattaaacctaataaagatgaattagaagtgatgtttaatacaacagtgaactcagacgcagatgttattaaatatggtcgtttgttagttgataaaggtgcgcaatctgttattgtctcacttggcggtgatggtgctatttatattgataaagaaatcagtattaaagcagttaatccacaagggaaagtggttaatacagttggctctggtgatagtacagttgcaggcatggtggctggaattgcttcaggtttaacgattgaaaaagcattccaacaagcagtcgcatgcggtactgccacggcatttgatgaagacctagcaacacgggacgctatagaaaaaataaaatcacaagttacgattagcgtacttgatggggagtga

SEQ ID NO: 8203 - DNA, 1974 bp, Staphylococcus aureus
  CDS (1)...(1974)
gtgaaaataatgagagtaacagagttattaacaaaagatacaatagcaatggatttaatggcaaatgacaaaaatggtgttattgatgagttagttaatcaattagacaaagcaggtaaattaagtgatgtagcgtcatttaaggaagcgattcacaatcgagaatcacaaagtacaactggtatcggagaaggtattgctattccacatgcgaaagtagccgcagttaagtctccagctatcgcattcggtaaatctaaagaaggtgtcgattaccaaagtttagatatgcaaccagctcatttattctttatgattgcagcgccagaaggtggtgcccaaacacatttagatgctttagctaaactatctggtattttaatggatgaaaatgtacgtgaaaaattattacatgcatcgtctccagaagaagtgttagcaattatcgatcatgctgatgatgaagcgacaaaagaagaagaggcagaagctgaagcacaacaagttgctgctgtagaagcaaatcaagacactaatggatcaaacgagccatatgtattagctgtaactgcttgtccaacaggtattgcacacacatatatggcgcgtgatgcattgaaaaagcaagcggataaaatgggcattaaaattaaagttgaaacgaacggttcaagtggtattaaaaaccatttaacggaacaagatattaaaaatgcaacaggtatcattgttgctgctgatgttcatgttgaaacggatcgcttcgatggtaaaaatgtcgtagaagtaccagtagcagatggtattaaacgcccagaagaattaattaataaagcattagatacaagtcgtaaaccttttgttgcccgtgatggtcaaagaaaaggtaactcaaatgacagtcaagaaaaattaagcccaggtaaagctttctataaacacttaatgaacggtgtttctaacatgctaccacttgtaatatctggtggtattttaatggcaattgtatttttatttggagcaaattcatttaatccaaaaagctcagagtacaatgcgtttgcagagcagctttggaacattggtagtaaaagtgcattcgcgttaatcattccaattttatctggattcattgcacgtagtattgcggataaacctggattcgcttcaggtcttgtaggtggtatgttagcaatttcaggtggttcaggatttattggtggtattattgcaggtttcttagcaggttacttaacacaaggtgttaaagccatgacacgtaagttaccacaagcattagagggattaaagccgacattaatttatccactattaacagtgacagctacaggcttattgatgatttatgtctttaatccaccagcatcttggttaaatcatttgttattagatggattaaacaatttatcaggttctaatattgtattattaggtttagttattggcgctatgatggcgattgatatgggtggtccattcaacaaagcggcatatgtttttgcaacaggtgcgttgattgaaggtaatgcagcaccaattacagctgcaatgattggtggtatgattccaccgttagcaattgcgacagcgatgttaattttcagacgtaaatttacaaaagaacaacgtggttcaattatccctaactatgtgatgggtatgtcgtttattacagaaggtgcgattccatttgcagctgccgatccattacgtgttattccttcaatgatgattggttcaggtataggtggcgcaattgctttaggcttaggttctcgaattactgcgccacacggtggtattattgtaattgttggtactgatggtgcacacttacttcaaactcttattgcacttctagttggtacattagtttcagcattaatttatggacttattaaaccaaagttaactgaaacagaaatcgaagcttcaaaatcaatggacgagtag

SEQ ID NO: 8204 - DNA, 1182 bp, Staphylococcus aureus
  CDS (1)...(1182)
gtgtcagaattaattatatataacggcaaagtttatactgaagatggcaaaatcgataatggttacattcatgtgaaagatggacagattgttgcaattggagaagtaaatgataaagcagcgattgataatgatacgacaaataaaattcaagtgattgatgcaaaaggtcatcatgtagtgccaggttttatcgatatacatattcatggtggttatggacaggatgcaatggatgggtcacacgatggcttaaaatatctatccgaaaatttgttgtctgaagggacgacatcatacttggccactacaatgacgcaatcgactgataaaatagataaagcacttataaatattgctaaatatgaagtggagcaagatgttcacaatgcagcggaaattgtaggtatacatttggaagggccatttatatctgaaaataaagttggtgctcaacatccgcaatacgttgtacgcccatttatcgataaaattaaacattttcaagagactgctaacggactaataaagattatgacgtttgcacctgaagttgaaggtgcaaaagaagcgcttgaaacgtataaagatgacattattttttcaattggtcatacagtggcaacatacgaagaagcagttgaagctgttgagcgaggagctaaacatgtcacgcacttatataatgcagcgacgccattccaacatagagaaccaggtgtttttggagcagcatggttgaatgatgctttacataccgaaatgattgttgatggcacacattctcatccggcatcggttgcaattgcttaccgtatgaaaggtaatgaacgtttttatttaattaccgatgcaatgcgtgcaaaaggtatgcctgaaggagaatatgatttgggtggtcaaaaagtaactgttcaatcgcaacaagcacgtcttgcaaatggtgcgcttgctggtagtattttaaaaatgaatcatgggttacgtaacttaatatcatttacaggtgatacattagatcatttatggcgtgtaacaagtttaaatcaagccattgcattaggtatcgatgatagaaaaggtagtattaaagtaaataaggatgcagatcttgttattctagatgatgacatgaatgtaaaatctacaataaaacaaggtaaggttcacacatttagctaa

SEQ ID NO: 8205 - DNA, 399 bp, Staphylococcus aureus
  CDS (1)...(399)
atgaaacgtgtaataacatatggcacatatgacttacttcactatggtcatatcgaattgcttcgtcgtgcaagagagatgggcgattatttaatagtagcattatcaacagatgaatttaatcaaattaaacataaaaaatcttattatgattatgaacaacgaaaaatgatgcttgaatcaatacgctatgtcgatttagtcattccagaaaagggctggggacaaaaagaagacgatgtcgaaaaatttgatgtagatgtttttgttatgggacatgactgggaaggtgaattcgacttcttaaaggataaatgtgaagtcatttatttaaaacgtacagaaggcatttcgacgactaaaatcaaacaagaattatatggtaaagatgctaaataa

SEQ ID NO: 8206 - DNA, 1941 bp, Staphylococcus aureus
  CDS (1)...(1941)
atgagttcacaaaaaaagaaaattagtctttttgcgttcttcttattaaccgtaataacgattaccttgaagacgtatttttcttattatgttgatttttctttaggtgttaaaggtttagtacaaaacttaatattattgatgaatccttatagtttagtagcactggttttaagtgtgttcctattctttaaaggcaaaaaagcattttggttcatgttcataggcggcttcttattgacgttcctattatatgccaatgttgtgtactttagattcttctcggattttttaacgtttagtactttaaaccaagtaggtaacgtagaatctatgggtggtgcggttagtgcatcattcaaatggtatgactttgtttatttcattgatacgttagtttacttattcattttaatatttaaaacaaaatggttagacacaaaagcatttagtaagaaatttgttcctgtcgtaatggcggcttcagtagcattattcttcttaaacttagcttttgctgaaactgatagaccagaattattaacacgtacatttgaccataaatatttagtgaaatatttaggaccgtataactttacagtatacgatggtgttaaaactatcgaaaataatcaacaaaaagcgttggcatctgaagatgacttaacaaaagtattaaattacacgaaacaacgtcaaacagagcctaacccagaatattatggggtggcaaagaagaaaaatattattaagattcatttagaaagtttccaaaccttcttaattaataaaaaggttaatggtaaagaagtaacaccgtttttaaacaaattatcaagtgggaaagagcaattcacatacttccctaactttttccatcaaacaggtcaaggtaaaacatctgactctgaatttacaatggataacagtttatacggtttaccgcaaggttctgccttttcattaaaaggagataatacgtatcagtcattaccagcaattttagatcaaaagcaaggctacaaatctgatgtcatgcacggtgactataaaacattctggaacagagaccaagtatataaacactttggtatcgataaattctatgatgcaacatactatgacatgtcagataaaaacgttgtaaacttaggcttgaaagacaaaattttctttaaagattctgctaattatcaagctaagatgaaatcaccattctattctcatttaattacattgactaaccactatccattcacattagatgaaaaggatgcaactattgagaagtcaaacacaggtgatgcaacagttgatggttatattcaaacagcgcgttatttagacgaagcattagaagaatatattaatgacttgaagaaaaaaggattatatgacaattcagtgattatgatttatggtgaccactatggtatctctgaaaaccataacaatgccatggaaaaactattaggtgaaaaaatcacaccggctaaatttacagatttaaacagaactggtttctggattaaaatccctggtaaatctggtggtatcaataatgaatatgctggtcaagtcgatgtaatgccaacaattttacatttggctggtatagatacgaagaactatttaatgttcggtactgatttattctctaaaggtcataatcaagtagttccattcagaaatggtgactttataacaaaagattataaatatgttaatggtaagatttattctaataaaaataatgaactcataactactcaaccagctgatttcgaaaagaataaaaagcaagttgaaaaggatctcgaaatgagtgacaacgtgcttaatggtgatttgtttagattctacaaaaatccagacttcaaaaaggtaaatccttcgaagtataaatatgaaacaggacctaaagcaaactctaaaaaataa

SEQ ID NO: 8207 - DNA, 1884 bp, Staphylococcus aureus
  CDS (1)...(1884)
atgggtatggaagcatataaaattgaacatttaaataaatcttatgccgataagactatattcgataacctagatttatcaatttcagaaggtgaaaaaataggtttggtaggcataaatggtacagggaaaagtacgttgttaaaagtaattggtggtattgatgatgattttacagccaatgttatgcatccaaatcaatatcgaattcgatattcgtctcagaaacaggaccttaatgaagatatgacagtttttgatgcagtattaagttctgatacaacaactttacgtatcatcaagcaatatgagcaggcagtacaagcttatgcggatgaccaaagtgataaattgttcaagcgaatgatggatgcgcaagatgctatggatcaacatgatgcttgggactataacgctgaaattaaaacaatcctctcaaaactaggtatacatgatactactaaatacattaaagaattatccggcggacaacaaaaacgtgttgtacttgctaaaacattaatagaacaaccagatttattgttattagatgaacctacgaaccatttagacttcgaatcaatcagctggttgatcaattatgtgaagcaatatcctcatacagttttattcgtaacccatgatcgatattttttaaatgaagtttccactagaattattgaactaaacagaggtaagttagcgtcatatcctggtaactatgaatcttatattgaaatgcgcgctgaaagagaagtaacaattcaaaagcaacaacaaaaacaacgagctttatataaggaagaacttgcttggatgagggctggagctaaggctcgtactacaaagcaacaagctagaattaatcgatttaatgacctagaaaatgaagttaaccagcgatataaagacgataaaggtgaattgaatcttgcttattcaagattaggtaagcaagtgtttgaattagaagacttatcaaaggctattaatgataaagtattatttgaacatctgacggaaattattcaaaaaggtgagcgtattggtgttgttgggccaaatggagctggtaaaacaacactcttaaatattttgagtggagaagaccaacaattcgaaggtaaattgaagactggccagacggttaaagtagcttattttaagcaaacagatgagaccctggatagagatattcgtatgattgattatttaagagaagaaagtgagatcgcaaaagaaaaagatggaacctcggtatctattacacaacttcttgaacgatttttatttccaagtgccactcatggtaaaaaagtttataaattatctggtggagagcaaaagcgtttgtatttattacgtttactcgtacaccagccaaatgttctgttgttagatgaaccgacaaatgatttagatactgagactttaacaatacttgaagattatattcatactttcggtggtacaatgattaccgtaagccatgatcgttacttcttaaataaagttgcacagtcatattggtttattcatgatggtcagatagaaaagattataggaacttttgaagattatgaaagttataaaaaatcattagataaaaataaatctacattgaagcaacaatctaaatcttctacaactgtacgtaagaaaaatgggttatcatataaagaaaaattagaatatgaacaattgatgaaacgcatagaacaagcggaagtaagaatggaagaaattgatgtgctcatgattgaggcaagtgcagattatgggaaaattaaagaattaaacgaagaaaaagaacaacttgaaattcaatatgatttagacatcacaagatggagtgagttagaagaaattaaagaacaacaataa

SEQ ID NO: 8208 - DNA, 1782 bp, Staphylococcus aureus
  CDS (1)...(1782)
atgatgcaacaaacattatcgcattactttgggtatgaaacgtttcgaccaggacaagaagaaattattagcaaagtattagaccatcgtaatgtgcttggtgtcttaccaactggtggaggtaagtctatatgctatcaagtaccaggtttattgttaggtggtacaacaattgtaataagtccactaatatcattaatgaaagatcaagtggatcaattaaaagcgatgggaattcaagctgcttttttaaatagtagtttgactcaaaaagagcaacaacgtattgaaaaagcattatcaaatggagaaattcaatttttgtatgttgcaccagaaagatttgaaaaccgatattttttaaatatgcttcagcgtataaagattcacttagtcgcgtttgatgaagcgcattgtatatctaaatgggggcatgatttcagaccgagttatcaaaacatcatttctaaagtatttacgttacctcaagattttacaataatagcgttgacagcaactgccacggttgaagtacagcaagatattagagaaaagttaaatatcgctcaaactgatcaaattaaaacgagtactaagcgtagaaacttaatttttaaagtaaatcctacttatcaacgtcaaaaatttatattggattatattaaaacacacgatgaagatgcaggtattatttattgttctacacgtaagcaagttgaagagcttcaagaagccttagaaagccagaaaattgaaagtgttatatatcatgcaggtttgagcaataaagaaagagaagaagcgcagaatgatttcttatttgatcgtgttaaagtagtcgttgctacaaatgcttttggtatgggtattgataaatccaatgtacgttttgttattcattataatatgcctggagatttagaatcttattatcaagaagcgggtcgtgcaggtcgtgatgggttgaaaagtgaatgtattttgttatttagcgaacgcgatatcaatttacacgagtattttataacagtctctcaagctgatgatgactataaagataaaatgggcgaaaagttaactaaaatgattcaatatacaaaaacaaaaaaatgtttagaagcaacaattgtccattattttgaaccgaatgaaaaattagaagaatgtgaacaatgtagtaattgtgttcaacaagataaatcatataatatgacacaagaagctaagatgattattagttgcatcgctcgtatgaaacaacaagagagttatagtgttatcattcaagtgctaagaggagagtcaacagattatattaagtataaaggttatgatcaaatttcaacccatggtttaatgaaaggttacacaacatcagaattaagtcacttaatagatgaattaagattcaaagggttcttaaatgaaaatgatgaaatattaatgtgtgatacttcaattaaaaaattactcagtaatgaagtagaagtattcacaacaccatttaagcaaaaagcgactgaaaaagtatttataaatacggttgaaggggttgaccgagtattattcagtcagttggtagaagttcgtaaaaagttaagtgacaaattaacgatagcacctgtaagtatattttctgattacacgttggaggaatttgctaaacgtaagcctgcttcgaaacaagatatgattaatattgatggcgtaggtagttacaaattaaaacattattgtccagcatttttagaaacgattcaaaattataaagccaaagtatag

SEQ ID NO: 8209 - DNA, 1359 bp, Staphylococcus aureus
  CDS (1)...(1359)
gtgtacttaaatatcttccattatgatgtagaagaatttttagatactaaaaaagtaaatgcggatgaagatttacgtttatctacaatatcaactggtttaattgttccatctaaattcttcgatttagctaaagaaggtaaggacttttatatgtttgcacctcatacagttaaagaagaatatggtgtgacattagacgatatcgatttagaaaaatattatgatgacatggttgcaaacccaaatgttgagaaaaagaaaaagaatgcgcgtgaaatgttgaatttaattgcgcaaacacaattacaatcaggttatccatatttaatgtttaaagataatgctaacagagtacatccgaattcaaacattggacaaattaaaatgagtaatttatgtacggaaattttccaattacaagaaacttcaattattaatgactatggtattgaagatgaaatcaaacgtgatatttcttgtaacttaggctcattaaatattgttaatgtaatggaaagcggaaaattcagagattcagttcactctggtatggacgcattaactgttgtaagtgatgtagcaaacattcaaaatgcaccaggagttagaaaagctaacagtgaattacattcagttggtcttggtgttatgaatttacacggttacctagcaaaaaataaaattggttatgagtcagaagaagcaaaagattttgcaaatatcttctttatgatgatgaatttctactcaatcgagcgttcaatggaaatcgctaaagagcgtggtatcaaatatcaagactttgaaaagtctgattatgctaatggcaaatatttcgagttctatacaactcaagaatttgaacctcaattcgaaaaagtacgtgaattgttcgacggtatggctattcctacttctgaggattggaagaaactacaacaagatgttgaacaatatggtttatatcatgcatatagattagcaattgctccaacacaaagtatttcttatgttcaaaatgctacaagttctgtaatgccaatcgttgaccaaattgaacgtcgtacttatggtaatgcggaaacattttaccctatgccattcttatcaccacaaacaatgtggtactacaaatcagcattcaatactgatcagatgaaattaatcgatttaatagcgacaattcaaacgcatattgaccaaggtatctcaacgatactttatgttaattctgaaatttctacacgtgagttagcaagattatatgtatatgcgcactataaaggattaaaatcactttactatactagaaataaattattaagtgtagaagaatgtacaagttgttctatctaa

SEQ ID NO: 8210 - DNA, 972 bp, Staphylococcus aureus
  CDS (1)...(972)
atgatagctgttaattggaacacacaagaagatatgacgaatatgttttggagacaaaatatatctcaaatgtgggttgaaacagaatttaaagtatcaaaagacattgcaagttggaagactttatctgaagctgaacaagacacatttaaaaaagcattagctggtttaacaggcttagatacacatcaagcagatgatggcatgcctttagttatgctacatacgactgacttaaggaaaaaagccgtttattcatttatggcgatgatggagcaaatacacgcgaaaagctattcacatattttcacaacactattaccatctagtgaaacaaactacttattagatgaatgggttttagaggaacctcatttaaaatataaatctgataaaattgttgctaattatcacaaactttggggtaaagaagcttcgatatacgaccaatatatggccagagttacgagtgtatttttagaaacattcttattcttctcaggtttctattatccactatatctagctggtcaaggaaaaatgacgacatcaggtgaaatcattcgtaaaattcttttagatgaatctattcatggtgtatttactggtttagatgcacagcatttacgaaatgaactatctgaaagtgagaaacaaaaagcagaccaagaaatgtataaattgctaaatgacttgtatttaaatgaagagtcatacacaaaaatgttatacgatgatcttggaatcactgaagatgtgctaaactatgttaaatataatggaaacaaagcactttcaaacttaggctttgaaccttattttgaggaacgtgaatttaacccaatcattgagaatgccttagatacaacaactaaaaaccatgacttcttctcagtaaaaggtgatggttatgtattagcattaaacgtagaagcattacaagatgatgattttgtatttgacaacaaataa

SEQ ID NO: 8211 - DNA, 924 bp, Staphylococcus aureus
  CDS (1)...(924)
gtgataaataaagacatctatcaagctttacaacaacttatcccaaatgaaaaaattaaagttgatgaacctttaaaacgatacacttatactaaaacaggtggtaatgcggacttttatattacccctactaaaaatgaagaagtacaagcagttgttaaatatgcctatcaaaatgagattcctgttacatatttaggaaatggctcaaatattattatccgtgaaggtggtattcgtggcattgtaattagtttattatcactagatcatatcgaagtatctgatgatgcgataatagccggtagcggcgctgcaattattgatgtctcacgtgttgctcgtgattacgcacttactggccttgaatttgcatgtggtattccaggttcaattggtggtgctgtgtatatgaatgctggcgcttatggtggcgaagttaaagattgtatagactatgcgctttgcgtaaacgaacaaggctcgttaattaaacttacagcaaaagaattagaattagattatcgtaatagcattattcaaaaagaacacttagttgtattagaagctgcatttactttagctcctggtaaaatgactgaaatacaagctaaaatggatgatttaacagaacgtagagaatctaaacaacctttagagtatccttcatgtggtagtgtattccaaagaccgcctggtcattttgcaggtaaattgatacaagattctaatttgcaaggtcaccgtattggaggcgttgaagtttcaactaaacacgctggttttatggtaaatgtagacaatggaactgctacagattatgaaaaccttattcattatgtacaaaagaccgtcaaagaaaaatttggcattgaattaaatcgtgaagttcgcattattggtgaacatccaaaggaatcgtaa

SEQ ID NO: 8212 - DNA, 648 bp, Staphylococcus aureus
  CDS (1)...(648)
atgacgcttgatgagaacattattaatccatttgttcaattagtacatccgaaaaaagaaaaatatcttccgcaattcttttatgaagaagaaatggaagcgttatttaaaactgtagaagaggacacttcaaaaagtttacgggatcgagttattcttgaattgttatatgctacaggcatccgtgtttcggaattagttaatattaaaaaacaagatatagatttttacgcgaatggtgttaccgtattaggaaaagggagcaaagagcgttttgtaccgtttggtgcttattgtagacaaagcatcgaaaattatttagaacatttcaaaccaattcagtcatgcaatcatgattttcttattgtaaatatgaagggtgaagcaatcactgaacgcggtgtacgatatgttttaaatgatattgttaaacgaacagcaggcgtaagtgagattcatccccacaagctcagacatacatttgcaacgcatttattgaatcaaggtgcagacctaagaacagtacaatcgttattaggtcatgttaatttgtcaacaactggtaaatatacacacgtatctaaccaacaattaagaaaagtgtatctaaatgcacatcctcgagcgaaaaaggagaatgaaacatga

SEQ ID NO: 8213 - DNA, 546 bp, Staphylococcus aureus
  CDS (1)...(546)
atgagtaatacaacattacatgcaacaacaatttatgctgtaagacataatgggaaagcagctatggctggagatgggcaagtaacgcttggtcaacaagtcatcatgaaacaaacggcaagaaaagttcgtcgtttatatgaaggtaaagtgttagctggtttcgcaggtagtgtagcagatgcgtttacgttatttgaaaaattcgaaacaaaattacaacagtttagtggtaacttagaaagagctgctgttgaattggcacaagaatggcgaggcgataaacaattacgtcaattagaagctatgctaattgtaatggataaagatgctattttagttgtcagtggaactggcgaagttattgccccagatgatgaccttatcgctattggatcaggaggcaactacgcattaagcgcaggacgtgcattgaagcgccatgcatcgcatttgtctgctgaagaaatggcatatgagagcttgaaagtagcggctgatatttgtgtctttaccaacgataatattgttgtcgaaacactataa

SEQ ID NO: 8214 - DNA, 960 bp, Staphylococcus aureus
  CDS (1)...(960)
atgataaagatagcattatcgattatattaaaggagctttataacatgtcgaatgttttggagttaacaattcctgcatcaacagccaaccttggagttggctttgattctataggtatggctttagataaatttttgcatctgtctgtaaaagaaacatcagggacaaaatgggaatatattttccatgatgatgcatcgaagcaattacctactgacgaaacaaactttatttatcatgtggcacaacaagttgctgctaaatatagtgttgacttgcctaatttatgtatcgaaatgagaagtgatattccattggcaagagggttaggttcgtcagcttctgctttagtaggagctatatatatcgcaaattattttggtgatatccaactatctaaacacgaggtattacaattagcgactgaaatagaaggacatcctgataatgttgcgccgaccatttatggtggtttaatcgctgggtattataatgatgtctcgaaagaaacgtcagttgcacatattgacataccagacgtggatgtgattgtaacgataccaacctatgaactaaaaacagaagcatcaagacgtgctttaccacaaaagttaacacatagtgaagcggttaaaagtagtgcaattagtaatacaatgatttgtgcattagcacagcacaattatgaattagcaggtaaactcatgcaacaagatggctttcatgaaccgtatcgtcagcatttaattgctgaatttgatgaagtgaaaacaattgctagtcaacataatgcctatgcaactgtaattagtggtgctggaccaactattttaatatttagtcgcaaagaaaatagtggcgaattggttcgcgctttaaatagaaatgtagttacatgtcattctgaattagtagatattaatgttagtggtgttaaagaacgaattgtataccaatag

SEQ ID NO: 8215 - DNA, 804 bp, Staphylococcus aureus
  CDS (1)...(804)
atgacaaattataaagttgtcgttttagatatggatgacacattgctaaattcagataatgtgatatcagaagaaactgcaaattatttaacagcaattcaagatgaaggttattatgttgttttagcatctggtagacctactgaaggtatgattccaactgctagagatttaaaattacctgaacatcatagctatattattagttataacggcagtaaaacgattaacatgactaatgaagaagtagaagtaagtaaatcgattggtaagcaggatttcgatgaaattgtagattattgtcgagagagaggctttttcgttcttacatatcatgatggtcaaattatttacgacagcgaacatgaatatatgaatattgaagcagaattaactggtttaccgatgaaacgtgttgatgatatcaaagcatatattcaaggcgatgtacccaaggtcatgggagttgattatgtagcgaatattactgaagctagaattgatttgaatggtgtgttcaatgataatgtagatgctacgacaagtaagccattcttcttagaatttatggccaaagatgtttcaaaaggtaatgcaattaaagcgttatgtcacaaattgggatattcggtggatcaagtcattgcttttggtgatagtatgaatgataaatcaatgtttgaagtcgcaggtctagctattgctatggggaatgcatcagatgaacttaagcaatatgcagatgaaattacgttagatcataatgaaaatggtattccacatgcacttaaaaaattgttataa

SEQ ID NO: 8216 - DNA, 768 bp, Staphylococcus aureus
  CDS (1)...(768)
atggcagtaatttcaatgaaacaattactagaagcgggtgttcacttcggtcaccaaacacgtcgttggaacccaaaaatgaaaaaatatatcttcactgagagaaatggtatttatatcatcgacttacaaaaaacagtgaaaaaagtagacgaggcatacaacttcttgaaacaagtttcagaagatggtggacaagtcttattcgtaggaactaaaaaacaagcacaagaatcagttaaatctgaagcagaacgtgctggtcaattctacattaaccaaagatggttaggtggattattaactaactataaaacgatctcaaaacgaatcaaacgtatttctgaaattgaaaaaatggaagaagatggtttattcgaagtattacctaaaaaagaagtagtagaacttaaaaaagaatacgaccgtttaatcaaattcttaggcggaattcgtgatatgaaatcaatgcctcaagcattattcgtagttgacccacgtaaagagcgtaatgcaattgctgaagctcgtaaattaaatattcctatcgtaggtatcgttgacactaactgcgatcctgacgaaattgactacgttatcccagcaaacgacgatgctatccgtgcggttaaattattaactgctaaaatggcagatgcaatcttagaaggtcaacaaggcgtttctaatgaagaagtagctgcagaacaaaacatcgatttagatgaaaaagaaaaatcagaagaaacagaagcaactgaagaataa

SEQ ID NO: 8217 - DNA, 258 bp, Staphylococcus aureus
  CDS (1)...(258)
atggcaactatttcagcaaaacttgttaaagaattacgtgaaaaaactggcgcgggtatgatggattgtaaaaaagcgctaactgaaactgatggtgacatcgataaagcgattgattacctacgtgaaaaaggtattgctaaagcagctaaaaaagcagaccgtattgcggctgaaggtttagtacatgtagaaactaaaggtaacgacgcagttatcgttgaaattaactctgaaacagactcttgttgctcgtaa

SEQ ID NO: 8218 - DNA, 549 bp, Staphylococcus aureus
  CDS (1)...(549)
atggaaacaactttaccaaatggtaaatcagttgatgaaagaattaaagaagcaatttcaacaatcggtgaaaaattaagtgttcgtcgttttgctatcagaactaaaactgataacgatgctttcggcgcttacttacacatgggtggacgcattggtgtattaacagttgttgaaggttcaactgacgaagaggcagcaagagacgttgctatgcatatcgctgcaatcaaccctaaatatgtttcttctgaacaagttagcgaagaagaaatcaaccacgaaagagaagttttaaaacaacaagcattaaatgaaggtaaaccagaaaacatcgttgaaaaaatggtggaaggacgtttacgtaaatacttacaagaaatttgtgctgtagatcaagacttcgttaaaaaccctgatgtaacagttgaagctttcttaaaaacaaaaggtggaaaacttgttgacttcgtacgctatgaagtaggcgaaggtatggaaaaacgcgaagaaaactttgcggatgaagttaaaggacaaatgaaataa

SEQ ID NO: 8219 - DNA, 555 bp, Staphylococcus aureus
  CDS (1)...(555)
atgagtgacattattaatgaaactaaatcaagaatgcaaaaatcaatcgaaagcttatcacgtgaattagctaacatcagtgcaggaagagctaattcaaatttattaaacggcgtaacagttgattactatggtgcaccaacacctgtacaacaattagcaagcatcaatgttccagaagcacgtttacttgttatttctccatacgacaaaacttctgtagctgacatcgaaaaagcgataatagcagctaacttaggtgtcaacccaacaagtgatggtgaagtgatacgtattgctgtacctgccttaacagaagaacgtagaaaagagcgcgttaaagatgttaagaaaattggtgaagaagctaaagtatctgttcgaaatattcgtcgtgatatgaatgatcagttgaaaaaagatgaaaaaaatggcgacattactgaagatgagttgagaagtggtactgaagatgttcagaaagcaacagacaattcaataaaagaaattgatcaaatgattgctgataaagaaaaagatattatgtcagtataa

SEQ ID NO: 8220 - DNA, 804 bp, Staphylococcus aureus
  CDS (1)...(804)
atgacagagatgatcaggctcggaggaaagaccatgtttaaaaagctaataaataaaaagaacactataaataattataatgaagaattagactcgtctaatatacctgaacatatcgctattattatggatggtaatgggcgatgggctaagaagcgaaaaatgcctagaattaaaggtcattacgaaggtatgcaaacaataaaaaaaattactagggtagctagtgatattggtgttaagtacttaactttatatgccttttccactgaaaattggtcaagacctgaaagtgaagtaaattatattatgaatttgcctgtcaatttcttaaagacatttttaccggaactaattgaaaaaaatgtcaaagttgaaacaattggatttactgataagttgccaaaatcaacgatagaagcaataaataatgctaaagaaaagacagctaataataccggcttaaaattaatatttgcaattaattatggtggcagagcagaacttgttcatagtattaaaaatatgtttgacgagcttcatcaacaaggtttgaatagtgatatcatagatgaaacatatataaacaatcatttaatgacaaaagactatcctgatccagagttgttaattcgtacttcaggagaacaaagaataagtaatttcttgatttggcaagtttcgtatagtgaatttatctttaatcaaaaattatggcctgactttgacgaagatgaattaattaaatgtattaaaatttatcagtcacgtcaaagacgctttggcggattgagtgaggagtag

SEQ ID NO: 8221 - DNA, 783 bp, Staphylococcus aureus
  CDS (1)...(783)
atgaaagttagaatgctgacagctattattgccttaatcgtattcttgcctatcttgttaaaaggcggccttgtgttaatgatatttgctaatatattagcattgattgcattaaaagaattgttgaatatgaatatgattaaatttgtttcagttcctggtttaattagtgcagttggtcttatcatcattatgttgccacaacatgcagggccatgggtacaagtaattcaattaaaaagtttaattgcaatgagctttattgtattaagttatactgtcttatctaaaaacagatttagttttatggatgctgcattttgcttaatgtctgtggcgtatgtaggcattggttttatgttcttttatgaaacgagatcagaaggattacattacatattatatgcctttttaattgtttggcttacagatacaggggcttacttatttggtaaaatgatgggtaaacataagctttggccagtaataagcccgaataaaacaatcgaaggattcataggtggcttgttctgtagtttgatagtgcctcttgcaatgttatattttgtagatttcaatatgaatgtatggatattacttggagtgacattgattttaagtttatttggtcaattaggtgatttagtggaatcaggatttaagcgtcatttcggcgttaaagactcaggtcgaatactacctggacacggtggtattttagaccgatttgacagctttatgtttgtgttaccattattaaatattttattaatacaatcttaa

SEQ ID NO: 8222 - DNA, 1704 bp, Staphylococcus aureus
  CDS (1)...(1704)
atgaagcaatccaaagtttttataccaacgatgcgtgacgtgccatcagaagcagaagcacaaagtcatcgtttattattgaaatcgggtttgataaaacaaagtacaagtgggatttatagttatttaccgctagcaacacgtgtgttaaataatattactgcaattgtgcgacaagaaatggaacgtatcgattctgttgaaattttaatgccagcgttacaacaagctgaattatgggaagaatcaggacgttggggtgcatatggcccagaattaatgcgtttacaagatagacatggaagacaatttgcattaggtccaacacatgaagaattagttacatcaatagtaagaaatgaattgaaatcatacaaacaattaccgatgacattattccaaattcaatctaaattccgtgatgaaaagagaccacgttttggtttacttcgtggtcgtgaatttattatgaaagatgcgtattcattccatgctgacgaggaatcattagatcaaacgtatcaagatatgtatcaagcgtatagccgtatttttgagagagttggcattaacgcaagaccagtagttgcagattcaggtgctattggcggtagccatacacatgaatttatggcattaagtgctatcggtgaggatacaatcgtttacagtaaagaaagtgactatgctgctaatatcgaaaaagcagaagtcgtttacgaaccaaatcataagcatactactgtgcgatctttagaaaaaattgaaacaccaaatgttaagactgcgcaagaattggcagacttcttaggtagaccagtagatgaaatcgttaaaacgatgattttcaaagttgatggcgaatatattatggttttagtgcgtggacatcatgaaattaatgacattaaattaaaatcttatttcggcacagataatattgaattagcaacacaagacgagattgttaatttagttggtgcaaatcctggttcactaggtcctgtaattgataaagaaatcaaaatttatgcagataattttgtgcaagatttaaataatttagttgtcggtgctaacgaagatggttatcacttaattaatgtaaatgtaggtagagacttcaacgttgatgaatacggcgatttccgttttattttagaaggcgaaaagttaagtgatggttcaggcgttgcacattttgctgaaggtattgaagttggtcaagtattcaaattgggtactaagtattcagaatcaatgaatgctacattcttagataaccaaggaaaagcccaacctttaattatgggttgttacggaattggaatttctagaacgctaagtgcgattgttgaacaaaatcacgatgataatggaattgtttggcctaaatcagttactccgtttgatttacatttaatttctattaatcctaagaaagatgatcaacgagaactagcagatgcactatatgctgaatttaatactaaatttgatgtattgtacgatgatcgtcaggaacgtgcaggtgtcaaatttaatgatgccgatttaattggtttaccactgcgaattgttgttggtaaacgtgcatcggaaggtattgtagaagttaaagaacgtttaacaggtgatagcgaagaagtccacattgatgacttaatgactgtcattacaaataaatatgataacttaaaataa

SEQ ID NO: 8223 - DNA, 4329 bp, Staphylococcus aureus
  CDS (1)...(4329)
gtggtaattgtcttggcaatgacagagcaacaaaaatttaaagtgcttgctgatcaaattaaaatttcaaatcaattagatgctgaaattttaaattcaggtgaactgacacgtatagatgtttctaacaaaaacagaacatgggaatttcatattacattaccacaattcttagctcatgaagattatttattatttatacatgcaatagagcaagagtttaaagatatcgccaacgttacatgtcgttttacggtaacaaatggcacgaatcaagatgaacatgcaattaaatactttgggcactgtattgaccaaacagctttatctcctaaagttaaaggtcaattgaaacagaaaaagcttattatgtctggaaaagtattaaaagtaatggtatcaaatgacattgaacgtaatcattttgacaaggcttgcaatggaagtcttatcaaagcgtttagaaattgtggctttgatatcgataaaatcatattcgaaacaaatgataatgatcaagaacaaaacttagcttctttagaagcacatattcaagaagaagacgaacaaagtgcacgattggcaacagagaaacttgaaaaaatgaaagctgaaaaagcgaaacaacaagataacaacgaaagtgctgtcgataagtgtcaaattggtaagccgattcaaattgaaaatattaaaccaattgaatctattattgaggaagagtttaaagttgcaatagagggtgtcatttttgatattaacttaaaagaacttaaaagtggtcgtcatatcgtagaaattaaagtgactgactatacggactctttagttttaaaaatgtttactcgtaaaaacaaagatgatttagaacattttaaagcgctaagtgttggtaaatgggttagggctcaaggtcgtattgaagaagatacatttattagagatttagttatgatgatgtctgatattgaagagattaaaaaagcgacaaaaaaagataaggctgaagaaaagcgtgtagaattccacttgcatactgcaatgagtcaaatggatggtataccaaatattggtgcatatgttaaacaggcagcagactggggacatccagccattgcggttacagaccataatgttgtgcaagcatttccagatgctcacgcagcagcggaaaaacatggtattaaaatgatatacggtatggaaggtatgttagttgatgatggtgttccgattgcatacaaaccacaagatgtcgtattaaaagatgctacttatgttgtattcgacgttgagacaactggtttatcaaatcagtatgataaaatcatcgagcttgcagctgtgaaagttcataacggcgaaatcatcgataagtttgaaaggttcagtaatccgcatgaacgattatcggaaacgattatcaatttgacgcatattactgatgatatgttagtagatgcccctgagattgaagaagtacttacagaatttaaagaatgggttggcgatgcgatattcgtagcacataatgcttcgtttgatatgggcttcatcgacacgggatatgaacgtcttggatttggaccatctacgaatggtgttatcgatacattagaattatctcgtacgattaatactgaatatggtaaacatggtttaaatttcttagctaaaaaatacggtgtagaattaacgcaacatcaccgtgccatttatgatacagaggcaacagcttacattttcataaaaatggttcaacaaatgaaagaattagacgtattaaatcataacgaaatcaacaaaaaactcagtaatgaagatgcatataaacgtgcaagacctagtcatgtcacattaattgtacaaaaccaacaaggtcttaaaaatctatttaaaattgtaagtgcatcattggtgaagtatttctaccgtacgcctcgaattccacgttcattgttagatgaatatcgtgagggattattggtaggtacagcgtgtgatgaaggtgaattatttacggcagttatgcagaaggaccagagccaagttgaaaaaattgccaaatattatgatttcattgaaattcaaccaccggcactttatcaagatttaattgatagagagcttattagagatactgaaacattacatgaaatttatcaacgtttaatacatgcaggtgacacagcgggtattcctgttattgcgacaggaaatgcacactatttgtttgaacatgatggtatcgcacgtaaaattttaatagcatcacaacccggcaatccacttaatcgctcaactttaccggaagcacattttagaactacagatgaaatgttaaacgagtttcattttttaggtgaagaaaaagcgcatgaaattgttgtgaaaaatacaaacgaattagcagatcgaattgaacgtgttgttcctattaaagatgaattatacacaccgcgtatggaaggtgctaacgaagaaattagagaactaagttatgcaaatgcacgtaaactgtatggtgaagacctgcctcaaatcgtaattgatcgattagaaaaagaattaaaaagtattatcggtaatggatttgcggtaatttacttaatttcgcaacgtttagttaaaaaatcattagatgatggatacttagttggttcccgtggttcagtaggttctagttttgtagcgacaatgactgagattactgaagtaaacccgttaccgccacactatatttgtccgaactgtaaaacgagtgaatttttcaatgatggttcagtaggatcaggattcgatttgcctgataagacgtgtgaaacttgtggagcgccacttattaaagaaggacaagatattccgtttgaaacatttttaggatttaaaggagataaagttcctgatatcgacttaaactttagtggtgaatatcaaccgaatgcccataactacacaaaagtattatttggtgaggataaagtattccgtgcaggtacaattggtactgttgctgaaaagactgcttttggttatgttaaaggctatttgaatgatcaaggcatccacaaaagaggcgctgaaatagatcgactcgttaaaggatgtacaggtgttaaacgtacaactggacagcatccagggggtattattgtagtacctgattacatggatatttatgattttacgccgatacaatatcctgccgatgatcaaaattcagcatggatgacgacacattttgatttccattctattcatgataatgtattaaaacttgatatacttggacacgatgatccaacaatgattcgtatgcttcaagatttatcaggaattgatccaaaaacaatacctgtagatgataaagaagtaatgcagatttttagtacacctgaaagtttgggtgttactgaagatgaaattttatgtaaaacaggtacatttggggtaccagaattcggtacaggatttgtgcgtcaaatgttagaagatacaaagccaacaacattttctgaattagttcaaatctcaggattatctcatgggacagatgtgtggttaggtaatgctcaagaattaattaaaacaggtatatgtgatttatcaagtgtaattggttgtcgtgatgatatcatggtttatttaatgtatgctggtttagaaccatcaatggcttttaaaataatggagtcagtacgtaaaggtaaaggtttaactgaagaaatgattgaaacgatgaaagaaaatgaagtgccggattggtatttagattcatgtcttaaaattaagtacatgttccctaaagcccatgcagcagcatacgttttaatggcagtacgtatcgcatatttcaaagtacatcatccactttattactatgcatcttactttacaattcgtgcgtcagattttgatttaatcacgatgattaaagataaaacaagcatacgaaatactgtaaaagacatgtattctcgctatatggatctaggtaaaaaagaaaaagacgtattaactgttttggaaattatgaatgaaatggcgcatcgaggttatcgaatgcaaccgattagtttagaaaagagtcaagcgttcgaatttataattgaaggcgatacacttattccgccgttcatatcagtgcctgggcttggtgaaaacgttgcgaaacgaattgttgaagctcgtgacgatggaccatttttatcaaaagaagatttaaacaaaaaagctggtttatctcagaaaattattgagtatttagatgagttaggctcattaccgaatttaccagataaagctcaactttcgatattcgatatgtaa

SEQ ID NO: 8224 - DNA, 2142 bp, Staphylococcus aureus
  CDS (1)...(2142)
atgaatatcataaggagtgattatatgagtaaacaaagaatttacgaatatgcgaaagaattaaatctaaagagtaaagagattatagatgagttaaaaagcatgaatattgaggtttcaaatcatatgcaagctttggaagatgaccaaattaaagcattagataaaaagttcaaaaaagaacaaaagaacgacaataaacaaagcactcaaaataatcaccaaaaatcaaacaatcaaaaccaaaataaagggcaacaaaaagataacaaaaagaatcaacaacaaaataataaaggcaacaaaggcaataaaaagaataatagaaataataagaaaaataacaagaataataaaccacaaaatcaaccagctgctctaaaagaaataccatcaaaagtgacatatcaagaaggtattacagtaggcgaatttgcggataaattaaatgttgaatcatcagaaattatcaaaaaattattcttacttggtattgttgctaatatcaatcaatcattaaatcaagaaacaatcgaattaattgccgatgattatggcgttgaggttgaagaagaagttgtgattaatgaagaagatttatcaatctacttcgaagacgaaaaagatgatccagaagcaattgagagaccagcagttgtaacaattatgggacatgttgaccatggtaaaactactttattagattcaattcgtcatacaaaagttacagcaggtgaagcaggcggaatcactcaacatattggtgcatatcaaattgaaaacgatggcaaaaaaatcactttcttagatacaccgggacatgctgcatttacaacgatgcgtgcgcgtggtgcacaagtaacagatattacaattttagtagtagcagctgacgatggtgttatgccacaaacaattgaagcaattaaccatgctaaagaagcagaagtaccaattattgttgcagtaaataaaattgataaaccaacttcaaatcctgatcgagttatgcaagaattaactgaatatggtttaattcctgaagattggggcggcgaaacaattttcgttccactttctgcattaagtggtgatggtatcgacgatttattagaaatgataggattagttgcagaagttcaagaacttaaagcaaatcctaaaaaccgtgctgttggtacagttatcgaagctgaattagataaatcacgaggtccttctgcatcattattagtacaaaacggtacattaaatgttggtgatgcgattgtagttggtaatacttacggccgtatccgtgcaatggttaatgacttaggtcaaagaatcaaaacggctggcccatcaacgcctgttgaaattacaggtattaatgatgtgccacaagctggggatcgctttgttgtatttagtgatgaaaaacaagctcgtcgtattggtgaatcaagacacgaagctagcattgtacaacaacgtcaagaaagtaaaaatgtttcattagataacctgtttgaacaaatgaaacaaggtgaaatgaaagacttaaacgttattattaaaggtgatgttcaaggttctgttgaagctttagctgcatcattaatgaaaattgatgttgaaggcgtaaatgttcgtatcattcatacagcggttggtgcgattaacgagtcagacgtgacacttgctaatgcctcaaatggtattatcattggtttcaatgttcgtccagacagtggtgcaaaacgtgctgcagaagctgaaaatgttgatatgcgtttacacagagttatttataatgttatcgaagaaattgaatcagcgatgaaaggtttacttgatccagaatttgaagaacaagttatcggacaagctgaagttcgtcaaacattcaaagtttctaaagttggtactattgctggatgttatgttactgaaggtaaaattacgcgaaatgctggtgtacgtattattcgtgatggtattgttcaatatgaaggcgaattagatacacttaaacgtttcaaagatgatgctaaggaagttgcaaaaggttatgaatgtggtattacaattgaaaactacaatgaccttaaagaaggcgatgttatcgaagcatttgaaatggttgaaattaagcgttaa

SEQ ID NO: 8225 - DNA, 885 bp, Staphylococcus aureus
  CDS (1)...(885)
atggttattcaatggtatccaggacatatggcgaaagccaaaagagaagtaagtgaacaattaaaaaaagtagatgtagtgtttgaactagtagatgcaagaattccatatagttcaagaaaccctatgatagatgaagttattaaccaaaaaccacgtgttgttatattaaataaaaaagatatgtctaatttaaatgagatgtcaaaatgggaacaattttttattgataaaggatactatcctgtatcagtggatgctaagcacggtaaaaatttaaagaaagtggaagctgcagcaattaaggcgactgctgaaaaatttgaacgcgaaaaagcgaaaggacttaaacctagagcgataagagcaatgattgttggaattccaaatgttggtaaatccacattaataaataaactggcaaagcgtagtattgcacagactggtaataaaccaggtgtgaccaaacaacaacaatggattaaagttggtaatgcattacaattattagacacaccagggatactttggcctaaatttgaagatgaagaagtcggtaagaagttgagtttaacaggcgcgattaaagatagtattgtgcacttagatgaagttgccatctatggtctgaactttttaattcaaaatgatttagcgcgcttaaaagcacattataaaatcgaagtacctgaagatgcagaaatcatagcgtggtttgatgcgatagggaaaaaacgtggcttaattcgtcgtggtaatgaaattgattacgaagcagtcattgaactgattatttatgatattcgaaatgctaaaataggaaattattgttttgatatttttaaagatatgactgaggaattagcaaatgacgctaacaattaa

SEQ ID NO: 8226 - DNA, 270 bp, Staphylococcus aureus
  CDS (1)...(270)
atggcaatttcacaagaacgtaaaaacgaaatcattaaagaataccgtgtacacgaaactgatactggttcaccagaagtacaaatcgctgtacttactgcagaaatcaacgcagtaaacgaacacttacgtacacacaaaaaagaccaccattcacgtcgtggattattaaaaatggtaggtcgtcgtagacatttattaaactacttacgtagtaaagatattcaacgttaccgtgaattaattaaatcacttggtatccgtcgttaa

SEQ ID NO: 8227 - DNA, 2097 bp, Staphylococcus aureus
  CDS (1)...(2097)
atgtctcaagaaaagaaagtttttaaaactgaatgggcaggaagatctttaacgattgaaacagggcaattagctaaacaagcaaatggcgctgtattggttcgttatggagatacagtcgtgttatcgacggcaactgcatcaaaagaacctcgtgatggagatttcttcccattaacagtgaactatgaagaaaaaatgtacgctgcgggtaaaattcctggtggatttaaaaagagagaaggacgtcctggtgacgatgcaacattaactgcgcgattaattgatagaccaattagacctttattccctaaaggatataagcatgatgttcaaattatgaacatggtattaagtgcagatcctgattgttcaccacaaatggctgcaatgattggttcatctatggcgcttagtgtgtcggatattccattccaagggccaatcgccggtgtaaatgtgggttatattgacggtaaatatatcattaacccaacagtagaagaaaaagaagtttctcgtttagaccttgaagtagctggtcataaagatgcagtaaacatggtagaggcaggcgctagtgagattactgaacaagaaatgttagaggcgattttctttggtcatgaagagattcaacgtttagttgatttccaacaacaaatcgtcgaccacattcaacctgttaaacaagaatttattccagcagagcgtgatgaagcgctagttgaacgtataaaatctttaaccgaagaaaaaggacttaaagaaacagttttaacatttgataaacaacaacgagatgaaaatcttgataacttaaaagaagaaatcgtcaatgaatttatcgatgaagaagatccagagaatgaattacttattaaagaagtttatgcaattttaaatgaattagtgaaagaagaagttcgacgtttaattgcagatgaaaaaattagaccagacggccgtaaacctgatgaaatccgtccattagattctgaagttggtattttacctagaacgcatggttcaggtctatttacacgtggtcagactcaagcactttcagttttaacgttaggtgctttaggcgattatcaattaattgatggtttaggacctgaagaagaaaaaagattcatgcatcattataacttcccgaatttttcagtaggtgaaactggtccagtacgtgcgccaggtcgtcgtgaaattggacatggtgcgttaggtgaaagagcattaaaatatattattcctgatactgctgatttcccatatacaattcgtattgtaagtgaggtacttgaatcaaacggttcatcatctcaagcgtcaatttgtggatcaacattagctttaatggatgcgggcgtaccgattaaagcaccagttgctggtattgctatgggccttgttacacgtgaagatagctatacgattttaactgatatccaaggtatggaagatgcattaggtgatatggactttaaagtcgctggtactaaagaaggtattacagcaatccaaatggatattaaaattgacggtttaacacgtgaaattatcgaagaggctctagaacaagcgagacgtggtcgtttagaaataatgaatcatatgttacaaacaattgatcaaccacgtactgaattaagtgcttacgcgccaaaagttgtaactatgacaattaaaccagataagattagagatgttatcggacctggtggtaaaaaaatcaacgaaattattgatgaaacaggcgttaaattagatattgaacaagatggtactatctttattggtgccgttgatcaagctatgataaatcgtgctcgtgaaatcattgaggaaattacacgtgaagcggaagtaggtcaaacttatcaagccactgttaaacgtattgaaaaatacggtgcgtttgtaggcctattcccgggtaaagatgcgttgcttcacatttcacaaatttcaaaaaatagaattgaaaaagtggaagatgtattaaaaatcggtgacacaattgaagttaagattactgaaattgataaacaaggtcgagtaaatgcatcacacagagcattagaagaataa

SEQ ID NO: 8228 - DNA, 1725 bp, Staphylococcus aureus
  CDS (1)...(1725)
atgaatagtgagtttatatatggacgggtaacaaatttaggaggtaagattttgagtttaataaagaaaaagaataaagatattcgcattataccattaggcggtgttggcgaaattgctaaaaatatgtatatcgttgaagtagacgatgaaatgtttatgttagatgctggacttatgtttccagaagacgaaatgctaggtattgatattgttataccagacatttcatacgtacttgaaaataaagataaattgaagggtatattccttacacacggacatgagcacgcgattggtgcagtgagttatgttttagaacaattagatgcaccagtatatggatctaaattgacaatagcgttaattaaagaaaatatgaaagcccgtaatattgataaaaaagttcgctactatacagttaataatgattcaattatgagattcaaaaacgtgaatattagtttctttaatacgacacacagtattcctgatagtttaggtgtttgtattcacacttcatatggtgccattgtgtatacaggtgaatttaagtttgaccaaagtttacatggacattatgcaccagatattaaacgtatggcagagattggtgaagaaggcgtatttgtcttaatcagtgattctactgaggcagagaaacctggatataatactccggaaaatgtgattgaacatcatatgtatgatgcttttgcaaaagtgcgaggtcgcttgatagtttcatgttatgcttcgaactttatacgtattcagcaagttttaaatattgctagcaagctaaatcgtaaagtgtcatttttaggaagatcacttgaaagttcatttaatattgctcgtaaaatggggtatttcgacattcctaaagatttgctaattcctataacagaagttgataattatcctaaaaatgaagtgataattatagctactggtatgcaaggagaacctgtagaagccttaagtcaaatggcgcaacataagcataaaattatgaatatcgaagaaggcgattctgtatttttagcaattacggcttctgctaatatggaagttatcattgcgaatacattaaatgagcttgtacgtgctggcgcacatattattccaaataacaagaagattcatgcttcaagtcatggttgcatggaagaattaaaaatgatgattaatattatgaaacctgaatactttattcctgtacaaggtgaatttaaaatgcagatagcacatgcgaagctagcagctgaagcaggtgttgcaccagaaaagattttccttgtggaaaaaggagatgtcattaattacaacggtaaagatatgatattaaatgaaaaggtaaattcaggaaatattttaatagatggtattggtattggggatgtaggaaatatcgtgttgagagaccgtcatcttttagcagaagatggtatctttattgctgtagtaacgttagatcctaaaaatagacgtatagctgcgggacctgaaattcaatctcgtggatttgtatatgtacgtgaaagtgaagacttattacgtgaagcagaagagaaagtacgtgaaatagtagaagctggtttacaagaaaaacgcatagaatggtctgaaattaagcaaaatatgcgtgatcaaattagtaaactattattcgaaagtacaaaacgtcgtcctatgattattccagtaatttctgaaatttaa

SEQ ID NO: 8229 - DNA, 2379 bp, Staphylococcus aureus
  CDS (1)...(2379)
gtgcgtcaattggcacaagcaaaaaagaaatcgacagctaagaaaaaaacaacatcaaaaaaaagaacaaattcgaggaaaaagaagaatgataatccgatacgttatgtcatagctattttagtagttgtattaatggtgttgggtgttttccaattaggaataataggtcgtctaattgacagcttctttaattatttatttgggtacagtagatatttaacatatattttagtactcttagcaactggttttattacatactctaaacgtattcctaaaactagacgaacggctggttcgattgtattgcaaattgcattgctatttgtatcacagttagtttttcattttaatagtggtatcaaagctgaaagagaacctgtgctttcttatgtgtatcagtcataccaacacagtcattttccaaattttggtggcggtgtattaggcttttatttattagagttaagcgtacctttaatttcactatttggtgtatgtattattactattttattattatgctcaagtgttattttattaataaaccatcaacatcgtgatgttgcaaaagttgcactggaaaatataaaagcttggtttggttcatttaatgaaaaaatgtcggaaagaaaccaagaaaaacaattgaagcgtgaagaaaaagcgagacttaaagaagaacaaaaggcacgtcaaaatgaacagccacaaataaaagatgtgagtgattttacggaagtgcctcaagaaagagatattccaatttatgggcatactgaaaatgaaagtaaaagccagagtcaaccaagtcgaaaaaagcgagtgtttgatgcagagaatagttcgaataacatcgtaaatcatcatcaagcagatcagcaagagcaattaacagaacaaactcataacagtgttgaaagtgaaaacactattgaagaagctggtgaagttacgaatgtatcgtatgttgttccaccgttaactttacttaatcaacctgcaaaacaaaaagcaacatctaaagctgaagtacaacgtaaaggacaagtactagagaatacattaaaagattttggggtaaatgcaaaagtgacacaaattaaaattggtcctgcagtaactcaatatgaaattcaaccagctcaaggggttaaagtgagtaaaattgtaaacttgcataatgatattgcattagctttagcagcaaaagatgttagaatcgaagcgccaatacctggtcgctctgcagtaggtattgaagtgccaaatgagaaaatttcattagtttcactaaaagaagttttagatgaaaaattcccgtctaataataaactagaagttggattaggaagagatatatcaggtgatccaattactgttccactaaatgaaatgccacacttattggtggcaggatcgacgggtagtggtaaatctgtttgtataaatggtattattacaagtattttattaaatgctaagccgcatgaagttaaacttatgttaatcgatccgaaaatggttgaactaaatgtttataacggaattccacatttattaattccggttgttacaaatcctcataaagctgctcaagctttagaaaaaattgtagctgagatggaaagacgttatgatttattccaacattcatcaactagaaatattaaaggttataacgaattaatccgtaagcaaaatcaagaattagatgagaagcaaccagaattaccttatatcgttgttattgtagatgagcttgcagatttaatgatggtagctggtaaagaagttgaaaatgcgattcaacgtatcacacaaatggcacgtgcagcaggtatacatttgattgtagcgacacaaagaccttctgtggatgtaattacaggtatcattaaaaataatattccatctagaattgcttttgctgtgagttctcaaacagattcaagaactattattggtactggcggcgcagaaaagttacttggtaaaggtgacatgttatacgttggaaatggtgactcatcacaaacacgtattcaaggggcgtttttaagtgaccaagaggtgcaagatgttgtaaattatgtagtagaacaacaacaggcaaattatgtaaaagaaatggaaccagatgcaccagtggataaatcggaaatgaaaagtgaagatgctttatatgatgaagcgtatttgtttgttgttgaacaacaaaaggcaagtacatcattgttacaacgccaatttagaattggttataatagagcatctaggttgatggatgatttagaacgcaatcaggtaatcggtccacaaaaaggaagcaagcctagacaagttttaatagatcttaataatgacgaggtgtaa

SEQ ID NO: 8230 - DNA, 705 bp, Staphylococcus aureus
  CDS (1)...(705)
atgaaagcattagtattaggtggttctggttcaattggttctgagatagtcaaacaattattaactgatggatttgaagtttatgtgcaatattatcgtactgatataaatgaattaactagcaaatttaatgatgataaagttcattttatacaagcggatttatctcaaacaattgatattgacaaaacatttggtgacattaaatcattagactgtttaatatatgcaagtggtcagtctttatatggtgttttacaagatatgaaagaccatgatattgatgcatgttatcagttgaatgtcttgcaattaattcgattatgtagatatttcgttgatgttttacgtcaaagtgacaatggaagaattattgtaatttcatcaatttggggtgagacaggagctagtatggaaactatttattcgacgatgaaaagtgcacaattaggtttcgttaaggcgcttagtcaagagcttgcactaacatcagtgacagtaaatgctatcacacctggatttgtagccggtaatatggcaagtgagtggcaagaagatgaacttcaagaaatgataactgaattaccacaacagcgattggttttaccgagtgaggttgctcatacatgcgcctatttatatcacccaaatgctagaagtgttactggaactatacagaaagttaatggtgcttggtatatttaa

SEQ ID NO: 8231 - DNA, 882 bp, Staphylococcus aureus
  CDS (1)...(882)
atgaatattacaatgaatcataatttgttaattaaacaaggggtgaggttcaccatgacagttgcagagaaaaaagaatggtacctagaatacgaaattgaaattaatagaccaggtcttttaggtgatgtatctagtttattaggtatgttaggtataagtattgttacaattaatggtgttgatcaaggtaaacgaggccttttaattaaaacagacaatcttgaaaaagttgaacgttttgagcaaatagctcgtggtataaatgaaattgaaataacaaagcttaaaaaaccagaattaagagaccgtcttgcagttagacatggtagatatattgagcaagatgcaaaagataagaaaacctttcgatttgagcgtgaagatttaggcttgctagtagactttttagctgaattgttcaaagaagaaggtcataagttgattggcattagaggtatgccacgggttggtaaaactgaatcaattgttgcgggaagtgtttgtgcacataagagatggttatttattagttctactttaataaaacaaactgtacgtagctctctaattaaaggggaatatgatgccaatcatgtatatattattgatggtgcagttactgccagagaatctaatccaaaacatcaagagcttgttaacgaagttatgacgttaccatcaatcaaagttgttgaacatccagatttatttgttgaaacaagtacttgtacaatggaagattttgactatattatcgaattgagagaaaatgaaaatcaagaaatacattacgaagaaatgaagaaacagacagtccaaagtaagaataatttagattttggagatccatttggtggtggttttggtttcttcgaataa

SEQ ID NO: 8232 - DNA, 579 bp, Staphylococcus aureus
  CDS (1)...(579)
atgaatattccgaaccagattacggtttttagagtagtgttaataccagtttttatattgtttgcgttagttgattttggatttggcaatgtgtcatttctaggaggatatgaaataagaattgagttattaatcagtggttttatttttatattggcttcccttagcgattttgttgatggttatttagctagaaaatggaatttagttacaaatatggggaaatttttggatccattagcggataaattattagttgcaagtgctttaattgtacttgtacaactaggactaacaaattctgtagtagcaatcattattattgccagagaatttgccgtaactggtttacgtttactacaaattgaacaaggattcgtaagtgcagctggtcaattaggtaaaattaaaacagcagttactatggtagcaattacttggttgttattaggtgatccattggcaacattgattggtttgtcattaggacaaattttattatacattggcgttatttttactatcttatctggtattgaatacttttataaaggtagagatgtttttaaacaaaaataa

SEQ ID NO: 8233 - DNA, 1560 bp, Staphylococcus aureus
  CDS (1)...(1560)
gtgaatttattaagcctcctactcattttgctggggatcattctaggagttgttggagggtatgttgttgcccgaaatttgttgcttcaaaagcaatcacaagctagacaaactgccgaagatattgtaaatcaagcacataaagaagctgacaatatcaaaaaagagaaattacttgaggcaaaagaagaaaaccaaatcctaagagaacaaactgaagcagaactacgagaaagacgtagcgaacttcaaagacaagaaacccgacttcttcaaaaagaagaaaacttagagcgtaaatctgatctattagataaaaaagatgagattttagagcaaaaagaatcaaaaattgaagaaaaacaacaacaagtagatgcaaaagagagtagtgttcaaacgttaataatgaagcatgaacaagaattagaacgcatctccggtctcactcaagaagaagctattaatgagcaacttcaaagagtagaggaagaactgtcacaagatattgcagtacttgttaaagaaaaagaaaaagaagctaaagaaaaagttgataaaacagcaaaagaattattagctacagcagtacaaagattagcagcagatcacacaagtgaatcaacggtatcagtagttaacttacctaatgatgagatgaaaggtcgaatcattggacgagaaggacgaaacatccgcacacttgaaactttaactggcattgatttaattattgatgacacaccagaagcagttatattatctggttttgatccaataagaagagaaattgctagaacagcacttgttaacttagtatctgatggacgtattcatccaggtagaattgaagatatggtcgaaaaagctagaaaagaagtagacgatattattagagaagcaggtgaacaagctacatttgaagtgaacgcacataatatgcatcctgacttagtaaaaattgtagggcgtttaaactatcgtacaagttacggtcaaaatgtacttaaacattcaattgaagttgcgcatcttgctagtatgttagctgctgagctaggcgaagatgagacattagcgaaacgagctggacttttacatgatgttggtaaagcaattgatcatgaagtagaaggtagtcatgttgaaatcggtgtagaattagcgaaaaaatatggtgaaaatgaaacagttattaatgcaatccattctcaccatggtgatgttgaacctacatctattatatctatccttgttgctgctgcagatgcattgtctgcggctcgtccaggtgcaagaaaagaaacattagagaattatattcgtcgattagaacgtttagaaacgttatcagaaagttatgatggtgtagaaaaagcatttgcgattcaggcaggtagagaaatccgagtgattgtatctcctgaagaaattgatgatttaaaatcttatcgattggctagagatattaaaaatcagattgaagatgaattacaatatcctggtcatatcaaggtgacagttgttcgagagactagagcagtagaatatgcgaaataa

SEQ ID NO: 8234 - DNA, 798 bp, Staphylococcus aureus
  CDS (1)...(798)
atgagaataatatttataggggatatcgtaggtaaaattggacgagacgcaattgaaacgtacatacctcaactgaagcaaaagtataaaccaacagttacaattgtaaatgctgaaaatgcagcacatggtaaaggtttgactgaaaaaatatataaacaattactaagaaatggtgtagatttcatgactatgggtaatcacacatatggtcaacgtgaaatttatgattttatagatgaagcaaaacgactagtaagaccagcgaattttccggatgaagcgccgggaattggtatgagatttatacaaattaatgatattaaacttgcagttattaatctgcaaggaagagcgtttatgccagatattgatgatccttttaaaaaggcagatcaattagtcaaggaagcacaagaacaaactccgtttatatttgttgattttcatgcagaaacaacttctgaaaagtatgcaatgggatggcatttagatggtagagctagcgctgttgttggaacgcatacacacattcaaacagcagatgaacgtattttaccaaaggggacagggtatataacggatgttggtatgacaggcttttatgacggcattttaggaataaataaaacagaggtaattgagcgttttatcactagtttgccacaaagacatgttgttccaaatgaaggtagaagtgtattatctggtgttgttattgatttggacaaagaaggtaaaacaaagcacatcgaacgtatattgataaatgatgaccatccattttcaacattttaa

SEQ ID NO: 8235 - DNA, 2619 bp, Staphylococcus aureus
  CDS (1)...(2619)
atgtctaatgttacaccaatgatgcagcaatatttaaaaataaaatcagaataccaagattgcttattattttttagactaggtgatttctatgaaatgttttatgaagatgccaaggaggcatcacgtgtacttgaaattactttaactaaaagagatgctaaaaaagaaaatccaattccgatgtgtggtgttccgtatcattctgcagatagttatatagatacacttgttaataatggatataaagtagctatttgtgaacagatggaagatccgaaacaaacgaaaggtatggttagacgtgaggtggtaagaattgtgactccaggaactgtgatggagcaaggtggtgtagatgataaacaaaataactatattttaagttttgttatgaatcagcctgaaattgcgcttagttactgtgatgtttctactggtgaattaaaggttacacattttaatgatgaagcgactttattaaatgaaattacgacgataaaccctaacgaagttgttatcaatgacaatatttccgatcatttaaaaagacaaattaatatggtgacagaaacaataacagtcagggaaacattatcatctgaaatctatagtgtgaatcaaactgaacataaattaatgtatcaagcgacacaattattgctagattatattcatcatacacaaaaacgtgatttatcgcatatcgaggatgttgttcaatatgcagctatagattatatgaaaatggatttttatgctaagagaaaccttgagttaacggaaagcattcgattaaaatccaaaaaaggaacgctactttggctgatggacgaaacgaaaacaccaatgggagcacgtcgattaaaacaatggatagatagaccactaataagtaaagaacaaattgaagcacgattagatatcgttgatgaatttagtgctcatttcatagaaagagacactttaagaacatatcttaatcaagtgtatgatattgaacgtcttgttgggcgtgttagttacggaaatgttaatgcgagagatttaattcaacttaaacattccatttctgaaataccgaacattaaagcattactaaattctatgaatcaggatactcttgtacaagttaatcaactagaaccacttgatgatttacttgatatattagaacagagtttagtagaagaaccaccaatttcagttaaagatggtggactattcaaagttggttttaatatgcaattagatgaatatcttgaagcttcaaaaaacggaaaaacatggttagcagaactacaagccaaagaaagacaacgtacaggaataaaatcattgaaaataagctttaataaagtgtttggttattttatagaaataacacgtgccaacttgcaaaattttgaaccaagtgaatttggttatatgaggaagcaaacgttatcgaatgcggaacgatttataactgatgaacttaaagaaaaagaagatatcattttaggtgcggaagacaaagccattgaattagaatatcaattatttgttcagctacgtgaaaaagttaaaaaatatactgaacgtttacaacaacaagctaaaattatttcagagttagattgtttacagagttttgcagaaattgctcaaaaatataattatactaggccttcatttagtgaaaataaaacattagaattagtggaatctaggcacccagtagtggaaagagtaatggattataatgactatgtgcctaataattgtcgattagataatgaaacatttatatatttaattacaggtccgaatatgtctggtaaatcgacgtatatgagacaagttgccataattagcataatggcccaaatgggagcttatgtcccttgtaaagaggctgtgttacctatatttgatcaaatattcactagaataggtgcggcagatgatttggtttcaggtaagagtacgtttatggtagaaatgctagaagcacaaaaggcattaacttatgcaacagaggatagtttgattattttcgatgaaattggacgtggtacttcaacgtatgacggtttagctttagcgcaggcaatgatagagtatgtagctgaaacatcacatgctaaaacgttattttcaacacattatcatgaattgacaacattagatcaagcattaccaagtctaaaaaatgttcacgtcgctgctaatgaatataatggtgaacttatattcttgcataaagtcaaagatggtgcagttgacgatagttatggtattcaagttgcgaaattagctgatttacctgaaaaagttattagcagagcacaagttatcctaagcgagtttgaagcgtctgctgataaaaaatcatcgatatcaaatttaaaaatggtcgaaaatgaacctgaaattaatcaagaaaattcaaacttaagtgttgaagaaacaactgatactttatctcaaaaagactttgaacaagcatcatttgatttgtttgaaaatgatcaagaaagcgagattgaactacaaattaaaaatttgaatttatctaatatgacaccaattgaggcattggtgaagttaagtgaattacaaaatcaattaaaatag

SEQ ID NO: 8236 - DNA, 2010 bp, Staphylococcus aureus
  CDS (1)...(2010)
atggggaaaattaaagaactccaaacctcattagcaaataaaattgcagcaggtgaagtagttgaaagaccgagttctgttgtgaaagaactgttggaaaatgctatagatgcaggcgctacagaaataagcattgaagtagaggaatctggcgtccaatctattcgcgtagtcgataatggaagcggaattgaagcggaagacttaggattagtatttcatagacatgcgactagtaaattagatcaagatgaagatttatttcatattaggacattaggattccgtggtgaagcactagccagtatttcatcagttgcaaaagtaacattgaagacttgcacggataatgctaatggaaatgaaatatatgtagaaaatggtgaaatattaaatcataagcctgcaaaagcgaaaaaaggaacagatattcttgtagaatcattattttataatacaccagcacgtttaaaatatattaaaagtttatacactgaactaggtaaaataacagatattgtcaacagaatggcaatgagccatccggacattcgaatagcgctcatttcagatggcaaaacaatgttaagtacaaatggttcaggacgaactaatgaagtgatggcagagatttatgggatgaaagttgcacgagatttagtacatatatctggagatacaagtgattatcacattgaaggttttgttgcaaagcctgaacattctagaagtaataagcactatatttctatttttattaatggacgatacattaaaaactttatgctaaataaagcgattttagaaggctatcatacactcttaacaataggtaggttcccgatttgttatattaatattgaaatggatccaatcttagtagacgtaaatgttcatccaacaaaactagaagtgcgtttatcaaaagaagagcaactataccaattgattgtaagcaaaatacaagaagcatttaaagaccgtatattaattcctaaaaataacttggattatgtgccgaaaaaaaataaagtgttacattcattcgaacaacaaaaaatcgaatttgaacaaagacaaaacacagagaataaccaagagaaaacgttttcatctgaagaaagtaacagtaagccatttatggcagaaaatcaaaacgatgagatagttataaaagaagattcatataatccattcgtaacgaaaacgtctgaaagtttaatagctgatgatgaatcttccggttataataatacacgtgaaaaagatgaagactacttcaaaaaacaacaagaaattttacaagaaatggatcaaacatttgattcaaatgacgatacatctgtgcaaaattatgagaataaagcgtccgatgattattatgatgtaaacgatattaaaggaacaaaaagtaaagaccctaaacgaagaattccatatatggaaattgttggccaagtacatggaacgtatattattgctcaaaatgaatttggcatgtacatgattgaccagcatgcagctcaagaaagaataaaatatgaatattttcgagataaaataggtgaagttaccaatgaagtacaagatttattaatcccgttaacatttcatttttcaaaagatgaacaattagtcattgatcaatataaaaatgagcttcaacaagtaggtatcatgttagaacattttggtggtcatgattatattgtaagtagctatccagtttggttccctaaagatgaagtagaagaaattattaaagatatgattgagctaattttggaagagaaaaaagtagatatcaaaaaattacgtgaagatgtagcaatcatgatgtcatgtaaaaaatctattaaagcgaatcattatttacaaaaacatgaaatgtctgatttaattgatcaattaagagaagcggaagatccatttacatgtccacatggtcgtccaattatcattaatttttcaaaatacgaattagaaaaattatttaagcgtgtgatgtag

SEQ ID NO: 8237 - DNA, 1497 bp, Staphylococcus aureus
  CDS (1)...(1497)
atggaaaaatatattttatctatagaccaaggaacaacaagctcaagagcgattttattcaatcaaaaaggggaaattgcaggggtagcacaacgtgagtttaagcaatattttccacaatcaggttgggttgaacatgatgcaaatgaaatttggacatctgtgttagctgtaatgacggaagtaattaatgaaaatgatgttagagctgatcaaattgcaggtatcggtattacaaaccaacgtgaaacaacggttgtttgggacaaacatactggccgcccaatttatcacgcaattgtttggcaatcacgtcaaacacaatcaatttgttcagaattaaaacaacaaggatatgaacaaacatttagagataagacaggattgcttttagatccgtattttgcaggtacaaaagttaaatggattctagacaatgttgaaggtgcacgagaaaaagcagaaaatggcgatctattatttggaacgattgatacttggttagtatggaaattatcaggaaaagctgcgcatattactgattattcaaatgcgagtcgtacattaatgtttaatatccatgatttagaatgggacgatgagttattagaactacttacagtacctaaaaatatgttgccagaagttaaaccttcaagtgaagtatatggtaagacaattgattaccacttctatggtcaagaagtaccaattgctggtgtagctggtgatcaacaagcagcattatttggacaagcttgcttcgaacgtggtgacgtgaaaaacacatatggaactggtggtttcatgttaatgaatacaggtgacaaagcggttaaatctgaaagtggtttattaacaacaattgcttatggtattgatggaaaagtaaattatgcgcttgaaggttccatctttgtttcgggttcagcaatccaatggttacgtgatggattaagaatgattaattcagcaccacaatcagaaagttatgcgacacgagttgactctactgagggtgtttatgttgttccagcttttgtaggtttaggaacaccgtattgggattctgaagcacgtggtgcgattttcggtttaacacgtggaactgaaaaagagcactttatccgtgcaacattagaatcattatgttaccaaactcgtgacgttatggaagcaatgtcaaaagactctggtatcgatgtccaaagtttacgtgtcgatggtggtgcagttaagaataactttattatgcagttccaagcagacattgttaatacttctgttgaaagacctgaaattcaagaaactacagctttaggtgctgcatatttagcaggtttagcagttggattctgggagagtaaagatgatatcgctaaaaactggaaattagaagaaaaattcgatccgaaaatggatgaaggcgaaagagaaaaattatatagaggttggaaaaaagctgttgaagcaacacaagtttttaaaacagaataa

SEQ ID NO: 8238 - DNA, 909 bp, Staphylococcus aureus
  CDS (1)...(909)
atgagtgtatttatagataagaatactaaagtaatggtacaaggtattacagggtctactgcccttttccatacaaaacaaatgcttgattatggtacgaaaatagtagcaggtgtgacgcctggtaaaggtggtcaagttgttgaaggcgttcctgttttcaacactgttgaagaagctaaaaatgaaactggggcaacggtttcagtcatttacgttccagcaccatttgctgcagactcaattttagaagcagctgatgcagacttagatatggttatttgtatcactgaacatattcctgtattagacatggttaaagttaaacgctacttacaaggtagaaaaacacgtttagttggtccaaactgtccaggtgtgattacagcagatgaatgtaaaattggtattatgcctggctatattcacaaaaaaggtcatgttggtgtagtatcacgttcaggtacactaacatatgaagcagtgcaccaattgactgaagaaggtattggtcaaactacagctgttggtattggtggagacccagtcaacggaacaaactttattgatgttttaaaagcattcaatgaagatgacgaaacgaaagcagttgttatgattggtgaaatcggtggtacagctgaagaagaagcagctgaatggattaaagcgaatatgacaaaaccagttgtaggctttatcggtggacaaacagcacctcctggaaaacgtatgggacatgctggtgcaatcatttcaggtggtaaaggtactgctgaagagaaaattaaaacattaaatagttgtggtgtgaaaacagcggcaacaccttcagaaattggttcaacattaattgaagctgctaaagaagcaggtatttatgaatcattattaacagttaataaataa

SEQ ID NO: 8239 - DNA, 918 bp, Staphylococcus aureus
  CDS (1)...(918)
atgatgactgaaaaacaatttaaattaactgtacaagataacacgaatattgaagttaaagtgaattttacagatgtagattcaaaaggaattattcatatatttcatggtatggctgaacatatggaacgttacgataaattagcacatgcactttcaaaggatggcttcgatgtgatacgtcataatcatcgaggccatggtattaatattgatgaatcaacaagagggcattacgatgatatgaaacgagttatcggtgatgcctttgaagtagcgcaaacagtgagaggcaatgttgataaaccatacattataatcggacattcaatgggatccgttatagctagattgtttgtagaaacatatccgcaatatgttgatggtctaattttaagtggtactggtatgtatccattatggaaaggattaccaactgttaaggtgttacaactgattacaaaaatttatggtgccgagaaacgggttgaatgggttaaccagttagtatcaaatagttttaataaaaaaatacgtccattacgtacacaaagtgattggatttctagtaatccaactgaagtagacaactttattaaagatccatatagtggatttaatgtgtcaaatcaattattatatcaaacagcctattatatgctacatacatcacaattaaaaaatattaaaaagttaaatcatgccatgcctatattattagtttcaggatatgacgatcctttaggtgattatggtaaagggattttaaaattggcgaatatatatagaaaagccggcattaaaaatgttaaagttaatctttatcatcataaacgtcatgaagtgttatttgaaaaagatcatgacaaaatttgggaagacttgtttaaatggttgaatcaattttataaaaaataa

SEQ ID NO: 8240 - DNA, 1341 bp, Staphylococcus aureus
  CDS (1)...(1341)
atgccaaaacgtactttcactaaagacgacattcgtaaatttgcagaagaggaaaatgtaagatatttaagattacaattcactgatattttaggaacaattaaaaatgttgaagtgcctgtaagccaattagaaaaagtacttgataacgaaatgatgtttgacggttcttctatcgaaggtttcgtacgtatcgaagaatcagatatgtacttacatccagatttagatacttgggtaatcttcccatggactgctggacaaggtaaagttgcacgtttaatttgtgatgtatataaaacagatggtacaccatttgaaggggatcctcgtgcaaacttaaaacgtgtattaaaagaaatggaagatttaggcttcacagactttaacctagggcctgaaccagaattcttcttgtttaagttggatgaaaaaggggaaccaactttagaacttaatgatgatggtggatatttcgacttagcacctacagatttaggtgaaaactgtcgtcgtgatattgttttagaattagaggatatgggcttcgatattgaagctagtcaccatgaagttgcccctggtcaacatgaaattgactttaaatatgcagatgctgttacagcatgtgataacatccaaacatttaaattggttgttaaaacaatcgcacgtaaacataatttacacgcaacatttatgcctaaaccattatttggtgtgaatggtagcggtatgcactttaacgtttcattattcaaaggtaaagaaaatgcattcttcgatccaaatactgaaatgggcttaacggaaactgcatatcaatttacagcaggtgtacttaaaaatgcacgcggatttactgctgtatgtaacccgttagtaaactcatataaacgtttagtacctggttatgaagcaccatgttatattgcatggagtggtaaaaaccgttcaccattaatccgtgtaccatcttcaagaggattatcaactcgtatcgaagtacgttcagtagatccagctgcaaacccatacatggcgttagctgcaatcttagaagctggactagatggtattaaaaataaattaaaagttccagaaccagttaaccaaaatatttacgaaatgaaccgtgaagaacgtgaagcagtaggcattcaagacttaccttcaacactttatactgcattaaaagcaatgcgtgaaaatgaagttattaaaaaagctttaggaaatcatatctataatcaatttattaattcaaaatcaattgaatgggattactacagaactcaagtatctgaatgggaaagagatcagtacatgaagcaatattaa

SEQ ID NO: 8241 - DNA, 2076 bp, Staphylococcus aureus
  CDS (1)...(2076)
atgacattggcagataatttagtcattgttgaatcgcctgcaaaagcaaaaaccattgaaaagtatttaggtaagaaatataaagttatagcttcaatgggacacgtcagagacttaccaagaagtcaaatgggtgtcgacactgaagataattacgaaccaaaatatataacaatacgcggaaaaggtcctgttgtaaaagaattgaaaaaacatgcaaaaaaagcgaaaaacgtctttcttgcaagtgaccccgaccgtgaaggtgaagcaattgcttggcatttatcaaaaattttagagcttgaagattctaaagaaaatcgcgttgttttcaacgaaataactaaagacgctgttaaagaaagttttaaaaatcctagagaaattgaaatgaacttagtcgatgcacaacaagcgcgtcgaatattagatagattagttggctataacatctcgccagttctttggaaaaaagtaaaaaaagggttgtcagcgggtcgagttcaatctgttgcacttcgtttagtcattgaccgtgaaaatgaaattcgaaactttaaaccagaagaatattggactattgaaggagaatttagatacaaaaaatcaaaattcaatgctaaattccttcattataaaaataaaccatttaaactaaaaacgaaaaaagatgttgagaaaattacagctgcattaaatggagatcaattcgaaattacaaacgtgactaaaaaagaaaaaacgcgtaatccagcaaatccatttacaacttctacattacaacaagaggcggcacgtaaattaaactttaaagctagaaaaacaatgatggtcgcacaacaattatatgaaggtatagatttgaaaaaacaaggtacgattggtttaataacatatatgagaactgattctacacgtatttcagatactgccaaagctgaagcaaaacagtatataactgataaatacggtgaatcttacacttctaaacgtaaagcatcagggaaacaaggtgaccaagatgcccatgaggctattagaccttcaagtactatgcgtacgccagatgatatgaagtcatttttgacgaaagaccaatatcgattatacaaattaatttgggaacgatttgttgctagtcaaatggctccagcaatacttgatacagtctcattagatataacacaaggtgacattaaatttagagcgaatggtcaaacaatcaagtttaaaggatttatgacactttatgttgaaactaaagatgatagtgatagcgaaaaggaaaataaactgcctaaattagagcaaggtgataaagtcacagcaactcaaattgaaccagctcaacactatacacaaccacctccaagatatactgaggcgagattagtaaaaacactagaagaattgaaaattgggcgaccatcaacttatgcaccgacaattgatacgattcaaaagcgtaactatgtcaaattagaaagtaagcgttttgttcctactgagttgggagaaatagttcatgaacaagtgaaagaatacttcctagagattattgatgtggaattcacagtgaatatggaaacgttacttgataagattgcagaaggcgacattacatggagaaaagtaatcgacggtttctttagtagctttaaacaagatgttgaacgtgctgaagaagagatggaaaagattgaaatcaaagatgagccagccggtgaagactgtgaagtttgtggttctcctatggttataaaaatgggacgctatggtaagtttatggcttgctcaaacttcccggattgtcgtaatacaaaagcgatagttaaatctattggtgttaaatgtccaaaatgtaatgatggcgacgtcgtagaaagaaaatctaaaaagaatcgtgtcttttatggatgttcgaaatatcctgaatgcgactttatctcttgggataagccgattggaagagattgtccaaaatgtaaccaatatcttgttgaaaataaaaaaggcaagacaacacaagtaatatgttcaaattgcgattataaagaggcggcgcagaaataa

SEQ ID NO: 8242 - DNA, 801 bp, Staphylococcus aureus
  CDS (1)...(801)
atgaataaaccaataggtgtaatagactctggtgtcggaggtttgacagtagctaaagaaattatgcgtcagttgccaaatgagacgatttattacttaggtgatattgggcgatgtccatatgggccaagaccaggagaacaagtaaaacaatatacagttgaaatcgctcgtaaattaatggaatttgatataaaaatgctcgtgattgcttgtaatacagcaactgctgtagctttagaatatttacaaaagaccttatcaatcccagtgattggcgtaattgaaccaggtgctagaacagcaataatgaccactagaaatcaaaatgtattagtactaggaacggaaggcacaattaaatctgaagcatatcgtacgcatattaaacgtataaatccacatgtagaggtacatggcgttgcctgtccaggttttgtgccacttgtagaacaaatgagatatagtgatccaacaattacaagcattgtcattcatcaaacactgaaacgttggcgtaatagtgagtctgatactgtcattttaggatgtactcactatccattgctctataaacctatctatgattattttggtggtaaaaagactgtgatttcgtctggattagaaacggctcgtgaagttagtgcattgctaacatttagtaatgaacatgcaagttatactgaacatccagatcatcgattttttgcaacaggtgatcctactcacattactaacattatcaaagagtggttaaatttatctgtcaatgtggaacgtatatcagtgaatgactag

SEQ ID NO: 8243 - DNA, 588 bp, Staphylococcus aureus
  CDS (1)...(588)
atgaaagagattgttattgcatcgaataatcaagggaaaataaatgactttaaagtgatatttccagattaccacgtaataggtatttcagaactaataccagattttgatgtggaagaaacaggatcaacatttgaagaaaatgctatattaaaatcagaagctgctgcaaaagcattgaataaaacggtcatagctgatgacagtggactagaagtttttgcattaaatggtgagccaggtatatactctgcacgttatgctggtgaaaataaaagcgatgaagcaaatattgaaaaattattaaataagcttggtaatacaactgatcgtcgtgcgcaatttgtttgtgtcataagtatgagtggccctgatatggaaacaaaagtatttaaaggtactgtttcaggtgaaattgcagatgggaaatatggcgaaaatggtttcggatatgatccgatattttatgtaccgaaattagataaaactatggctcaactttctaaagaacaaaaagggcaaattagtcatagacgaaatgcgattaatttacttcaagcttttcttgaaggtgataaaaatgtctaa

SEQ ID NO: 8244 - DNA, 942 bp, Staphylococcus aureus
  CDS (1)...(942)
gtgaatatgatggcgaaaatagtagtagcattaggtggtaatgctttaggaaaatcacctcaagaacaactcgagcttgttaaaaatactgcgaaatcattagtaggattaataacaaaaggacatgagattgttattagtcatggtaatggaccacaggttggaagcattaatttgggacttaactatgctgcagaacataaccaaggtccggcatttccatttgctgaatgtggtgcaatgagtcaagcttacatcggctatcaattacaagaaagcttacaaaacgaattgcattctattggaatggataaacaagtggtaacactagtgacacaagttgaagttgatgaaaatgatccggcatttaacaatccttcaaaaccaattgggttattttacaacaaagaagaagctgaacaaattcaaaaagaaaaaggatttatatttgttgaagatgctggaagagggtatagacgtgttgttccttcaccacaacccatctctattattgaattagagagtattaaaacacttattaaaaatgatacactcgttattgctgctggtggtggaggtataccagtaattagagagcaacatgatggttttaaaggtattgatgcagttatagacaaagataaaacaagtgcgttgttgggtgctaatattcaatgcgatcaattgattattttaacagcaattgattatgtatatattaattttaacactgaaaaccaacagcctttgaaaacaacaaatgttgatgaattaaaacgatatatagacgaaaatcaatttgcaaaaggaagtatgttaccaaaaattgaagcagccatatcatttattgaaaacaatccaaaaggaagtgtgcttataacatcattaaatgaattagatgctgccttagagggtaaagtaggtactgtgattaaaaagtaa

SEQ ID NO: 8245 - DNA, 1989 bp, Staphylococcus aureus
  CDS (1)...(1989)
atgaattttccatgggatcaattactagttaaaggtaactggatgattacaatggcacaaattggtgccccattcttagttattggtttaatcgcagtaattacttactttaaattatggaaatatctttacaaagaatggttcacatctgtagaccataagaaaatcggtgttatgtatttaatctgtgccgtattaatgttcgtccgtggtggtattgatgcgttacttattcgtgcgcaattaacagtacctgataacaaatttttagaatctaaccactataacgaaatttttagtacacatggtgtaatcatgattatcttcatggcaatgccatttatctttggtttatggaatatcgttgttccattacaaattggagcacgtgatgttgcattcccagtattaaacaacgtaagtttctggctattctttgcaggtatgattttattcaacctgtcatttattattggtggttcaccagcagctggttggacaaactatgcgccactagcaggtgaattcagtcctggtccgggtgttaactattacttaatagctatacaaatttcagggcttggtaccttagctacaggtatcaacttctttgtaacaattttaagatgtaaaacaccaactatgaagtttatgcaaatgccaatgtttacagtaacaacatttattactacattaattgttattcttgctttccctcctttaacagtagcgttagcattaatgacaactgatagaatatttgacacagcattcttcacagttgcacatggcggtatgccaatgctttgggctaacttcttctgggtatgggggcaccctgaagtttatatcgttatccttccagcatttggtatttactcagaaattatcccgacattcgctcgtaagcgtttattcggacatcaaagtatggtatgggcaactgccggtatcgcgttccttagtttcttagtttgggttcaccatttcttcacaatgggtaatggtgcattaatcaactcattcttctcaatttcaacaatgctgattggtattccaactggtgtgaaattgtttaactggttattaacattatataaaggacgtattacatttgagtcaccaatgttattctcattagcatttatccctaacttccttttaggtggtgttacgggtgtaatgttagcaatggcatctgctgactatcaatatcacaatacgtacttcttagtagctcacttccactatacattggttactggtgttgtatttgcctgcttagctggtttaatcttctggtatccaaagatgatgggttacaaattaaacgaaacattaaacaaatggtgcttctggttcttcatgatcggatttaacgtttgtttcttaccacaattcattcttggattagatggtatgccacgtcgtttatacacttatatgccatcagatggttggttcttattaaacttaatttcaactatcggtgcattattaatggcaatcggattcttattccttgttgttagtatcgtatacagtcacttcaaatctccacgtgaagcaactggagataactgggatggccttggtcgtactctagagtggactactgcatcggcaattccacctaaatacaactttgccattacaccagattggaatgactacgacacatttgttgatatgaaagaacatggtcgtcattacttagacaaccataattacaaagacattcatatgccaaacaatactcctgttggattctggattggtatctttatgactatcggcggtttcttcttaattttcgaaactgtaattccagcattaatttgtttattcggtatttttggtactatgatttatcgcagtttccaaatcgatcacggatatcatatccctgctgctgaagttgctgaaactgaagctagattaagagaagcgcgtattaaagaaagggaggctgtaagtcatgagtcatga

SEQ ID NO: 8246 - DNA, 936 bp, Staphylococcus aureus
  CDS (1)...(936)
gtgtttcatcatatcagcgttatgttaaacgaaaccattgattatttaaatgtaaaagaaaatggtgtgtacattgactgtacgctaggtggagcgggacatgccctttatttactaaatcaattaaatgacgacggaagattaatagcaatcgatcaagaccaaactgcaattgataatgctaaagaagtattaaaggatcatttgcataaggtgacttttgttcatagcaacttccgtgaattaactcaaatattaaaagacttaaacattgaaaaagtagatggaatctattatgacttgggtgtttcaagcccacaactcgacattccagaacgaggattcagttatcaccatgacgcaacattagacatgcgtatggaccaaacacaagaactaacagcatatgaaattgttaacaattggtcatatgaagcgttagtgaagattttttatcgctatggcgaggagaaattttcaaaacagatagctcgaagaatcgaagcacatcgcgaacaacaaccaataacaacaacattagaattagttgacattataaaagaaggtattcctgcaaaagcaagaagaaaaggcggacatcctgcaaaacgagtatttcaagcactacgaattgcagtaaacgatgaattgtcagcttttgaagattcaatagaacaagcgattgaattagtgaaagtagacggcaggatttcggtaatcactttccattctttagaagatcgtttatgtaaacaggtgttccaagaatatgaaaaaggtccagaagtaccaagaggattaccagttataccagaagcatatacacctaagttaaagcgtgttaatcgtaaaccgattaccgctacagaagaagatttagatgacaataacagagcacgaagcgcgaaattacgtgtagctgaaatacttaaataa

SEQ ID NO: 8247 - DNA, 1101 bp, Staphylococcus aureus
  CDS (1)...(1101)
gtgtcaaaatttaagtctttgcttctattatttggcacactaattttacttagtggttgttcaaatatagaaattttcaacgcaaaagggccagtagcaagtagtcagaagttcttgattctttattcaatcgtcttcatgcttgttatttgtttcgttgtacttggcatgttcgccatttttatttacaagtatagttataataagaatgccgaatctggtaagatgcaccataatgccatcattgaaacaatatggtttgtaatacctatcataatcgttgctgctttagctattcctacagttaaaactttatacgattacgaaaaaccaccgaagagtgagaaagatccaatggtagtatatgcagtaagtgcaggatacaaatggttctttgcttatccagacgaacatatagagactgttaatacattaacaatccctaaagatcgtcctgttgtatttaagcttcaagctatggatacaatgacaagtttctggattccacaattaggtggtcaaaaatatgccatgactggcatgacaatgaattggacgttagaagcatctcaaactggtacgttcagaggtcgtaactctaacttcaatggtgaaggattctcacgtcaaacatttaaagtaaatgccgttagtcaaaaagactacgacaaatgggtgaaagaagttaaaggtaagaaaacgttagatcaagatacatttgataaacaattattaccaagcacacctaataaagctttagaatttaatggtacacatatggcgtttgttgatccagcagccgatccagaatacatcttctatgcatataaacgtttcaatttcgaattgaaagatccaaacttcactagtgaagaaaatatgtttaaagatgtatcagacaaaccattaatacctgctcgtaaagctcaaattacaaatgcgaactataaacgacatggtatgaaattgatgattcttggaaatgacgaaccatataacaatgagttcaagaaagatgaatcgaaaaatgcgaaagaaatgaagaaaatttcaaaagatgcgcaagatcaagacaatgatgatcatggaggtggacattaa

SEQ ID NO: 8248 - DNA, 2235 bp, Staphylococcus aureus
  CDS (1)...(2235)
atggcgaagcaaaaaattaaaattaaaaaaaataaaataggggcagtcctacttgttggtttattcggactgctcttttttatattggttttaagaatttcatatatcatgattactggacattctaatggtcaagatttagtcatgaaggcaaatgaaaagtatttagttaagaatgcacaacaaccagaacgaggaaagatatatgatcgtaatggtaaagtgctagcagaagatgtagaaagatataaacttgttgcagtaatagataaaaaggcgagtgccaattctaaaaaacctaggcatgtagttgataaaaaagagactgcaaagaaattatctacagtcattgatatgaagccagaggaaattgaaaagagacttagtcaaaagaaagccttccaaattgaatttggacgcaaaggaacaaatttaacgtatcaggacaaattgaaaatagagaaaatgaatttgcctggtatttctttattgcctgaaacagaacgcttttatccaaatggcaattttgcatcacacttaattggtagagctcagaaaaatccggatactggtgaacttaaaggtgcgcttggagttgaaaagatttttgatagttatttaagtggatctaaaggatcattgagatatattcatgatatttggggatatattgcaccaaatactaaaaaagagaagcagcctaaacgtggtgatgatgtccatttaacaatcgattcaaatattcaagtgtttgttgaagaagctttagatggcatggttgaaagataccagccgaaagatttatttgcggttgtcatggatgccaaaactggagaaattttagcatacagtcagcgaccaacatttaatcctgaaactggtaaagactttggtaaaaagtgggcaaatgacctttatcaaaacacatacgagcctggatcaacatttaaatcatatgggttagcagctgctattcaagaaggtgcttttgatcctgataagaaatataaatctggacatagagatattatgggttcacgcatttcagactggaatagagtcggttggggtgaaatcccaatgtcactcggatttacttattcatctaatacattgatgatgcatttacaagatttagttggtgcagacaaaatgaaatcttggtatgaacgatttggatttggaaaatcaactaaaggtatgtttgatggagaagcacctggtcaaattggatggagtaatgaattgcaacaaaaaacgtcatcatttggtcaatcgacaacagtaacacctgttcaaatgttacaagcgcaatcagcgttctttaatgatggtaatatgttaaaaccatggtttgtgaatagcgttgaaaatcctgttagtaaaagacaattttataaaggtcaaaaacaaatcgcaggcaaaccaataacaaaagatactgctgaaaaagttgaaaagcaattggatttagttgtgaatagtaagaagagtcacgctgcaaactatcgtattgatggttatgaggtcgaaggtaagactggtacagcacaagtcgctgcacctaatggtggtggatacgttaaaggtccaaacccatattttgtaagttttatgggtgacgcgccgaagaaaaatcctaaagttattgtatacgctggtatgagcttggcacaaaaaaatgaccaagaagcttatgaattaggtgttagtaaagcgtttaaaccaataatggaaaatactttgaaatatttaaatgtaggtaaatcaaaagatgacacatctaatgcagagtatagtaaagtgccagatgttgaaggtcaagacaaacaaaaagctattgataatgtgagtgcaaaatcattagaaccagttactatcggttctggcacacaaataaaagcgcaatctataaaagcagggaataaagtcttacctcatagtaaagtactgttattaacagatggagacttaactatgcctgacatgtcaggatggacgaaagaagatgttattgcttttgaaaacctaacaaatattaaagtgaatttaaaaggtagcggttttgtgtcccaccaatcaattagtaagggacaaaaacttactgaaaaagataaaatagacgtagaattttcatcagagaatgtagacagcaattcgacgaataattctgattcaaattcagatgataagaagaaatctgacagtaaaactgacaaggataagtcggactaa

SEQ ID NO: 8249 - DNA, 966 bp, Staphylococcus aureus
  CDS (1)...(966)
atgatttttgtatatgcgttattagcgctagtgattacatttgttttggtacctgttttaatacctacattaaaaaggatgaaatttggtcaaagtattcgagaagaaggtccacaaagccatatgaagaagactggtacaccaacgatgggtggactaacatttctattaagtattgtgataacgtctttggtggctattatatttgtagatcaagctaatccgatcatactgttattatttgtgacgattggttttgggttaattggttttatagatgattatattattgttgttaaaaagaataaccaaggtttaacaagtaaacagaagtttttggcgcaaattggtattgcgattattttctttgttttaagtaatgtatttcatttggtgaatttttctacgagcatacatattccatttacgaatgtagcaatcccactatcatttgcatatgttattttcattgttttttggcaagtaggtttttctaatgcggtaaatttaacagatggtttagatggattagcaactggactgtcaattatcggatttacaatgtatgccatcatgagctttgtgttaggagaaacggcgattggtattttctgtatcattatgttgtttgcacttttaggatttttaccatataacattaacccggctaaagtgtttatgggagatacaggtagcttagctttaggtggtatttttgctacgatttcaatcatgcttaatcaggaattatcattaatttttataggtttagtattcgtaattgaaacattatctgttatgttacaagtcgctagctttaaattgactggaaagcgtatatttaaaatgagtccgatacatcatcattttgaattgataggatggagcgaatggaaagtagttacagtattttgggctgttggtctgatttcaggtttaatcggtttatggattggagtgcattaa

SEQ ID NO: 8250 - DNA, 1350 bp, Staphylococcus aureus
  CDS (1)...(1350)
atgcttaattacacagggttagaaaataaaaatgtattagttgtcggtttggcaaaaagtggttatgaagcagctaaattattaagtaaattaggtgcgaatgtgactgtcaatgatgggaaagacttatcgcaagatgcgcatgcaaaagatttagaatctatgggcatttctgttgtaagtggaagtcatccattaacattgcttgataataatccaataattgttaaaaatcctggaataccttatacagtatctattattgatgaagcagtgaaacgaggtttgaaaattttaacagaagttgagttaagttatctaatctctgaagcaccaatcatagctgtaacgggtacaaatggtaaaacgacagttacttctctaattggagatatgtttaaaaaaagtcgcttaactggaagattatccggcaatattggttatgttgcatctaaagtagcacaagaagtaaagcctacagattatttagttacagagttgtcgtcattccagttacttggaatcgaaaagtataaaccacacattgctataattactaacatttattcagcgcatctagattaccatgaaaatttagaaaactatcagaatgctaaaaagcaaatatataaaaatcaaacggaagaagattatttgatttgtaattatcatcaaagacaagtgatagagtcggaagaattaaaagctaagacattgtatttctcaacacaacaagaagtagatggtatttatattaaagatggttttatcgtttataaaggtgttcgtattattaacactgaagatctagtattgcctggtgaacataatttagaaaatatattagcagctgtgcttgcttgtattttagctggtgtgcctattaaagcaattattgatagtttaactacattttcaggaatagagcatagattgcaatatgttggtactaatagaactaataaatattacaatgattccaaagcaacaaacacgctagcaacacagtttgccttaaattcatttaatcaaccaatcatttggttatgtggtggtttggatcgagggaatgaatttgacgaactcattccttatatggaaaatgttcgcgcgatggttgtattcggacaaacgaaagctaagtttgctaaactaggtaatagtcaagggaaatcggtcattgaagcgaacaatgtcgaagacgctgttgataaagtacaagatattatagaaccaaatgatgttgtattattgtcacctgcttgtgcaagttgggatcaatatagtacttttgaagagcgtggagagaaatttattgaaagattccgtgcccatttaccatcttattaa

SEQ ID NO: 8251 - DNA, 1320 bp, Staphylococcus aureus
  CDS (1)...(1320)
atggatgataaaacgaagaacgatcaacaagaatcaaatgaagataaagatgaattagaattatttacgaggaatacatctaagaaaagacggcaaagaaaaagatcaaaggctacacatttttctaatcaaaataaagatgatacatctcaacaagctgagtttgatgaagaaatttacttgataaataaagacttcaaaaaagaagaaagcaaagatgaaaataatgattctgcttctagtcatgcgaataataataatatcgatgattctacagactctaataatgaaaatgaggattatagatataatcaagaaattgacgaccaaaatgaatcgaatggaattgcattcgataacgaacaacctcaatcagctcctaaggaccaaaatagcgactcgaatgatgaggaaacagtaacgaaaaaagaacgaaaaagtaaagtaacacaattaaagccattaacacttgaagaaaagcggaagttaagacgtaagcgacaaaagcgaatccaatacagtgttattacaatattggtattgttgattgctgttatattaatttacatgttttcaccacttagtaaaattgcgcatgtaaatataaatggaaataatcacgttagtacttcaaagataaacaaagtgttaggtgttaaaaatgattcgaggatgtatacgtttagtaaaaaaaatgctattaatgatctcgaagaggatccattaatcaaaagtgttgagatacacaagcaattaccaaacacattaaacgtagatatcacagaaaatgaaattattgctttagtgaaatataaaggtaaatatttacctttattagaaaatggtaaattgcttaaaggttcaaatgatgtcaaaattaatgatgcacctgtcatggatggtttcaaaggtacaaaagaagatgatatgattaaggcgttatctgaaatgacacctgaagttagacgatatattgccgaagtgacatacgccccaagtaaaaacaaacaaagcagaattgaattgtttacgacggatggacttcaagtaatcggtgatatttcgacgatatctaagaaaatgaaatattatccgcagatgtcacaatcattatcaagagatagttcgggtaaactaaaaacacgaggctatattgatttatcagtcggtgcttcatttatcccataccgtggaaacacgtctactcaatcagaaagcgataaaaatgtgactaaatcatctcaagaggaaaatcaagcaaaagaagaattacaaagcgttttaaacaaaattaacaaacaatcaagtaagaataattaa

SEQ ID NO: 8252 - DNA, 267 bp, Staphylococcus aureus
  CDS (1)...(267)
atggaacaaaattcatatgtaatcatcgacgagactggtattcacgctagaccagcaacaatgttagtacaaacagcttcaaaattcgattctgatattcaattagaatataacggtaagaaagttaacttaaaatcaatcatgggtgttatgagccttggtgttggtaaagatgctgaaattacaatttatgctgacggtagtgatgaatctgacgccattcaagcaatcagtgacgtcttatcaaaagaaggattgactaaataa

SEQ ID NO: 8253 - DNA, 1719 bp, Staphylococcus aureus
  CDS (1)...(1719)
atgtctaaattaattaaaggtattgccgcatctgatggtgtcgcaattgctaaagcttatttattagttgagccagacttaacattcgacaaaaatgaaaaagtcactgatgttgaaggagaagttgcaaagttcaatagcgctatcgaagcttctaaagttgagttaactaaaattagaaataatgcagaggttcaactaggtgctgataaagctgctatctttgatgcacatttattagttttagatgaccctgaattaattcaaccaatccaagataagattaaaaatgaaaacgctaatgctgctacagcattaacggatgtaacaacacaatttgttacaatttttgaatctatggataacgaatacatgaaagaacgtgcggctgatattcgcgacgtttctaaacgtgtgttatcacatattttaggtgtagaattacctaatccgagtatgatcgatgaaagcgttgttattgtagggaatgacttaacgccatctgatactgctcaattaaataaagaattcgtacaaggttttgctacaaacattggcggaagaacaagtcactctgcgattatgagtcgttctttagaaattccagcaattgttggtacaaaatcaattactcaagaagttaaacaaggcgacatgattatcgtagatggattaaatggtgatgtaatcgttaatccaactgaagatgagttaatcgcttatcaagataaacgtgagcgttattttgctgacaagaaagaattacaaaaactacgtgatgctgatactgttacagttgatggtgttcacgcagagcttgctgcaaatattggtacacctaatgatttgccaggtgttattgaaaatggtgcacaaggtatcggcttatatagaactgagtttttatatatgggtcgtgaccaaatgcctacagaagaagagcaatttgaagcttataaagaagtattagaagcaatgaacggtaaacgtgttgttgtacgtactttagatataggtggagataaagaattatcatacttaaacttgcctgaagaaatgaatccattcttaggttaccgtgcgattcgtttatgccttgcgcaacaagatatttttagaccgcaactacgtgcattattacgtgcatcagtttatggtaagttaaatatcatgttcccaatggttgcaacaattaacgaatttagagaagctaaagctatattattagaagaaaaagaaaaccttaaaaatgaaggtcatgacatttcagatgatatagaattaggaatcatggtagagatacctgcaacagcagcattagctgatgtctttgctaaagaagtagatttcttcagtatcggtacaaatgatttaattcaatacacattagctgctgaccgtatgtcagagcgtgtatcatatctataccaaccatataacccttcaatcttacgtttagttaaacaagttattgaagcgtcacataaagaaggtaaatggacaggtatgtgtggtgaaatggctggagatgaaacagctattccattattacttggtttaggtttagatgagttctctatgagtgcaacgtctattctgaaagcaagaagacaaattaatggtttaagtaaaaatgaaatgactgaacttgctaaccgtgcagtcgactgtgcaacgcaagaagaagttattgaattagttaacaactatgtaaaataa

SEQ ID NO: 8254 - DNA, 1698 bp, Staphylococcus aureus
  CDS (1)...(1698)
atgaaacaattacatccaaatgaagtaggtgtatatgcacttggaggtctaggtgaaatcggtaaaaatacttatgcagttgagtataaagacgaaattgtcattatcgatgcaggtatcaaattccctgatgataacttattagggattgattatgttatacctgactacacatatctagttcaaaaccaagataaaattgttggcctatttataacacatggtcacgaagaccatataggcggtgtgcccttcctattaaaacaacttaatatacctatttatggtggtcctttagcattaggtttaatccgtaataaacttgaagaacatcatttattacgtactgctaaactaaatgaaatcaatgaggacagtgtgataaaatctaagcactttacgatttctttctacttaactacgcatagtattcctgaaacttatggcgtcatcgtagatacacctgaaggaaaagtagttcataccggtgactttaaatttgattttacacctgtaggcaaaccagcaaacattgctaaaatggctcaattaggcgaagaaggtgttctatgtttactttcagactcaacaaattcacttgtgcctgattttactttaagcgaacgtgaagttggtcaaaacgtagataagatcttccgtaactgtaaaggtcgtattatatttgctaccttcgcttctaatatttaccgagttcaacaagcagttgaagctgctatcaaaaataaccgtaaaattgttacgttcggtcgttcgatggaaaacaatattaaaatcggtatggaacttggttatattaaagcaccacctgaaacatttattgagcctaataaaattaataccgtaccgaagcatgagttattgatactatgtactggttctcaaggtgaaccaatggcagcattatctagaattgctaatggtactcataagcaaattaaaattatacctgaagataccgttgtatttagttcatcacctatcccaggtaatacaaaaagtattaacagaactattaattccttgtataaagctggtgcagatgttatccacagcaagatttctaacatccatacttcagggcatggttctcaaggtgatcaacaattaatgcttcgattaatcaagccgaaatatttcttacctattcatggtgaatatcgtatgttaaaagcacacggtgagactggtgttgaatgcggcgttgaagaagataatgtcttcatctttgatatcggagatgtcttagctttaacacacgattcagcacgtaaagctggtcgcattccatctggtaatgtacttgttgatggtagtggtatcggtgatatcggtaatgttgtaataagagaccgtaagctattatctgaagaaggtttagttatcgttgttgttagtattgattttaatacaaataaattactttctggtccagacattatttctcgaggatttgtatatatgagagaatcaggtcaattaatttatgatgcacaacgcaaaatcaaaactgatgttattagtaagttaaatcaaaataaagatattcaatggcatcagattaaatcttctatcattgaaacattacaaccttatttatttgaaaaaacagctagaaaaccaatgattttaccagtcattatgaaggtaaacgaacaaaaagaatcaaacaataaataa

SEQ ID NO: 8255 - DNA, 1113 bp, Staphylococcus aureus
  CDS (1)...(1113)
atggctcctaagttacaagcccaattcgatgcagtaaaagttttaaatgatactcaatcgaaatttgaaatggttcaaattttggatgagaatggtaacgtcgtaaatgaagacttagtacctgatcttacggatgaacaattagtagaattaatggaaagaatggtatggactcgtatccttgatcaacgttctatctcattaaacagacaaggacgtttaggtttctatgcaccaactgctggtcaagaagcatcacaattagcgtcacaatacgctttagaaaaagaagattacattttaccgggatacagagatgttcctcaaattatttggcatggtttaccattaactgaagctttcttattctcaagaggtcacttcaaaggaaatcaattccctgaaggcgttaatgcattaagcccacaaattattatcggtgcacaatacattcaagctgctggtgttgcatttgcacttaaaaagcgtggtaaaaatgcagttgcaatcactcacactggtgacggtggttcttcacaaggtgatttctatgaaggtattaactttgcagcagcttataaagcacctgcaattttcgttattcaaaacaataactatgcaatttcaacaccaagaagcaagcaaactgctgctgaaacattagctcaaaaagcaattgctgtaggtattcctggtatccaagttgatggtatggatgcgttagctgtatatcaagcaactaaagaagcacgtgaccgcgcagttgcaggtgaaggtccaacattaattgaaactatgacatatcgttatggtcctcatacaatggctggtgacgatccaactcgttacagaacttcagacgaagatgctgaatgggagaaaaaagacccattagtacgtttccgtaaattccttgaaaacaaaggtttatggaatgaagacaaagaaaatgaagttattgaacgtgcaaaagctgatattaaagcagcaattaaagaggctgataacactgaaaaacaaactgttacttctctaatggaaattatgtatgaagatatgcctcaaaacttagcagaacaatatgaaatttacaaagagaaggagtcgaagtaa

SEQ ID NO: 8256 - DNA, 978 bp, Staphylococcus aureus
  CDS (1)...(978)
atggcacaaatgacaatggttcaagcgattaatgatgcgcttaaaactgaacttaaaaatgaccaagatgttttaatttttggtgaagacgttggtgttaacggcggtgttttccgtgttactgaaggactacaaaaagaatttggtgaagatagagtattcgatacacctttagctgaatcaggtattggcggtttagcaatgggtcttgcagttgaaggattccgtccggttatggaagtacaattcttaggtttcgtattcgaagtatttgatgcgattgctggacaaattgcacgtactcgtttccgttcaggcggtactaaaactgcgcctgtaacaattcgtagcccatttggtggtggcgtacacacacctgaattgcacgcagataatttagaaggtattttagctcaatctccaggtctaaaggttgttattccttcaggcccatacgatgcgaaaggtttattaatttcttctattagaagtaatgacccagtcgtatacttagagcatatgaaattgtatcgttcattccgtgaagaagtacctgaagaagaatatacaattgacattggtaaggctaatgtgaaaaaagaaggtaatgacatttcaatcatcacatacggtgcaatggttcaagaatcaatgaaagctgcagaagaacttgaaaaagatggttattctgttgaagtaattgacttacgtactgttcaaccaatcgatgttgacacaattgtagcttcagttgaaaaaactggtcgtgcagttgtagttcaagaagcacaacgtcaagctggtgttggtgcagcagttgtagctgaattaagtgaacgtgcaatcctttcattagaagcacctattggaagagttgcagcagcagatacaatttatccattcactcaagctgaaaatgtttggttaccaaacaaaaatgacatcatcgaaaaagcaaaagaaactttagaattttaa

SEQ ID NO: 8257 - DNA, 1407 bp, Staphylococcus aureus
  CDS (1)...(1407)
atggtagttggagatttcccaattgaaacagatactatagtaatcggagcaggtcctggtggatacgttgcagcaattcgtgcagctcaattaggacaaaaagtaacaatcgttgagaaaggtaatcttggtggtgtttgcttaaacgtaggatgtattccttcaaaagcattactacatgcttctcaccgttttgttgaagcacaacattctgaaaacttaggtgttattgctgaaagtgtttctttaaacttccaaaaagttcaagaattcaaatcatcagttgttaataaattaactggtggtgttgaaggcttacttaaaggtaacaaagttaacatcgttaaaggtgaagcatatttcgtagataacaatagcttacgtgttatggacgaaaagagcgcacaaacatacaactttaaaaatgcaatcattgcaacaggttcaagaccaattgaaattcctaatttcaaattcggtaaacgtgttatcgactcaacaggtgctttaaacttacaagaagtaccaggtaaattagttgtagttggtggaggatacattggatcagaattaggtacagcatttgctaactttggttcagaagtaacaatccttgaaggtgctaaagatatcttaggtggcttcgaaaaacaaatgacacaacctgttaaaaaaggtatgaaagaaaaaggtgttgaaatcgttactgaagctatggctaaatcagctgaagaaacagataacggagttaaagttacttatgaagctaaaggcgaagagaaaacaatcgaagctgattatgtattagtaactgtaggtcgtcgtccaaacacagacgaattaggcctagaagaattaggtgttaaattcgctgaccgtggattattagaagttgataaacaaagccgtacgtctatcagcaatatctatgcaattggtgatatcgttccaggtttaccacttgcgcacaaagctagctatgaagctaaagttgctgctgaagcaattgatggtcaagctgctgaagttgattacattggtatgccagcagtatgctttactgaaccagaattagctacagttggttattcagaagcgcaagctaaagaagaaggtttagcaattaaagcttctaaattcccatatgcagcaaatggtcgtgcattatcattagatgatactaacggatttgttaaacttattacacttaaagaagatgatactttaatcggtgctcaagtagttggtactggtgcatcagatattatctctgaattaggtttagcaattgaagctggtatgaatgctgaagatatcgcattaacaatccatgcacatccaacattaggtgagatgactatggaagcagcggaaaaagctatcggatacccaatccatacaatgtaa

SEQ ID NO: 8258 - DNA, 873 bp, Staphylococcus aureus
  CDS (1)...(873)
atgaaatatggttttagaaaaattgaagctattgttggtacattaattttcacagtgttattcatctttatatttgaagtctatatttcatcaccacagttgaacgctgtgttaaatggatttataccacatagtgaaatcattacaaataacggcattctctatattgcattaggtattattggagctacaattatgcctcataatttgtacttacattcatcaattgtacaatctagaacatactcaagacataacaatgaagaaaaggcgcaagcgattaaatttgctacgatagattcgaacattcagttatcaatcgcatttgtagtcaattgcttattattagtgttaggagcatcactatttttcaactcaaacgctgacgatttaggtggtttctatgatttatatcatgccttaaaaactgaacctgtactgggtgcaacaatgggtgcaatcatgagtacattatttgcagttgcattattagcgtcaggtcaaaattcaacgattactggtactttagcaggacaaatcgtaatggattgttttttaagattacacataccaaattggttaagacgtttaattacacgttcccttgctgtcattcctgttatcgtatgtttaatcatttttagaggtaatgcagctaaaattgagcagctacttgtattctctcaagtattcttaagtattgctcttccgttctgtttaataccattacaattagcaactagtaataaagacttgatgggacctttctataataaaacatgggttaatatcatttcatggacacttattattattctaagtattttaaatgtctatttaatcgttcaaacattccaagaactacaaggttaa

SEQ ID NO: 8259 - DNA, 381 bp, Staphylococcus aureus
  CDS (1)...(381)
atgaataataaacgacattcaacaaatgaacaattaagtttagacgaaataaacaatacaattaaattcgatcatcgcagttcaaataaacagaaatttttatcatttcttgggcctgggttattagtcgctgttggttacatggatcccggaaactggataacatcaatgcaaggtggcgcgcaatatggctatactttgctattcgtaattcttatttcaagtttatcagcaatgttacttcaaagcatgacagtgagattaggaatagcaacaggtatggacttagctcaaatgacacgacattatttatcaagaacctattgctataatcttttggattattgcagaactagcaattatcgccacagatattgctga

SEQ ID NO: 8260 - DNA, 1806 bp, Staphylococcus aureus
  CDS (1)...(1806)
gtgggattttacttaagaaagaaggaaactatttatatgactaataaaagagaagatgtccgcaatatagcaattattgctcacgttgaccatggtaaaacaactttagtagatgagttgttaaaacaatctggtatattcagagaaaatgaacatgtcgatgaacgtgcaatggactctaacgatatcgaaagagagcgtggaattacgattctagccaaaaatacggctgttgattataaaggtacacgtatcaatattttggatacaccaggacatgcagactttggtggagaagtagaacgtattatgaaaatggttgatggggttgtcttagtagtagatgcgtatgaaggtacaatgcctcaaacacgttttgtacttaaaaaagcgctagaacaaaacctgaaacctgttgttgttgttaataaaattgataaaccatcagcacgtccagagggtgttgtagatgaagttttagatttatttattgaattagaagcaaacgatgaacaattagaattccctgttgtttatgcttcagcagtaaatggtacagctagcttagatcctgataaacaagatgataatttacaatcattatatgaaacaattattgattatgtaccagctccaattgataacagtgatgagccattacaattccaagtagcattgttggactacaatgattatgttggacgtattggtattggtcgtgtattcagaggtaaaatgcgtgtcggagataatgtatcactaattaaattagacggtacagtgaaaaacttccgtgtaactaaaatctttggttattttggactaaaacgtttagaaattgaagaagcgcaggctggagatttaattgctgtttcaggtatggaagacattaacgttggtgaaactgtaacaccacatgaccatcaagaagcattgccagttctacgtattgatgagcctactcttgaaatgacatttaaagttaacaattcaccatttgctggccgtgaaggtgactttgtaacagcgcgtcaaattcaagaacgtttaaatcaacaattagaaacagatgtatctttgaaagtttctaacacagattctccagatacatgggtagttgctggtcgaggtgaattgcatttatcaatccttattgaaaatatgcgtcgtgaaggttatgaattacaagtttcaaaaccacaagtaattattaaagaaattgatggtgtaatgtgtgaaccatttgaacgtgtgcaatgtgaagtgccacaagaaaatgcaggtgcggttattgaatcattaggtgcacgtaaaggtgaaatggttgatatgactacaactgataatggacttacacgtttaatctttaatgtaccggctcgtggtatgattggttatacgactgaatttatgtcaatgacaagaggttacggtattattaaccatacatttgaagaatttagaccacgtattaaagcacaaattggcggccgtcgtaatggtgctttaatttcaatggatcaaggttctgcaagtacttatgccattttaggacttgaagatagaggtgtaaacttcatggaacctggtactgaagtttatgaaggtatgattgttggtgaacataatcgtgaaaatgatttaactgttaacatcactaaaacaaaacatcaaactaacgtacgttctgcaacgaaagaccaaacacaaacaatgaatagaccgcgtattctaacattggaagaagcattacaattcattaatgatgatgaacttgttgaggtacaccagaaagcatacgtttaa

SEQ ID NO: 8261 - DNA, 276 bp, Staphylococcus aureus
  CDS (1)...(276)
atggcgaaacaaacaacaatgaaaaatgcagctttgaaacaattgactaaagatgctgatgaaatcttgcatctgattaaagttcaactagataatttaacattaccttcatgcccattatatgaagaggtactagatacacaaatgtttggacttcaaaaagaagttgattttgctgttaaattaggtttagttgaccgcgaagatggcaaacaaattatgttacgtcttgagaaagaactttcaaaattacatgaagcttttacacttgtttaa

SEQ ID NO: 8262 - DNA, 1239 bp, Staphylococcus aureus
  CDS (1)...(1239)
atgactgaatatatgaagaattttagaagtattttacggtatattggtaaaacctcaaagtttattgattatccgttattagttacatatattgtattgagtttaattggattagtgatggtatatagtgccagtatggttccagcaactaaaggcacattgactggtggtatcgatgttccaggaacgtatttttacaaccgacaattagcatatgtcataatgagttttataattgtattttttattgcatttttaatgaatgttaaattactgagtaatattaaagtgcaaaaaggtatgattataactatcgtctcgctattattactgacgttagtaatcggtaaagatattaatggttctaaaagttggataaacttaggatttatgaacttacaggcatctgagttattaaaaattgcaatcatattatatatcccatttatgatcagtaaaaaaatgcctagagtattaagtaaaccaaaattaattttaagtcctattgtattagcattaggttgtacgtttttagttttcttacaaaaagacgtagggcaaacattactaatattaattattttagttgcgattattttttattcaggaattggggtaaacaaagtcctaagatttggtataccagcagtgctaggattcttagtagtatttgtcattgcattaatggctggttggttaccaagttatttaactgccagatttagtacgctaacagatccattccaattcgaatcaggaactggataccatatttccaattcattgcttgcgataggtaacggtggcgtatttggaaaaggattaggaaatagtgcaatgaaattgggctatttaccagaaccacatacagattttatttttgcaattatttgcgaagaattaggtttaatcggaggattgctagttattactttagagttctttattgtatatcgtgccttccagtttgcaaataaaacatcatcatatttttataaacttgtgtgtgttgggattgccacatattttggaagccaaacgtttgtaaacattggcggtatttcggcaacaattccattaactggtgtgccattgccatttatcagctttggtggatcatcaatgattagtttaagtattgctatgggattacttctgattgtaggtaaacaaatcaaagtagaccagcaacgaaagaaacaacagcaaaaagttgatataagaagacaatttaattaa

SEQ ID NO: 8263 - DNA, 3222 bp, Staphylococcus aureus
  CDS (1)...(3222)
gtggatgcgattcatcctggctatggatttttaagtgaaaatgaacaatttgcgcgtcgttgtgcagaagaagggattaaatttattggtcctcatttagaacatttagatatgtttggagataaagttaaagctcgtacaacggctatcaaggcagatttaccagttattcctggtacagacggtccaattaaatcatatgaattagcaaaagaatttgcagaagaagctggtttcccgctaatgattaaagccacaagtggtggcggcggtaaaggtatgagaatcgttcgtgaagaaagtgaattagaagatgctttccatagagcaaaatcagaagcagaaaaatcatttggtaatagtgaagtttacatagaaagatacattgataatccaaagcatattgaagtacaagtcataggtgacgaacatggaaatatcgtacacttatttgaacgtgattgttcagtacaacgtcgtcatcaaaaagttgtagaagttgcaccatcagttggattatcaccaacattacgtcaacgtatttgtgatgctgcaattcaattgatggaaaatattaaatatgtcaatgcaggtactgttgaatttctagtatctggtgacgaattcttctttatagaagttaaccctcgtgtacaagtagagcatacaattacagagatggtaacaggaattgatattgttaagacacaaattttagttgcagcaggtgccgatttatttggtgaagaaattaatatgccgcaacaaaaagatattacaacattgggctatgccatccaatgtcgtattacaacagaagatccgttaaatgatttcatgccggatactggaacaatcattgcttatcgttcaagcggtggctttggtgtacgtcttgatgctggagatggtttccaaggtgctgagatatcaccttattatgattcattactcgtaaaattatctacacatgcgatatcatttaaacaagcagaagaaaaaatggtacgttcattacgagaaatgcgtattcgtggtgttaaaactaatattccattcttaattaatgtaatgaagaataaaaagttcacaagtggtgattacacaactaaatttattgaagaaacaccagaacttttcgacattcagccgtctctagatagaggtactaaaacattagaatatataggtaatgtaacaattaatggtttcccaaatgttgagaaacgtccgaaaccagactatgaattagcatcaattccaactgtatcttcaagtaaaatcgcttcatttagtggtacgaaacaattgcttgatgaagtaggtccaaaaggtgtagctgaatgggttaaaaagcaggatgatgtcttactaacagatacaacctttagagatgcacaccaatcattattagctacacgagttagaactaaggatatgattaatatcgcatccaaaacagcggacgtatttaaagatggtttctcactagaaatgtggggcggtgctacatttgatgtggcatataatttcttgaaggaaaacccatgggaacgacttgaacgtctacgtaaagctattccaaatgtattattccaaatgttgttacgtgcttcaaacgcagttggttataaaaactatcctgataatgttattcataaattcgtacaagaaagtgctaaagcaggcatagatgtctttagaattttcgattcattaaactgggtagatcaaatgaaagttgccaatgaagcagtacaagaagcgggcaaaatctcagaaggtactatttgttatacaggtgacattttaaatcctgagcgatcaaacatttatactttagagtattatgtcaaactagctaaagagttagaacgtgaaggtttccatattttagcgattaaagatatggcaggcttattaaaacctaaagctgcttacgaattgattggtgagttaaaagcagctgtagatttaccaatccatcttcacactcatgatacaagtggtaatggtttattaacgtacaaacaagcaatagatgctggtgtcgatatcattgatactgctgttgcttcaatgagtggtttaacaagtcagccaagcgccaattcgttatattatgcattaaatggcttcccacgtcaccttagaactgatattgaaggtatggagtcacttagtcattattggtcaactgtacgtacttattattcagactttgaaagtgatatcaaatcaccgaatactgaaatttatcaacatgaaatgcctggtggacagtattcgaatttaagtcaacaagctaaaagtttaggtttaggcgaaagatttgatgaagtcaaagatatgtatcgcagagtgaatttcttatttggtgatatcgtaaaagtaacgccatcgtctaaagtagttggtgatatggcactttatatggtacaaaatgatcttgatgaacaatccgtgattacagatggctataaattagatttcccagaatcagtagtgtcgttcttcaaaggtgaaataggacaacctgtaaatggttttaataaagatttacaagcggttattttaaaaggccaagaagcactaacagctcgtccaggtgaatatctagagccggttgattttgaaaaagtccgtgagttgcttgaagaagagcaacaaggtcctgttacggagcaagatattattagttatgtattatatccaaaagtatatgaacaatatattcaaactagaaatcaatacggaaacttatcgttacttgatacgcctacattcttctttggaatgcgtaatggtgaaacagtagaaatcgaaatcgataaaggtaaacgattaattattaaactagaaacgattagtgaaccagatgaaaatggtaatagaacgatttactatgcgatgaatggtcaagcgagacgtatttatattaaagatgaaaatgtgcatacaaatgcgaacgttaagccaaaagcagataagagtaatccaagtcatatcggtgcgcaaatgccaggttcagtaactgaagtcaaggttagtgtaggtgaaactgtgaaagctaatcagccgttgctaattactgaagctatgaaaatggaaacaacaattcaagcaccatttgacggtgtgattaaacaagtaactgtaaataatggtgatacaatagcgacaggcgatttattaatcgaaattgaaaaagcaactgactaa

SEQ ID NO: 8264 - DNA, 444 bp, Staphylococcus aureus; identical to SEQ ID NO: 4186
  CDS (1)...(444)

SEQ ID NO: 8265 - DNA, 1077 bp, Staphylococcus aureus; identical to SEQ ID NO: 4193
  CDS (1)...(1077)

SEQ ID NO: 8266 - DNA, 735 bp, Staphylococcus aureus
  CDS (1)...(735)
atgagaatgaagcgatttttaactattgtacaaattttattggttgtaattattatcatttttggttacaaaattgttcaaacatatattgaagacaagcaagaacgcgcaaattatgagaaattacaacaaaaatttcaaatgctgatgagcaaacatcaagcacatgtgagaccacaatttgaatcacttgaaaaaataaataaagacattgttggatggataaaattatcaggaacatcattgaattatccagtactacaaggtaagacaaatcacgattatttaaatttagattttgagcgagaacatcgacgtaaaggtagtatttttatggattttagaaatgaattgaagaatttaaatcataatactattttatacgggcaccatgtcggtgataatacgatgtttgatgtgttagaagattatttaaagcaatcgttttatgaaaaacacaagataattgaatttgacaataaatatggtaaatatcaattgcaagtatttagtgcatataaaactactactaaagataattacatacgtacagattttgaaaatgatcaagattatcaacaatttttagatgagacaaaacgtaaatctgtgattaattcagatgttaatgtaacggtaaaagataaaataatgactttatcaacatgcgaagatgcatatagtgaaacaacgaaaagaattgttgttgtcgcaaaaataattaaggtaagttaa

SEQ ID NO: 8267 - DNA, 1059 bp, Staphylococcus aureus
  CDS (1)...(1059)
atgtctgaacaacaaacaatgtcagagttaaaacaacaagcgcttgtagatattaatgaagcaaatgatgaacgtgcactgcaagaagttaaagtgaaatacttaggtaaaaaagggtcagttagcggactaatgaaattgatgaaggatttgccgaatgaagagaaacctgcgtttggtcaaaaagtgaatgaattgcgtcaaacaattcaaaatgaattagatgaaagacaacagatgttagttaaagaaaaattaaataagcaattggctgaagaaacaattgatgtatcattaccaggtcgtcatattgaaatcggttcaaagcatccattaacacgtacaatagaagaaattgaagacttattcttaggtttaggttatgaaattgtgaatggatatgaagttgaacaagatcattataacttcgaaatgttgaatttacctaaatcacaccctgcacgtgatatgcaagatagtttctatattacggatgaaattttattacgcacgcatacatcaccagtgcaagcacgtacgatggaatcacgtcatggtcaaggtccagttaaaattatttgccctggtaaagtgtatcgtcgtgactctgatgatgcgacacatagtcatcaatttacacaaattgaaggattagttgttgataaaaacgttaaaatgagtgatttgaaaggtactttagaattgttagctaagaaattatttggtgctgatcgtgaaattcgtttacgtccaagttacttcccattcactgaaccttctgtagaagttgatgtgtcatgttttaaatgtaaaggaaaaggttgtaatgtgtgtaaacacacaggatggattgaaattttaggtgctggaatggtacatcctaatgtattagaaatggctggttttgattcttcagagtactctggatttgcatttggtatgggaccagaccgtattgcaatgttgaaatatggtatagaagatattcgtcatttctatactaatgatgtgagatttttagatcaatttaaagcggtagaagatagaggtgacatgtaa

SEQ ID NO: 8268 - DNA, 2403 bp, Staphylococcus aureus
  CDS (1)...(2403)
atgttgatatcaaatgaatggttgaaagaatatgtaacaatcgatgattctgtaagtaatttggcagaacgtattacgcgcacaggtattgaagtggatgatttaattgactacacaaaagatatcaaaaatttagttgtcggcttcgttaagtcaaaagagaaacatcctgatgcagataaattaaatgtttgccaagttgatatcggagaagacgaacctgtacaaatagtatgtggtgcaccgaatgttgatgcaggacaatatgtcattgttgctaaagtaggtggaagattgcctggtggtattaaaattaagcgtgccaaattacgcggtgaacgttcagaaggtatgatttgttcgttacaagaaattggtatttcaagtaattatataccgaaaagttttgaatcaggcatttatgtatttagtgaatcccaagttccaggaacagatgccttacaagctttatatttaaatgatcaagtaatggaatttgatttaacgccgaatcgtgcagatgctttaagtatgataggtactgcttatgaagttgcagcattatataatacaaaaatgactaagccagagacaacatcaaatgagcttgagttatctgcaaatgatgaactaactgtgacaattgaaaatgaagataaagtaccatattatagtgcacgtgttgttcacgacgtgacaattgaaccctcgccaatttggatgcaagcacgcttaataaaagcaggtatacgtcctattaataatgttgtcgacatttcaaattatgtgttattagaatacggtcaaccattgcatatgtttgatcaagatgcgattggttcacaacaaattgttgttcgtcaagctaatgaaggcgaaaaaatgacaacattagatgatacagaacgtgaattattaacgagcgatattgtcattactaatggacaaactccaattgcattagctggtgttatgggtggcgatttttcagaagttaaagaacatacatcaaatatagttattgaaggtgctatttttgattctgtttccattcgtcatacatcaagacgtttaaatttacgcagtgaatcatctagtcgttttgaaaaaggaatagctactgaatttgtagatgaagcagtcgaccgtgcatgttatttattacaaacttatgcaaacggaaaagtgctaaaagatagagtatcttcaggagaacttggtgcatttattacaccaatcgacatcactgctgataaaattaatcgcactattggatttgatttgtcacaaaatgatattgttactatttttaatcaactagggtttgatacagaaataaatgatgatgttattacagtgcaagtaccatcacgtcgtaaagatattacaattaaagaagatttaattgaagaagttgcacgtatatatggttacgacgatattccatcaacgttacctgtcttcgaaaaagttactagtggtcagctaactgatcgtcaatataaaactagaatggttaaagaagtgttagaaggtgctggattagaccaagctattacgtattcgttagtttctaaagaagatactactgcatttgcgatgcaacagcgtcaaacaattgatttattgatgccaatgagtgaagcgcatgcgtcattacgtcaaagtttattaccacatttaatcgaagcggcatcatataatgtggcacgcaaaaataaagatgtaaaattatttgaaatcggcaatgtcttctttgctaatggtgaaggtgaactaccagatcaagttgaatatttaagtggtattttaactggagattatgtagtcaatcaatggcaaggtaagaaagaaacggttgatttctatttagcaaaaggtgtcgtggatcgagtatctgaaaagttaaaccttgaatttagttatcgtcgtgctgatattgatggattacatccaggtcgcacagctgaaatcttattagagaataaagttgttggttttattggtgaattacatccaacattagcagctgaaaatgatttaaaacggacgtatgtttttgagttgaattttgatgcattaatggctgtgtcggtaggttacattaattaccagccaattccgagattcccaggcatgtctcgtgacattgcattagaagtagatcaaaatattccagcagctgatttattatcaacgattcatgcacacggtggcaatatattaaaagacacacttgtctttgatgtatatcagggtgaacatttagaaaaaggtaaaaaatcaattgcaatacgattaaattatttagacacagaagaaacattgacagatgaacgcgtttcaaaagtacaagcggaaattgaagcagcattaattgaacaaggtgctgttattagataa

SEQ ID NO: 8269 - DNA, 2349 bp, Staphylococcus aureus
  CDS (1)...(2349)
atgagacaaaaaacattagacgtcttagaatttgaaaaaataaaatcactcgttgccaatgaaactattagtgacttaggcttggaaaaggtcaatcaaatgatgccagctactaattttgaaacggttgtttttcaaatggaagaaacggatgagattgctcaaatctataataagcatcgtttaccaagcttgagtggcttatctaaagtatcagcattcattcatcgcgctgatattggcggcgttttaaatgtatcagagcttaacttgataaaaagattaattcaagtacaaaatcaatttaagacattttataatcaattggttgaagaagatgaaggtgttaaatacccaatattagatgacaagatgaatcaattacctgtgttaaccgatctttttcaacaaataaatgaaacatgtgatacgtacgatttatatgataatgcgagttatgaattgcaagggattagaagtaaaatttctagcacgaatcaacgtattagacaaaatttggaccgtattgttaaaagccaagcaaatcagaaaaaattatcagatgctattgtaacagttaggaatgaaagaaacgttatacctgtcaaagctgaatatcgacaagattttaatgggattgtacatgatcaatctgcttcaggacaaacattgtatattgagccatcatcagttgttgaaatgaataatcaaattagtcgattacgtcatgatgaagcaattgaaaaagaacgcattttaacgcaactaactggttatgtggctgcggacaaagatgcactacttgtggcagaacaagtcatgggtcagttagattttttaatcgcaaaagcgagatatagtagaagtattaaaggaacaaagccgatatttaaagaggaacgtactgtatatttacctaaagcataccatccattattaaatcgtgagactgttgtagctaataccatcgaatttatggaagatattgaaacggtaattattacaggaccgaatactggtggtaaaacagtaacattaaaaacattaggtttaattattgttatggctcaatcaggattgttgattccaacacttgatggtagtcagttgagtgtatttaaaaatgtatattgcgatgtcggagatgaacaatcaatagaacaatcattatcaactttttcatctcatatgacgaatatagttgagattttaaagcatgcagacaaacatagtttagttttatttgatgaattaggtgcaggtacagatccaagtgaaggtgctgctttagcaatgagcattttagaccatgttagaaaaattggttctctagtaatggcaacgacgcactatcctgaacttaaagcatatagttataatcgagaaggcgttatgaatgcgagtgtagaatttgatgtagatactttgagtccaacgtataagttattaatgggtgtgccaggtcgttcaaatgcttttgacatttctaaaaagttaggtcttagtttgaatattattaataaggctaagacgatgattggtactgatgaaaaagaaataaatgaaatgattgaatcattagagcgtaattacaaacgtgtagagacacagaggttagaactggatcgtcttgtaaaagaagcggagcaagtgcatgatgatttatctaagcagtatcaacaattccaaaattatgaaaagtctctaatagaggaagcgaaagaaaaagcaaatcaaaagattaaagctgcaacaaaagaagctgacgatattattaaagatttaagacaattgcgtgaacaaaaaggtgcagatgttaaagaacatgaattgattgataagaagaaacgattagatgatcattatgaagcgaaatctataaagcaaaatgtacaaaagcaaaaatacgataaaattgttgctggtgatgaagtaaaagtattatcttacggtcaaaagggtgaagttttagaaattgtcaatgatgaagaagcaattgttcaaatgggaattattaaaatgaagttacctattgaagatttagagaaaaaacaaaaagaaaaagttaagccaacgaaaatggttacacgtcaaaatcgtcaaacaattaaaactgaacttgacttacgaggctatcgttatgaggatgctttaattgaactagatcaatatttagatcaagccgttttaagtaattacgaacaagtttatatcattcatggtaaaggtacaggtgcacttcaaaaaggtgtacaacaacatttgaaaaagcataaaagtgttagtgactttagaggtggtatgccaagcgaaggtggatttggcgttaccgttgcaactctaaaataa

SEQ ID NO: 8270 - DNA, 1824 bp, Staphylococcus aureus
  CDS (1)...(1824)
atggaggaaaatgtcgttatgtgtggaattgttggttatattggctatgataatgccaaagaattattattaaaaggtttagaaaaattagaatacagaggttatgactctgcaggtatcgcagtagtaaatgatgataatacaactgtatttaaagaaaaaggtcgtattgcagaattacgtaaagttgctgatagtagcgattttgatggacctgttggaatcggtcacacacgttgggcaacacacggtgtaccgaatcatgaaaactctcatccacatcaatcatcaaatggccgttttactctagttcataacggtgttattgaaaactatgaagagttaaaaggtgaatacttacaaggtgtatcattcatttcagaaacagatacagaagttatcgttcaattagttgaatacttttcaaatcaaggactttcaactgaagaagcatttacaaaagttgtgtcattattacatggttcatatgcattaggtttattagatgctgaagacaaagacacaatctatgttgctaaaaataaatcaccattattattaggtgttggtgaaggtttcaatgttatcgcatcagacgcacttgcaatgttacaagtgacaagcgaatataaagaaatccatgaccatgaaatcgttattgttaaaaaagatgaagttattattaaagatgcagatggaaacgttgttgaacgtgattcatatattgctgaaattgatgcatcagatgctgaaaaaggtgtttatgcacactacatgttaaaagaaattcatgaacaaccagcagtaatgcgtcgtattattcaagaatatcaggatgcagaaggtaacttgaaaattgatcaagacatcatcaatgatgttaaagaagcagaccgcatttacgttattgcagcaggtacaagctaccatgcaggtttagtaggtaaagaatttttagaaaaatgggctggcgtaccaactgaagtacacgttgcatcagagtttgtctacaacatgccattattatctgaaaaaccattgttcgtttatatttctcaatcaggtgaaactgcagatagccgcgccgtattagttgagactaataaattaggtcataaatcattaacaatcactaatgttgcaggttcaactttatcacgtgaagcagaccacacattgttattacacgcgggtcctgaaatcgcagttgcatctacaaaagcatatactgcacaaattgcagtattatcaatcttgtctcaaatcgttgcaaaagagcacggtcgtgaagcagatattgatttattgagagaattagcaaaagtaacaacagcaattgaagcgattgttgacgatgcaccaatcatggaacaaattgctacagatttcttagaaacaacacgcaatgcattctttatcggacgtactattgactataacgtaagtttagaaggtgcgttaaaacttaaagaaatctcttacattcaagctgaaggttttgcaggtggcgaacttaaacacggtacaattgccttaatcgaagaaggtacaccagttgtaggtttagcaacacaagagaaagttaatttatcaattcgtggtaatgttaaagaggtagtagcacgtggagcacacccatgtattatttctatggagggtcttgaaaaagaaggcgacacttatgtcattcctcatgtacatgaattattaacgccattagtatcagttgttacattacaattaatttcatactatgcagcgttacacagagatttagatgttgataaaccacgtaaccttgctaaatcagttactgtggaataa

SEQ ID NO: 8271 - DNA, 444 bp, Staphylococcus aureus
  CDS (1)...(444)
atgagtaatcaacaagatgttgtaaaagaattgaatcaacaagtagcaaactggacagtagcttatacaaagctacataatttccactggtatgtgaaaggacctaacttcttctcattacacgttaaatttgaagaattatataatgaagcaagtcaatatgtagacgaattagctgaaagaattttagcggtaggaggaaaccctgtaggtacattaactgaatgcgtagagcaatcaattgttaaagaagctgcgaaaggttactctgcagaacaaatggttgaagaattatctcaagatttcactaatatctcaaaacaattagaaaaagcgattgaaattgctggtaatgctggcgatgatgtatcagaagatatgtttataggtatgcaaacatcagtagataaacataattggatgtttaaatcttacttaagctaa

SEQ ID NO: 8272 - DNA, 1341 bp, Staphylococcus aureus
  CDS (1)...(1341)
atgctttgtcctaagctttttaagaaaaggatgataaaaatgagaatgatagacattattgagaaaaagcgtgacggtcatacactaacaacggaagaaattaatttctttattgacggctatgttaaaggggatattcctgattaccaagcatcaagtttagcaatggcgatttatttccaagatatgaatgatgatgagcgtgcagcattaacgatggctatggttaattctggtgatatgatagatttgagtgatattaaaggtgtcaaagtagataagcactcaacaggtggtgtaggagatacaactacattggttttagcaccattagtagcagctgtagatgttcctgttgcaaaaatgagtgggcgtggattaggtcatacaggtggtacgattgataaattagaagcaattgatggttttcatgttgaaatagatgaagcaacatttgtgaaattggttaatgaaaataaagtggcagttgtaggacaatcaggaaatttaactcctgcagataaaaaattatatgccttaagggatgttactggtactgtcaattcaataccattaattgcctcttcaattatgagtaaaaagattgccgctggtgcagatgcaattgtattagatgtaaaaactggtagcggtgcatttatgaaaacattagaagatgctgaagcattagcgcacgcaatggtacgtattggtaataatgtgggacgtaatacgatggcgattatttctgatatgaatcagccacttggtcgtgccattggcaatgcgcttgagttacaagaagcaattgatacgttgaaaggacatggtccgaaagatttaacagaacttgtattaacattaggttctcaaatggttgtacttgcaaacaaagctgaaacgcttgaagaagcgagagcattgctaattgaggcaattgattcaggtgcagcattagaaaaattcaaaacatttattaaaaatcaaggtggcgacgaaacagttattgaccatccagagcgtttgccacaagctcaatatcaaatcgaatataaagctaaaaaatcaggttatgtgactgaattagtctctaacgatataggtgtcgcttcgatgatgttaggagcgggacgtttaacaaaagaggatgatattgatttagcggttggtattgttttaaataaaaaaattggggataaagtagaagaaggagaatcattattaacgattcacagtaatcgccaagatgtagacgatgttgttaaaaaattagattcaagcataacaattgctgatcatgttgtatcgcctacattaattcataaaatcattacagagtag

SEQ ID NO: 8273 - DNA, 1185 bp, Staphylococcus aureus
  CDS (1)...(1185)
atgagtgaaaaacaacaaattctcgattatatagaaacgaataaatatagttatatcgaaatcagtcatagaattcatgaacgtcctgaacttggtaatgaagaaatatttgcgtctcgaactttaatagatcgtttgaaagaacatgattttgaaattgaaaccgagattgctgggcatgcaactgggtttatagcgacatatgattcgggtcttgacggcccagctataggttttttagcagaatacgatgcattgccaggattaggtcatgcttgtggtcataatatcattggaactgcaagtgtgcttggtgcaattggtttgaagcaagtgattgaccaaattggtggtaaagtagtcgttctcggatgtccagctgaagaaggtggggaaaatggtagcgctaaagcttcttatgtcaaggctggtgtgattgatcaaatagacattgccttaatgattcatccgggaaatgaaacttataaaacgattgatactttggcagtggatgttttagatgttaaattttacggaaaaagtgctcatgcctctgaaaatgcagatgaagcgttaaatgcattagacgctatgattagttattttaatggtgtagcacaactacgacaacatattaaaaaaggtcaacgtgtgcatggtgtgattttagatggcgggaaagcagctaatattattccagactatacacatgctcgtttttatactagagcaatgacgcgtaaagaattggatatattaacagaaaaagtaaatcaaatcgcacgtggagctgcgatacagactggttgtgattatgaatttggtccaattcaaaacggtgtgaatgaattcattaaaacgccgaaattagatgatttatttgctaaatatgctgaagaagttggtgaagcagttattgatgatgattttggttatggctctacggatacagggaacgtaagtcatgttgtgccaacaatacatcctcatattaaaataggatcacgtaatttagtaggacatacgcatagatttagagaagcagctgcgagtgtacatggtgatgaagcattaattaaaggtgctaaaataatggcgttgatggggttagagttaattacaaatcaagacgtttatcaagacattattgaagagcatgcgcatttgaaagggaatgggaagtaa

SEQ ID NO: 8274 - DNA, 1611 bp, Staphylococcus aureus
  CDS (1)...(1611)
atgacaaaatttatttttgtaacaggtggcgtagtttcatcattagggaagggtattacagcatcttctctaggtagattattaaaagatagaggtctaaatgtaacaattcaaaaattcgatccatacttaaatgttgacccaggtacaatgagtccttatcaacatggtgaagtattcgtaacggatgatggtgcagaaactgacctagacttaggacattacgaaagatttattgatattaatttaaacaagttttcaaatgtaacagccggtaaagtgtattcacacgtattgaaaaaagaacgtcgtggtgattacttaggcggaacagttcaagttattccgcatatcacaaatgaaattaaagaacgtttattacttgcaggggaaagtacgaatgcagacgttgttatcactgaaattggcggtacaacaggtgatattgagtcattaccgtttattgaagcgattcgtcaaattcgtagcgatttaggtagagaaaatgttatgtatgttcactgtacattactgccttatattaaagctgctggagaaatgaaaacgaagccgacacaacatagtgttaaagaattacgaggcttaggtattcaaccagacttaatcgttgtaagaactgaatatgaaatgacacaagatttaaaagataaaattgcattattctgtgacattaataaagaaagtgttattgaatgtcgtgatgcagactctttatacgaaattccattacaattaagccaacaaaatatggatgatatcgttattaaacgtttacaattaaacgcgaaatatgaaacacagcttgatgaatggaaacagttgttagatatcgttaataatttagatggtaaaattacaattggcttagttggtaagtatgttagcttacaagatgcatacttatctgtagttgaatcattaaaacatgccggatatcctttcgctaaagatattgatattagatggattgattcaagtgaagttacagatgaaaatgcggctgaataccttgcagatgtcgacggtattttagtaccaggtggatttggtttccgtgcaagtgaaggtaaaattagtgcaattaagtatgctagagaaaacaatgtaccattctttggtatttgtttaggaatgcaacttgcaacagttgaattttcgagaaacgtattaggccttgaaggcgcacattcagctgaattagaccctgcaacaccatacccaattatagatttattaccagaacaaaaagatatcgaagatttaggtggtacattacgcttaggcttatatccatgttcaattaaagaaggcacattggcacaagatgtttatggtaaagcggaaattgaagaaagacatcgtcatcgttatgaatttaacaatgactatagagaacaattagaagcgaatggtatggtgatttctggtacaagtccagatggacgtttagtagaaatggtagagattccgacaaatgatttctttattgcttgtcaattccacccagaattcttatctagaccaaatcgtccgcacccgatttttaaatcatttattgaagcttcattaaaatatcaacaaaataaataa

SEQ ID NO: 8275 - DNA, 861 bp, Staphylococcus aureus
  CDS (1)...(861)
atgcctttagtttcaatgaaagaaatgttaattgatgcaaaagaaaatggttatgcggtaggtcaatacaatattaataacctagaattcactcaagcaattttagaagcgtcacaagaagaaaatgcacctgtaattttaggtgtttctgaaggtgctgctcgttacatgagcggtttctacacaattgttaaaatggttgaagggttaatgcatgacttaaacatcactattcctgtagcaatccatttagaccatggttcaagctttgaaaaatgtaaagaagctatcgatgctggtttcacatcagtaatgatcgatgcttcacacagcccattcgaagaaaacgtagcaacaactaaaaaagttgttgaatacgctcatgaaaaaggtgtttctgtagaagctgaattaggtactgttggcggacaagaagatgatgttgtagcagacggtatcatttatgctgatcctaaagaatgtcaagaactagttgaaaaaactggtatcgatgcattagcgccagcattaggttcagttcatggtccatacaaaggtgaaccaaaattaggatttaaagaaatggaagaaatcggtttatctacaggtttaccattagtattacacggtggtactggtatcccgactaaagatatccaaaaagcaattccatttggtacagctaaaattaacgtaaatactgaaaaccaaatcgcttcagcaaaagcggttcgtgacgttttaaacaacgacaaagaagtttacgatcctcgtaaatacttaggaccagctcgtgaagctatcaaagaaacagttaaaggtaaaattaaagagttcggtacttcaaaccgcgctaaataa

SEQ ID NO: 8276 - DNA, 1260 bp, Staphylococcus aureus
  CDS (1)...(1260)
atggctcaagaggtaataaaaataagaggtgggcgcacactaaacggggaagttaatatcagtggtgcgaaaaacagtgctgtagctatcattcctgcaacattattagctcaaggacatgtaaaattagaaggtttaccacaaatctctgatgttaaaacgttagtgagtttattagaagatttaaatattaaagcaactctaaatggtacggaattagaggttgatacaactgaaatacaaaatgctgcattaccaaataataaagttgaatcattacgtgcttcatactatatgatgggtgccatgttaggtagatttaaaaaatgtgtcattggtttgcctgggggatgtccacttgggccacgtccaattgatcaacatattaaaggatttaaagctttaggtgcagaaattgatgaatcaagtacgacatcaatgaaaattgaagctaaagagttaaaaggtgcacatatttttctagatatggttagcgtaggtgcaacaattaacattatgctagctgcagtttatgcaacaggacaaactgtaattgaaaatgctgctaaagaaccggaagtagttgatgttgctaacttcttaacaagtatgggagctaatattaagggagcgggtacatcaacgattaaaatcaatggtgtcaaagaattacatggttctgagtatcaagttatacctgatagaattgaagcaggcacatatatgtgtatcgctgcagcatgtggagaaaatgttatattaaataatattgttccgaaacatgtagaaacattaactgctaaatttagtgaattaggtgtaaatgttgatgtaagagacgaaagaattcgcatcaataataatgcgccatatcaatttgttgatattaaaacactagtatatccaggttttgctactgatttgcaacagcctattacaccattattatttatggcaaatggtccttcgtttgtaactgatacgatttatccggagcgttttaaacatgttgaagaattaaagcgcatgggtgcaaatattgaagttgacgaaggcacagcaacgataaaaccatcaacattacatggtgctgaagtttatgctagcgatttaagagcaggagcttgtttaattattgctggtttaattgctgagggtgtaactacaatttacaacgttaaacatatttatagaggttatacagatattgtagaacatttaaaagctttaggtgcagatatttggacggaaactgtatag

SEQ ID NO: 8277 - DNA, 1428 bp, Staphylococcus aureus
  CDS (1)...(1428)
atgagagactacacaaagcaatacattaatggcgaatgggtagaaagtaatagtaatgaaacgatagaagttataaatccagcaaccgaagaagtaatcgggaaagttgctaaaggtaataaagctgatgttgataaagccgtcgaggcggcagacaatgtttatttagagttccgtcatacatctgtgaaagaaagacaagcattattagataaaattgtaaaagaatatgaaaacagaaaagacgatattgtacaagctattacggatgagttaggtgctcctttatcattatctgagcgtgtccattatcaaatgggactaaaccattttgttgcagcgagagacgcattagataactacgaatttgaagaacgccgcggagatgatttagttgttaaagaagctatcggtgtatctggcttaattacaccgtggaacttccctacaaaccaaacatcattaaaattagcagcagcatttgcggctggtagtccagttgtacttaaaccatctgaagaaacaccatttgcagctgttattttagctgagatttttgataaagtcggtgttcctaaaggtgtatttaaccttgttaatggtgatggtgctggcgttgggaatcctttatctgaacatcctaaagtacgcatgatgtcatttacaggatcaggccctactggttctaaaattatggaaaaagctgctaaagactttaaaaaggtatcattagagcttggtggcaaatcaccatacatcgtcctagatgacgtagatattaaagaagcggctaaagcaacaacaggcaaagttgttaataatactggtcaagtatgtacagctggtacacgtgttttagtgcctaacaaaattaaagatgcattcttagctgaattaaaagaacaatttagccaagtgcgtgtcggtaatccaagagaagatggtacacaagtaggccctatcattagtaaaaaacaatttgatcaagtacaaaattatattaataaaggtattgaagaaggtgctgaattattttatggtggtcctggtaaaccagaaggacttgaaaaaggatactttgcacgtccgacaatttttattaatgtagataatcaaatgacgatagcacaagaagaaatttttgggccagtaatgtcagttatcacttataacgatttagatgaagcgattcaaattgcaaatgatacaaaatatggtttggcaggatatgttattggtaaggacaaagaaacattgcataaagtagctcgttctattgaagcaggtacagtagaaataaacgaagcaggtagaaagccagacttaccatttggtggctataaacaatctggtttaggtcgtgaatggggcgattatggtattgaagagttcttagaagtgaaatctatagctggctattttaaataa

SEQ ID NO: 8278 - DNA, 1335 bp, Staphylococcus aureus
  CDS (1)...(1335)
atgggtgtaaactatatgcctgaaagagaacgtacatctcctcagtatgaatcattccacgaattgtacaagaactatactaccaaggaactcactcaaaaagctaaaactcttaagttgacgaactatagtaaattaaataaaaaagaacttgttctagctattatggaagcacaaatggaaaaagatggtaactattatatggaaggtatcttagatgatatacaaccagatggttatggttttttaagaacagtgaactattctaaaggggaaaaagatatttatatatctgctagccaaattcgtcgttttgaaattaaacgtggggataaagtaactgggaaagttagaaaacctaaagataacgaaaaatattatggcttattacaagttgactttgttaatgaccataacgcagaagaagtgaagaaacgtccgcatttccaagctttgacaccactttatccagatgagcgtattaaattagagacagaaacacaaaattattcaacgcgcatcatggatttagtaacaccgattggtttaggtcaacgtggtttaatagtggcgccacctaaagcaggtaaaacatcgttattaaaagagatagcgaatgcaatcagtacgaacaaaccagatgcaaagctatttattttgttagttggcgagcgtcctgaagaggtaacagatttagaacgctcagtagaagctgctgaagtcgttcattcaacgtttgacgaaccaccagaacaccatgttaaagtagctgaattattacttgaacgtgcaaagcgtttagtagaaattggggaagatgtcattattttaatggattctataacgagattagcacgcgcttataacttagttattccaccaagtggtcgtacattatcaggtggtttagatcctgcatctttacacaaaccaaaagcattcttcggtgcagcgagaaatattgaagcgggtggaagtttaacaatacttgcaactgcattagttgatacgggttcacgtatggacgatatgatttacgaagagtttaaaggaacaggtaacatggagttacatttagatcgtaaattgtctgaacgtcgtatcttccctgcaattgatattggcagaagttcaacgcgtaaagaagaattgttgataagtaaatctgaattagacacattatggcaattaagaaatctattcactgactcaacagactttactgaaagatttattcgcaaacttaaaaagtctaagaataatgaagatttcttcaagcagctacaaaagtctgcagaagaaagtactaaaacgggtcgacctataattcaatga

SEQ ID NO: 8279 - DNA, 255 bp, Staphylococcus aureus
  CDS (1)...(255)
atgaaacaaggaattcatcctgagtatcaccaagtaatctttttagatactactacaaacttcaaattcttaagcggttctacaaaaacatcttcagaaatgatggagtgggaagatggaaaagaatacccagttattcgtttagatatttcatctgattcacatccattctacactggacgtcaaaaattcgctgctgcggatggacgtgtggaacgtttcaacaaaaagtttggtcttaaatcaaacaactaa

SEQ ID NO: 8280 - DNA, 933 bp, Staphylococcus aureus
  CDS (1)...(933)
atgctagaaagtaaatggggcttgagatttattgcctttcttttggcattgtttttctttttatctgttaacaatgtttttggaaatatctttaacactggtaatcttggtcaaaagtctagtaaaacgattcaagatgtacccgttgaaattctttataacactaaagatttgcatttaacaaaagcgcctgaaacagttaatgtgactatttcaggaccacaatcaaagataataaaaattgaaaatccagaagatttaagagtagtgattgatttatcaaatgcgaaagctggaaaatatcaagagaagtatcaagttaaagggttagctgatgacattcattattctgtaaaacctaaattagcaaatattacgcttgaaaacaaagtaactaaaaagatgacagttcaacctgatgtaagtcagagtgatattgatccactttttaaaattacaaagcaagaagtttcaccacaaacagttaaagtaacaggtggagaagaacaattgaatgatattgcttatttaaaagccacttttaaaactaataaaaagattaatggtgacacaaaagatgtcgcagaagtaacggcttttgataaaaaactgaataaattaaatgtatcgattcaacctaatgaagtgaatttacaagttaaagtagagccttttagcaaaaaggttaaagtaaatgttaaacagaaaggtagtttagcagatgataaagaattaagttcgattgacttagaagataaagaaattgaaatctttggtagtcgagatgacttgcaaaatataagcgaagttgatgcagaagtagatttagatggtatttcagaatcaactgagaagactgtaaaaatcaacttaccagaacatgtcactaaagcacaaccaagtgaaacgaaggcttatataaatgtaaaataa

SEQ ID NO: 8281 - DNA, 612 bp, Staphylococcus aureus
  CDS (1)...(612)
gtggaactctcaatgtatgacacttaccattccggttggatagaatgtattacaggtagtatgtttagcggtaaatccgaagaacttataagacgtttaagaaggggcatatacgctaaacaaaaagtcgttgtatttaaaccggcgattgatgatcgatatcataaagaaaaagtggtctctcataatggtaatgccattgaagcgattaatatttctaaagcaagtgaaattatgacacacgacttaactaatgttgatgttataggaatagacgaagtgcaattttttgacgatgaaattgtaagtatagtagaaaaactatcagcagatggacaccgtgttattgttgctggattagatatggattttaggggcgaaccgttcgaaccaatgcctaaattgatggctgtcagtgaacaagtaacgaaacttcaagcagtttgtgctgtttgtggttcttcatctagtagaacgcaacgattaataaatggtaaaccagctaaaatcgatgatccgattatcttagtaggtgccaatgaaagttatgagccacgttgtcgcgcgcaccatatcgtagcacctagtgataataataaggaggaattataa

SEQ ID NO: 8282 - DNA, 1077 bp, Staphylococcus aureus
  CDS (1)...(1077)
gtgtttgatcaattagatattgtagaagaaagatacgaacagttaaatgaactgttaagtgacccagatgttgtaaatgattcagataaattacgtaaatattctaaagagcaagctgatttacaaaaaactgtagatgtttatcgtaactataaagctaaaaaagaagaattagctgatattgaagaaatgttaagtgaaactgatgataaagaagaagtagaaatgttaaaagaggaaagtagcggtattaaagctgaacttccaaatcttgaagaagagcttaaaatattattgattcctaaagatcctaatgatgacaaagacgttattgtagaaataagagcagcagctggtggtgatgaggctgcgatttttgctggtgatttaatgcgtatgtattcaaagtatgctgaatcacaaggattcaaaactgaaatagtagaagcgtctgaaagtgaccatggtggttacaaagaaattagtttctcagtttctggtaatggtgcgtatagtaaattgaaatttgaaaatggtgcgcaccgcgttcaacgtgtgcctgaaacagaatcaggtggacgtattcatacttcaacagctacagtggcagttttaccagaagttgaagatgtagaaattgaaattagaaatgaagatttaaaaatcgacacgtatcgttcaagtggtgcaggtggtcagcacgtaaacacaactgactctgcagtacgtattacccatttaccaactggtgtcattgcaacatcttctgagaagtctcaaattcaaaaccgtgaaaaagcaatgaaagtgttgaaagcacgtttatacgatatgaaagttcaagaagaacaacaaaagtatgcgtcacaacgtaaatcagcagtcggtactggtgatcgttcagaacgtattcgaacttataattatccacaaagccgtgtaacagaccaccgtataggtctaacgcttcaaaaattagggcaaattatggaaggccatttagaagaaattatagatgcactgactttatcagagcagacagataaattgaaagaacttaataatggtgaattataa

SEQ ID NO: 8283 - DNA, 1239 bp, Staphylococcus aureus
  CDS (1)...(1239)
atgtcttatatcaccaagcaagataaagttatcgcagaagcaatcgagagagaatttcagagacaaaatagcaacatagagttaatcgcatcggaaaattttgtatcggaagcggttatggaagcacaaggttcagtgttgactaataagtatgctgaaggctatccaggacgccgatattatggtggctgtgagtttgtagatgtaactgaaagcatcgcaattgatcgtgctaaagcattgtttggagctgaacatgtcaatgttcaaccacattcaggttcacaagcgaacatggctgtttacttagttgcattagaaatgggcgacacagttttaggtatgaatttgagtcatggtggtcacttgacacatggagcgcctgttaattttagtggtaaattctacaatttcgttgaatatggagtagataaagacacagaacgaatcaattatgatgaagttcgtaaattagcgttagagcataagcctaagcttattgtggcaggagcatcagcatattcaagaacaattgacttcaaaaagtttaaagaaatcgcagatgaagtaaacgctaagttaatggtagacatggcacatattgcaggattagtagcggcaggtttacatccaaatccagtagaatatgctgattttgtaacaactactacacacaaaacattacgcggaccacgtggtggtatgattttatgtaaggaagaatataaaaaagacatagataaaacaattttccctggtattcaaggtggacctcttgagcatgttattgcagcaaaagcagttgcttttggagaagcgttagaaaataatttcaaaacgtatcaacaacaagtggttaaaaacgcaaaagttcttgcagaagcattaattaatgaaggatttagaattgtttctggcggtacagataatcacttagtagctgttgatgtaaaagggtctataggacttactggtaaagaagctgaagagactttagattcagttggtatcacatgtaacaaaaataccattccgttcgatcaagaaaaaccttttgtaacgagtggtatacgtttaggtacacctgctgcaacaacgcgtggatttgatgaaaaagcttttgaggaagttgcaaaaatcatcagtttagcattgaaaaatagtaaagatgaagaaaaattacaacaagctaaagaacgcgttgcgaaattaacagctgaatatcctctatatcaataa

SEQ ID NO: 8284 - DNA, 630 bp, Staphylococcus aureus
  CDS (1)...(630)
atgagtaaagtacacgttttcgatcatccattaattcaacacaaactaagctatattagagatgtaaatacaggtactaaagaatttagagaacttgtagacgaagttggtatgttgatggcatatgaagtaactagagacttagagcttcaggatgttgatattgaaacgcctgtaactaaaatgacggctaaacgattagctggtaaaaaattagctatcgttccaattttaagagctggtttaggtatgactgatggtattttaagtttagtacctgcagcaagagttggacatatcggtttgtatcgagatcccgaaacattaaaggctgtagagtattttgctaagctacctcaagatattactgaaagacaaatcattgttgttgatcctatgttagcaacaggcgcatcagcaattgaagctattacttcattgaagaaacgtggcgctaaaaatattcgcttcatgtgtttaattgcagcaccagaaggcgtagaaaagatgcatgaagcacatccagatgtagatatttatattgctgcacttgatgaaaagctaaatgacaaagcatatatcacaccagggttaggcgacgctggagatagattgtttggtactaaatag

SEQ ID NO: 8285 - DNA, 1128 bp, Staphylococcus aureus
  CDS (1)...(1128)
atgaaaaagattatgaccatatttggaacaaggcccgaagccataaagatggctcctttagttaaagctttggaacaagaaaaaatgctcgagccaattgttgttgttacagcacagcatagagaaatgcttgattcagtattaagtacctttgaaatcaaaccaaaatacgatttgaatattatgaaatcaggacagacactttctgagataacttctaaatcaatcactcaattagaacaagtgattcaattagaaaaaccagacatggtacttgtacatggtgatacgatgacgacatttgcaggtggtttaacggcattttataaccaagtgccgattggacacgttgaagcagggcttagaagttatgataaatattcaccttttccggaagaggtgaatagacaattagttggtgtattagctgacttacattttgcacctactaaaaatgctgcatcgcatttgttaagtgaagggaaatattcagaaagtgttgttgtcactggtaatacagcgattgatgctatgaaatatacagttgatgacaattataaatctaacattatggataaataccatgacaaaaaattcattcttatgacagcacaccgacgagaaaatatcgggcaacccatggaaaatatatttaaagcggttagacgcttaatagatgaatatactgatttagcactagtatatccaatgcataaaaacccgaaagttcgagaggtggctcaaaagattttaggtagtcatgacagaattgaattgattgaacctttggacgtagtagatttccataattttgctaaaaaatcttattttattttgacagattcaggtggaattcaggaagaagcgccatcatttaataagccagttttagttttgcgaagcgttacagaacgtcctgaaagtgttgaagctggcacattaaaagtcattggaccaaataagcaaaatgtgtatcaagctgcaaaagaattaatcgatgatgagagattatatcatcaaatgtctgaagcatctaatccttacggtgatggatttgcttcagaaagaatagttaatcatattaagtattatttgaatttaatcactgaaaaaccaagcgatttctga

SEQ ID NO: 8286 - DNA, 1356 bp, Staphylococcus aureus
  CDS (1)...(1356)
atgggaaaatattttggtacagacggagtaagaggtgtcgcaaaccaagaactaacacctgaattggcatttaaattaggaagatacggtggctatgttctagcacataataaaggtgaaaaacacccacgtgtacttgtaggtcgcgatactagagtttcaggtgaaatgttagaatcagcattaatagctggtttgatttcaattggtgcagaagtgatgcgattaggtattatttcaacaccaggtgttgcatatttaacacgcgatatgggtgcagagttaggtgtaatgatttcagcttctcataatccagttgcagataatggtattaaattctttggatcagatggttttaaactatcagatgaacaagaaaatgaaattgaagcattattggatcaagaaaacccagaattaccaagaccagttggcaatgatattgtacattattcagattactttgaaggggcacaaaaatatttgagctatttaaaatcaacagtagatgttaactttgaaggtttgaaaattgttttagatggtgcaaatggttcaacatcatcactagcgccattcttatttggtgatttagaagcagatactgaaacaattggatgtagtcctgatggatataatatcaatgagaaatgtggctctacacatcctgaaaaattagctgaaaaagtagttgaaactgaaagtgattttgggttagcatttgacggcgatggagacagaattatagcagtagatgagaatggtcaaatcgttgacggtgaccaaattatgtttattattggtcaagaaatgcataaaaatcaagaattgaataatgacatgattgtttctactgttatgagtaatttaggtttttacaaagcacttgaacaagaaggaattaaatctaataaaactaaagttggcgacagatatgtagtagaagaaatgcgtcgcggtaattataacttaggtggagaacaatctgggcatatcgttatgatggattacaatacaactggtgatggtttattaactggtattcaattagcttctgtaataaaaatgactggtaaatcactaagtgaattagctggacaaatgaaaaaatatccacaatcattaattaacgtacgtgtaacagataaatatcgtgttgaagaaaatgttgacgttaaagaagttatgactaaagtagaagttgaaatgaatggagaaggtcgaattttagtaagaccttctggaacagaaccattagttcgtgtcatggttgaagcagcaactgatgaagatgctgaaagatttgcacaacaaatagctgatgtggttcaagataaaatgggactagataaataa

SEQ ID NO: 8287 - DNA, 729 bp, Staphylococcus aureus
  CDS (1)...(729)
atggatcacaaatccccgctcgtgagttggaatttattcggttttgatatcgttttcaatttatcaagtatattgatgatacttgttacggcgtttcttgtttttctacttgctatcatttgtacgcgtaatttgaaaaaaagaccaactggcaaacaaaatttcgttgaatggatttttgatttcgtgaggggaatcattgaaggtaacatggcttggaaaaaaggtggtcaattccacttcttagcagtaacgctgattctgtacatttttatagctaatatgttaggtcttccgttttctatagtaacgaaagatcacacattgtggtggaaatcaccaacagctgatgcaacagtgactttaacgttgtctacaacgataatactgttaactcacttttatggaattaaaatgcgtggtacgaaacaatatcttaaaggttatgtacagccgttttggccattggcaattattaatgtttttgaagagttcacttcaacattaacgcttggtctgcgtttgtacggtaacatatttgcaggtgagatactattaacattacttgctggcttattctttaacgaaccagcatggggttggattattagtatcccaggattaattgtttggcaagcattttcaatatttgtaggaacaatccaagcatatatctttattatgctttcgatggtttatatgtcacataaagtggcagatgaacactaa

SEQ ID NO: 8288 - DNA, 522 bp, Staphylococcus aureus
  CDS (1)...(522)
gtgactgaaacagctaacttattcgttcttggtgcagctggaggcgttgagtggggtactgtgattgtacaggtcctaactttcatcgtgttacttgcgttacttaaaaagttcgcatggggtccattgaaagatgtaatggataaacgtgaaagagatattaacagagatatcgatgacgcagaacaagctaagttaaatgcacagaaacttgaagaagaaaataaacaaaaacttaaagaaacacaagaagaagttcaaaagattttagaagatgctaaggttcaagcacgtcaacagcaagaacaaattattcatgaagcaaacgtacgtgcaaacggtatgattgaaacagcacaaagtgaaatcaatagccaaaaagaacgtgccattgcagatattaataatcaagtatctgaactatcagtgttaattgcttctaaagttcttagaaaagaaatttctgaacaagaccaaaaagcattggttgacaagtatctaaaagaggcaggcgataaataa

SEQ ID NO: 8289 - DNA, 1509 bp, Staphylococcus aureus
  CDS (1)...(1509)
atggccataaaagctgaagaaatcagtgcattacttcgctcacaaattgaaaattatgagtcagaaatgtccgtaactgatgtaggtactgtattacaaattggtgatggtattgcattaattcacggattaaatgacgttatggctggtgagctagtagaattccataacggcgtacttggtttagcccaaaaccttgaagagtcaaacgtgggtgtggttattttaggaccatacacaggtattactgaaggtgacgaagttaaacgtactggtcgtatcatggaagtaccagtaggtgaagaactaatcggaagagttgttaatccattaggacaacctattgatggacaaggaccgattaacacaactaaaacacgtccagtagagaaaaaagctactggtgtaatggatcgtaaatcagtagatgagccattacaaacaggtatcaaagcaattgatgctttagtaccaattggtagaggtcaacgtgagttgatcatcggtgaccgtcaaacaggtaaaacaacaattgcaattgacacaattttgaaccaaaaagatcaaggtacgatttgtatctatgttgctattggtcaaaaagattcaacagtaagagcaaatgttgaaaagttaagacaagcaggcgctttagactacactattgttgtagcagcatcagcttctgaaccttctccattattatatattgcaccatattcaggtgtaacaatgggtgaagaattcatgtttaacggtaaacatgttttaatcgtttatgatgatttaactaaacaagcagcagcttatcgtgagttatcattattattacgtagacctccaggtcgtgaagcatacccaggtgacgtattctacttacatagtagattattagaaagagcagcaaaattaaacgatgacttaggtggcggttcaattactgcattaccaattatcgaaacacaagctggtgatatttcagcttatgtaccaacaaacgttatttcaattacagatggacaaatcttcttacaatctgatttattcttctcaggtgtaagaccagcgattaatgccggacaatctgtatctcgtgttggtggatctgcacaaattaaagcaatgaagaaagttgctggtacgttacgtcttgacttagcgtcatacagagaacttgaatcatttgcacaattcggttcagaccttgatgaatttactgcaagtaaattagaacgtggtaaacgtactgttgaagtcttaaaacaagatcaaaacaaaccattaccagttgaacaccaagtgttgattatttatgcattaacaaaaggatatttagatgatattccagttgtagatatcacacgttttgaagacgagttaaaccactgggcagaatcaaatgctactgaactgttaaatgaaatcagagaaactggtggcttaccagatgctgagaagtttgacacagcaattaacgaattcaaaaaaagctttagcaaatctgaataa

SEQ ID NO: 8290 - DNA, 1266 bp, Staphylococcus aureus
  CDS (1)...(1266)
atggataaaatagtaatcaaaggtggaaataaattaacgggtgaagttaaagtagaaggtgctaaaaatgcagtattaccaatattgacagcatctttattagcttctgataaaccgagtaaattagttaatgttccagctttaagtgatgtagaaacaataaataatgtattaacaaccttaaatgctgacgttacatacaaaaaggacgaaaacgctgttgtcgttgatgcaacaaagactctaaatgaagaggcaccatatgaatatgttagtaaaatgcgtgcaagtattttagttatgggacctcttttagcaagactaggacatgctattgttgcattgcctggtggttgtgcaattggaagtagaccgattgagcaacacattaaaggttttgaagctttaggcgcagaaattcatcttgaaaatggtaatatttatgctaatgctaaagatggattaaaaggtacatcaattcatttagattttccaagtgtaggagcaacacaaaatattattatggcagcatcattagctaagggtaagactttaattgaaaatgcagctaaagaacctgaaattgtcgatttagcaaactacattaatgaaatgggcggtagaattactggtgctggtacagacacaattacaatcaatggtgtagaatcattacatggtgtagaacatgctatcattccagatagaattgaagcaggcacattactaatcgctggtgccattactcgtggcgatatttttgtacgtggtgcaatcaaagaacatatggctagtttagtgtataaattagaagaaatgggcgttgaattggactatcaagaagacggcattcgtgtaagagctgaaggagatttacagcctgttgacatcaaaacattaccgcatcctggtttcccaaccgatatgcagtcacaaatgatggcattattattaacagcaaacggacataaagtagtaactgaaactgtatttgaaaatcgttttatgcatgttgcagagttcaaacgtatgaacgcgaacatcaatgttgaaggtcgcagtgcaaaacttgaaggcaaaagtcaattgcaaggtgcgcaagttaaagcgactgatttaagagcagcagcagccttaattttagctggattagttgctgatggtaaaacaagtgtcactgaattgaatcatttagatagaggatatgttgacttacatggcaaattgaagcaattaggtgcagacattgaacgtattaacgattaa

SEQ ID NO: 8291 - DNA, 7107 bp, Staphylococcus aureus
  CDS (1)...(7107)
atgaatttattcagacaacaaaaatttagtatcagaaaatttaatgtcggtattttttcagctttaattgccactgttacttttatatctactaacccgacaacagcgtctgcagcagagcaaaatcagcctgcacaaaatcaaccagcacaaccagctgatgccaatacacagcctaacgcaaatgctggtgctcaagctaatcctacagcacagccagctacacctgccaaccaaggacaaccagcagcacaaccagcaaaccaaggtggacaggctaatccagcaggaggagcagcacaaccaaatacacaaccagctggacaaggtaatcaagctgatccgaataacgctgcacaagcacaacctggaaatcaagcagcaccggcaaaccaagcaggtcaaggaaataaccaagcaacacctaataataatgcaacaccggcaaatcaaacacagccagcgaatgctccagcagcagcgcaaccagcagcaaacgcacaaactcaagatccaaatgctagcaatactggtgaaggcagtattaatacgacattaacgtttgatgatcctgccatatcaacagatgagaatagacaggatccaactgtaactgttacagataaagtaaacggttattcattaattaacaacggtaagattggtttcgttaactcagaattaagacgaagcgatatgtttgataagaataaccctcaaaactatcaagctaggggaaatgtagctgcattaggtcgtgtgaatgcaaatgattctacagatcatggtaactttaacggtatttcaaaaactgttaatgtaaaaccagattcagaattaattatcaactttactactatgcaaacgaatagtaagcaaggtgcaacaaatttagttattaaagatgctaagaaaaatactgaattagcaactgtaaatgtagctaagactggtactgcacacttatttaaagtaccaacagatgctgatcgtttagatttacaatttattcctgacaatacagcagttgctgatgcttcaagaattacaacaaataaagatggttataaatactattcattcattgataatgtaggtctattctcaggatcacatttatatgtcaaaaatagagatttagcaccgaaagcaacaaataataaagaatttacaattaatactgaaatcggtaacaatggtaactttggtgcttcattaaaagcagatcaatttaaatatgaagtaacattaccacaaggtgtaacttatgttaataattcattaactacaacattccctaatggtaatgaagacagtacagtattgaaaaatatgactgttaattatgatcaaaatgcaaataaagttacatttacaagccaaggtgtgacaacggcacgtggtacacacactaaagaagttttattcccagataaatctttaaaattatcatataaagttaatgttgcgaatatcgatacacctaaaaatattgattttaatgaaaaattaacatatcgtactgcttcagatattgtaattaataatgcgcaaccagaagttacactaactgcagatccattttcagtagcagttgaaatgaacaaagatgcgttgcaacaacaagtaaactcacaagttgataatagtcattacacaacagcatcaattgcagaatacaataaacttaaacaacaagcagacaatattttaaatgaagatgcgaatcatgttgaaactgcaaatcgtgcatctcaagcggctattgatggtttagtaactaaattacaagctgcattaattgataatcaagcagcaattgctgaattagatgctaaagctcaagaaaaggttacagcagcacaacaaagtaaaaaagttacgcaagatgaagttgcagcgcttgtgactaaaattaacaatgataaaaataatgcaatcgcagaaattaataaacaaacaacagcacaaggtgttacaactgaaaaagataacggtatcgcagtgttagatcaagatgtgattacaccaacagttaaacctcaagcgaaacaagatattatccaagcagttacaactcgtaaacaacaaattaaaaagtcaaatgcatcattacaagatgaaaaagatgtagcaaatgataaaattggtaaaattgaaacaaaggcaattaaagatattgatgcagcaacaacaaatgcacaagtagaagccattaaaacaaaagcgatcaatgatattaatcaaactgcacctgctacaacagctaaagcagcagctcttgaagaatttgacgaagttgttcaagcacaaattgatcaagcacctttaaatcctgatacaacaaatgaagaagtagcggaagctattgaacgtattaatgcagctaaagtttctggtgttaaagcaattgaagcgacaacgactgcacaagatttagaaagagttaaaaacgaagaaatctcaaaaattgaaaatattactgactctactcaaacaaaaatggatgcctataatgaagttaaacaagcagcaacagctagaaaaactcaaaatgctacagtttcaaatgcaactaatgaagaagtagcagaagctgatgcagcagtagaagcagctcaaaagcaaggtttacatgacatccaagttgttaaatcaaaacaggaagttgctgatacaaaatcaaaagtattagataaaatcaatgcaattcaaacacaagcaaaagttaaacctgcagctgatacggaagtagaaaacgcatataatacacgtaaacaagaaattcaaaatagcaatgcttcaactacagaagaaaaacaagctgcatatacagaattagatactaaaaagcaagaagcaagaacaaatcttgatgctgcaaatacaaacagtgatgtaacaacagctaaagacaatggtattgctgcaattaatcaagtacaagcggcaacaactaagaaatcggatgctaaagcggaaatcgctcaaaaagcaagtgaacgtaaaactgcaattgaagcaatgaatgattcgactactgaagaacaacaagctgcaaaagataaagttgatcaagcagtagttactgcaaacgctgatatagataatgctgcagcaaatactgatgtagataatgcaaaaactactaatgaagctacaatcgcagccattacacctgatgcaaatgttaaaccaacagcgaaacaagcaattgctgataaagtacaagcgcaagaaacagcaattgatgctaataacggtgcaacaacagaagaaaaagcagctgcgaaacaacaagttcaaactgaaaaaacaacagctgatacagcaattgatggtgcacatacaaatgcagaagttgaagcggctaaaaatgcagaaattgctaaaattgaagcaattcagccagcaacaacaactaaagataatgcgaaacaagcaattgctacgaaagcgaatgaacgtaaaacagcaatcgctcaaacgcaagacattactgctgaagaaattgcagcggcaaatgcgaatgtagataatgctgtgacacaagcaaataacaacattgaagctgctaatagtcaaaatgatgtagaccaagcgaaaacaactggtgaagctagtattgatcaagtaacaccaacagttaataaaaaagcaacagcagttacagacgcgaaaaataatattacagctgcaactgatgataatggtgtagatacagcgaaagatgcaggtaaaaattcgattcaaagtacacaaccagcaacagcggttaaatcaaatgctaaaaatgatgttgatcaagctgtgacaactcaaaatcaagcaattgataatacaactggtgctacaactgaagaaaaaaatgcagcaaaagatttagttttaaaagctaaagaaaaagcgtatcaagatatcttaaatgcacaaacaactaacgatgttacgcaaattaaagatcaagcagttgctgatgttcaaggtattactgcagatacaacaattaaagatgttgcgaaagatgaattagcaacaaaagcaagggaacaaaaagcacttattgcacaaactgcagatgcgactactgaagaaaaagaacaagcaaatcaacaagtagatgcagaattaacgcaaggtaatcaaaatattgaaaatgcacagtcaatcgatgatgtaaacactgcaaaagataatgcaattcaagcaattgacccaattcaagcatcaacagatgttaaaacgaatgcaagagcggaattgctaactgaaatgcaaaataaaataactgaaatacttaataataatgagactactaatgaagaaaaaggtaacgatattggaccagttagagctgcatatgaagaaggtttaaataatattaatgcagcaactactacaggtgatgtaactactgctaaagatacagcagtacaaaaagttcaacaacttcatgcaaatcctgttaagaagccagcaggtaaaactgctttagatcaagctgcagctgataagaaaacacaaatagaacaaacaccaaatgcgtcacaacaagaaattaacgatgcaaaacaagaagttgatactgaattaaatcaagcgaaaacaaatattgaccaatcttcaacagatgaatatgttgataatgcagttaaagaaggaaaagctaaaattaatgcagttaaaacatttagtgagtacaaaaaagatgctttagctaagattgaagctgcatataatgctaaagtaaccgaagcggataactctaacgcatcgacttcaagtgaaattgcagaagcgaaacaaaaacttgctgaattgaaacaaacggcggatcaaaatgtcaatcaagctacttctaaagatgacattgaagttcaaattcataatgacttagataatattaacgattacacaattccaacaggtaaaaaagaatcagctacaacagatttatatgcctatgcagatcagaagaaaaataatatttcagctgacactaatgcaacacaagatgaaaagcaacaagcaattaagcaagttgaccaaaatgttcaaactgcattagaaagcattaataatggtgtggataatggtgacgttgatgatgcattaacacaaggtaaagcagcaattgatgctattcaagtagatgctactgttaaacctaaagcgaaccaagtgattgatgctaaagcagaggaaacgaaagaatctattgatcaaagtgaccagttaactgctgaagaaaaaactgaagcattagcaatgattaaacaaattacagatcaagctaaacaaggtattactgatgcaacaacaactgctgaagttgaaaaagcgaaagctcaaggacttgaggcatttgataacattcaaattgactcaacagaaaaacaaaaagctatcgaagaattagaaactgcactagaccagattgaagcaggtgtaaatgtcgacgctgatgctacaactgaagaaaaagaagcgtttacgaatgctttagaagacattttatcaaaagcaactgaagatatttctgatcaaactacaaatgcagaaatcgctactgtcaaaaatagtgcgcttgaacaacttaaagcacaacgtattaatccagtagttaagaaaaatgctttggaagcaattagagaagtggttaacaagcaaatagaaataattaaaaatgcagatgcagatgcatcggcgaaagaaattgcacgtacagatttaggtagatattttgacagatttgctgataaattagataaaacacaaacaaatacagaagttgctgaattacaaaatgtaacgatacctgcaattgaagcgattgtgcctcagaatgatccaaatgctaatgatactaatagtggttcagataataatgatgcaacagcaaattcaaatgctaatgcaacaccagaaaatactggacaacctaatgtaactgagtcaacagataatgccaatgcagatacgtcttcaacaacgacaaataatcagaatgatgcggcaacaggtgaaacaacagcaacatcagcaaacagttcagcaactgatgatgcaaatgataaaccgcaagctaataacaattctagtgcagatacatcaacaaacagtccgacaatggataatgatgtaactagcaaaccagaagtagaatcaactaataacggcacaactgataaacctgcaacagaagcagataatgcaacgccagcagaaagcgcaacaaataacaatagtacaactacagcaacaaacgagaatgcaccaacagaatcaacagcaacggctccaacaactgcgagcacaggtgcagaatcatctgctgatagcaaagataatgcatctgtaaatgattcaaaacaaaatgctgaagtaaataatagtgctgaatctcaatcaactaatggcaaggttgcacaaccaaaatctgaaaataaagctaaggcagaaaaagatggtagagattcaacaaatcaaagtatggttgaatcaacaactgaaacattgccttcagcagacataacagaaccaaaagtatcttctaatacatcaaaagataaagaagaaagtacgacaagtcaaacagatgctgagcaacacaattctgatacaaacgttgcatctaacgaagcagataaatctgaaggcaacgttgatactgatgtatcgaataaaccatcaacatctaaaccgtcagaagcaaaagataaagcgacttcgactgaggatagtcaaaaagctgacatggcaacagcagatacaaaagataatcaagcatcaattggtgcaactgcagatgtaaacaataaagctacgcaaaacgacggtgccaatgcatctccagctacagtttcaaaaggaagcaatagtgctaatcaagatatgcttaatgtaactaagactaaagaaaacaaagcaaatgcaaaatcagcccaacaaggaaaagttaataagcctaaacaacaagctaaaactttaccagatactggtatgtcacataatgacgatttaccatatgctgaattagctctaggtgcaggtatggcattcttaattagaagattcactaagaaagaccaacaaactgaagaataa

SEQ ID NO: 8292 - DNA, 441 bp, Staphylococcus aureus
  CDS (1)...(441)
atggaaacaatttttgattataaccaaattaaacaaattatacctcacagacagccatttttattaattgataaagtagttgaatatgaagaaggtcaacgttgtgtagctattaaacaagtatcaggaaacgaaccgttctttcaaggacattttcctgagtatgcggtaatgccaggcgtattaattacagaagcgttagctcaaacaggtgcggtagctattttaaatagtgaagaaaataaaggtaaaatcgctttatttgctggtattgataaatgtcgttttaaacgtcaagtagtacctggtgatactttaacgttggaagtagaaatcactaaaattaaaggaccaatcggtaaaggtaatgctaaagctactgtcgatggtcaacttgcttgtagttgtgaacttacatttgcaattcaagatgtaaaataa

SEQ ID NO: 8293 - DNA, 690 bp, Staphylococcus aureus
  CDS (1)...(690)
atggaattttcacaaaaattgtaccaagctgcaaagccaatcattaatgatatttatgaggatgactttattcaaaaaatgttattaggcaatatacaagctgatgcattacgtcactatttacaagctgatgcagcttatttaaaagaatttacaaacttatatgctttgttaattccaaaaatgaatagcatgaatgacgtaaaatttttagtagagcaaatagaatttatggttgaaggtgaagtacttgcgcatgatattttagcgcaaattgttggtgaatcatacgaagaaatcattaaaacaaaagtttggcctccaagtggcgaccattacataaaacatatgtatttccaagcgcatagtcgtgaaaatgctatttatacaattgctgcaatggcaccttgtccatatatttatgcagaattagctaagcgctctcaaagtgatcataagcttaatagagaaaaagatacggcaaaatggtttgatttttatagtactgaaatggatgacataattaacgtatttgaggcattaatgaataaattagccgaatcaatgtctgacaaggaattggaacaagtgaagcaagtatttttagaaagttgcatacatgagcgtcgatttttcaatatggctatgacactagaacaatgggaatttggagggaaagtaaatgattaa

SEQ ID NO: 8294 - DNA, 690 bp, Staphylococcus aureus
  CDS (1)...(690)
atgaaacaacctatcaacaacggatttgcattcaagaggtggaataatatgtttaaccaatcgtatctaaatgtgtattttatttgtgggacctccgatgttccgagtcatcgaactattcatgaagtattagaagcagcattaaaggcagggattacacttttccaatttcgagaaaagggtgaatcagctttaaaaggaaacgataaacttgtattagctaaagaattacagcatctctgtcatcaatatgatgtgccttttatcgttaatgatgatgtatccttagcaaaagaaattaacgcggatggtatacatgtcggtcaagatgatgcgaaagtcaaagagatagcacaatatttcactgataaaattattggactaagtattagtgatttaggtgagtatgcaaaatctgatttaactcatgttgattatataggtgttggaccaatctatcctacgccgtcaaagcatgacgcgcatacaccagtaggtccagaaatgattgcaacatttaaagaaatgaatccgcaactaccgattgtagctattggcggtataaatactagtaacgtggcgccgattgtagaagcaggtgccaatggaatttcagtcatttcagccatttctaaaagtgaaaatattgaaaagactgttaatcgattcaaagatttttttaataattag

SEQ ID NO: 8295 - DNA, 1107 bp, Staphylococcus aureus
  CDS (1)...(1107)
atgaaagcagttcactttggtgctggtaacataggtcgtggtttcattggttatattcttgcagacaacaatgttaaagtaacatttgcagatgtcaatgaagaaatcattaatgctttagctcatgatcatcaatacgatgttattttagctgatgagtctaaaacaacgacgcgcgtgaataatgttgatgcaattaattcaatgcaaccttctgaagcgttgaaacaagcaattctagaagctgatattattacaacagctgttggtgttaacatactacctattattgctaaatcttttgcgcctttcttaaaagaaaaaacaaaccatgttaatattgttgcttgtgagaatgctattatggcaactgatacattgaaaaaagcggtacttgatattactggccctcttggtcataatattcattttgctaactcagcagttgatagaattgtgccattacaaaagaatgaaaatatattagacgttatggttgagccattttacgaatgggttgttgaaaaagatgcatggtatggtccagaactaaatcatattaaatatgttgatgatttaacaccatatattgagcgtaaattattaactgtgaatacaggacatgcatatttagcgtatgctggtaaatttgcagataaagctaccgtattagacgctgtaaaagatagttcaattgaagctggcttacgccgtgttttagctgaaacaagtcaatatattactaatgaatttgattttactgaagcggaacaagctggttatgttgaaaaaataatagaccgtttcaacaattcttatttatctgatgaagtaacacgagtcggacgaggtacgttacgtaaaattggccctaaagatagaattataaaaccattaaaatatctttataataaagatttagaacgcactggtttattaaatacagctgcattgttattgaagtatgatgatacagcagaccaagaaactgttgagaaaaataattacattaaagaacacggtttaaaagcgttcttaagcgaatatgctaaagttgacgatggcttagccgatgaaataattgaagcttacaattcactttcataa

SEQ ID NO: 8296 - DNA, 357 bp, Staphylococcus aureus
  CDS (1)...(357)
gtgttgacgttgtgttttatgggatatagtatagtaaggaatgtaaatgaaggagtgaatgctatgactgaacaagataatgcacatcattctgaacaaataaaaacgaatcttaaatcacgtttaaatcgaattgaaggacaagtgagagcgattaatcgcatgattgaagaagatgtctattgtgatgatgtccttacgcaaataagagcgacacgttcggcattaaacagtgttgcgataaagttattagaacaacatatgaaaagttgtattatgaataaagttaatcaaggtgctcaggaagaggcaatggaagagttattagtgacttttcaaaaattgattaaagactaa

SEQ ID NO: 8297 - DNA, 1182 bp, Staphylococcus aureus
  CDS (1)...(1182)
gtgatactattaagattcaaagatgcgaataaatcatttaacaattggactaaatcaatattaatttatattaaggtagcaaaccctgatatatcattggaggaaaacgaaatgacaaaagaaaatatttgtatcgtttttggagggaaaagtgcagaacacgaagtatcgattctgacagcacaaaatgtattaaatgcaatagataaagacaaatatcatgttgatatcatttatattaccaatgatggtgattggagaaagcaaaataatattacaactgaaattaaatctactgatgagcttcatttagaaaatggtgaggcgcttgagatttcacagctattgaaagaaagtagttcaggacaaccatacgatgcagtattcccattattacatggtcctaatggtgaagatggcacgattcaaggactttttgaagttttggatgtaccatatgtaggaaatggtgtattgtcagctgcaagttctatggacaaacttgtaatgaaacaattatttgaacatcgagggttaccacagttaccttatattagtttcttacgttctgaatatgaaaaatatgaacataacattttaaaattagtaaatgataaattaaattacccagtctttgtaaaacctgctaacttagggtcaagtgtaggtattagtaaatgtaataatgaagcggaacttaaagaaggtattaaagaagcattccaatttgaccgtaagcttgttattgaacaaggcgttaacgcacgtgaaattgaagtagcagttttaggaaatgactatcctgaagcgacatggccaggtgaagtcgtaaaagatgtcgcgttttacgattacaaatcaaaatataaagatggtaaggttcaattacaaattccagctgacttagacgaagatgttcaattaacgcttagaaatatggcattagaggcattcaaagcgacagattgttctggtttagtccgtgctgatttctttgtaacagaagacaaccaaatatatattaatgaaacaaatgcaatgcctggatttacggctttcagtatgtatccaaaattatgggaaaatatgggcttatcttatccagaattgattacaaaacttatcgagcttgctaaagaacgtcaccaggataaacagaaaaataaatacaaaattgactaa

SEQ ID NO: 8298 - DNA, 1359 bp, Staphylococcus aureus
  CDS (1)...(1359)
atgattaatgttacattaaagcaaattcaatcatggattccttgtgaaattgaagatcaatttttaaatcaagagataaatggagtcacaattgattcacgagcaatttctaaaaatatgttatttataccatttaaaggtgaaaatgttgacggtcatcgctttgtctctaaagcattacaagatggtgctggagctgctttttatcaaagagggacacctatagatgaaaatgtaagcgggcctattatatgggttgaagacacattaacggcattacaacaattggcacaagcttacttgagacatgtaaaccctaaagtaattgccgtcacagggtctaatggtaaaacaacgactaaagatatgattgaaagtgtattgcataccgaatttaaagttaagaaaacgcaaggtaattacaataatgaaattggtttacctttaactattttggaattagataatgatactgaaatatcaatattggagatggggatgtcaggtttccatgaaattgaatttctgtcaaacctcgctcaaccagatattgcagttataactaatattggtgagtcacatatgcaagatttaggttcgcgcgaggggattgctaaagctaaatctgaaattacaataggtctaaaagataatggtacgtttatatatgatggcgatgaaccattattgaaaccgcatgttaaagaagttgaaaatgcaaaatgtattagtattggtgttgctactgataatgcattagtttgttctgttgatgatagagatactacaggtatgtcatttacgattaataataaagaacattatgatctgccaatattaggaaagcataatatgaaaaatgcgacgattgccattgcggttggtcatgaattaggtttgacatataacacaatctatcaaaatttaaaaaatgttagcttaactggtatgcgtatggagcaacacacattagaaaatgatattactgtgataaatgatgcctataatgcaagtcctacaagtatgagagcagctattgatacactgagtactttgacagggcgtcgcattctaattttaggagatgttttagaattaggtgaaaatagcaaagaaatgcatatcggtgtaggtaattatttagaagaaaagcatataggtgtgttgtatacgtttggtaatgaagcaaagtatatttatgattcgggccagcaacatgtcgaaaaagcacaacacttcaattctaaagacgatatgatagaagttttaacaaatgatttaaaagcgcatgatcgtgtattagttaaaggatcacgtggtatgaagttagaagaagtcgtaaatgctttaatttcatag

SEQ ID NO: 8299 - DNA, 1464 bp, Staphylococcus aureus
  CDS (1)...(1464)
atgggatttaaagagccgacacctatccaaaaagacagtatcccttatgcgttacaaggaattgatatccttgggcaagctcaaaccggtacaggtaaaacaggagcattcggtattcctttaattgagaaagtagtagggaaacaaggggttcaatcgttgattttagcacctacaagagaattggcaatgcaggtagctgaacaattaagagaatttagccgtggacaaggtgtccaagttgttactgtattcggtggtatgcctatcgaacgccaaattaaagccttgaaaaaaggcccacaaatcgtagtcggaacacctgggcgtgttatcgaccatttaaatcgtcgcacattaaaaacggacggaattcatactttgattttagatgaagctgatgaaatgatgaatatgggattcatcgatgatatgagatttattatggataaaattccagcagtacaacgtcaaacaatgttgttctcagctacaatgcctaaagcaatccaagctttagtacaacaatttatgaaatcaccaaaaatcattaagacaatgaataatgaaatgtctgatccacaaatcgaagaattctatacaattgttaaagaattagagaaatttgatacatttacaaatttcctagatgttcatcaacctgaattagcaatcgtattcggacgtacaaaacgtcgtgttgatgaattaacaagtgctttgatttctaaaggatataaagctgaaggcttacatggtgatattacacaagcgaaacgtttagaagtattaaagaaatttaaaaatgaccaaattaatattttagtcgctactgatgtagcagcaagaggactagatatttctggtgtgagtcatgtttataactttgatatacctcaagatactgaaagctatacacaccgtattggtcgtacgggtcgtgctggtaaagaaggtatcgcggtaacatttgtaaatccaattgaaatggattacattagacaaattgaagatgctaatggtagaaaaatgagcgcacttcgtccaccacatcgtaaagaagtacttcaagcacgtgaagatgacatcaaagaaaaagttgaaaactggatgtctaaagagtcagaatcacgcttgaaacgcatttctacagagttgttaaatgaatataacgatgttgatttagttgctgcacttttacaagagttagtagaagcgaacgatgaagttgaagttcaattaacttttgaaaaaccattatctcgcaaaggccgtaacggtaaaccaagtggttctcgtaacagaaatagtaagcgtggtaatcctaaatttgacagtaagagtaaacgttcaaaaggatactcaagtaagaagaaaagtacaaaaaaattcgaccgtaaagagaagagcagcggtggaagcagacctatgaaaggtcgcacatttgctgaccatcaaaaataa

SEQ ID NO: 8300 - DNA, 444 bp, Staphylococcus aureus
  CDS (1)...(444)
gtgtacaaaatgagcgaattatttagtaatgacaatatctttttaaatgtaaatgttaacagccaaaatgaagcaattgaaaaagcaggtaaagccttagttgatagtggtgctgtaacagatgcttatattcaagcaatgaaagatcgtgagcaagtcgtatcaacatttatgggaaatggcttagcaattcctcatggcacagatgaagctaaaacaaatgtgattcactcaggtttaacattattacaaatccctgaaggcgttgactgggatggcgaagtagttaaagttgtcgtgggaatcgctggtaaagatggcgaacatttagacttgttatctaaaattgcaattacatttagcgaagaagaaaatgtggatcgtatcgttcaagcaaaatctgcagaagaaattaaacaagtattcgaggaggcagatgcataa

SEQ ID NO: 8301 - DNA, 2037 bp, Staphylococcus aureus
  CDS (1)...(2037)
atggaaaaaatgcatcatgtaaataaatatttcaatcaaacaatggtgatagaagctttgaaaatgagtttttataagctgaatcctaaacaattaataaaaaatccgataatgtttgtcgttgaggttggaatgattttaacgttgatattaatatgttttcctgacatatttggaactagctatctatcgcgaggttatttgattacaatttttatcatattattaataactatattgtttgctaatttttcagaagcctttgctgaaggtcgtggaaaagcgcaagctgatagtttaagacaagcacaatcaaatttaactgctcgattgatagaagaaaatggtgcgtatcggatagtgaacgccacagagttaaaagccggacaaaatattcgggtagaaaatggagaaacaatccctgctgatggcgttgtaataaatggattagcaaccgttgatgaatctgcaattactggtgaatctgcacctgtgataaaagaatcaggtggcgattttgatggagtcattggcggtacacttgtaacatctgattggttagaaatacgtgttgagagtgaagcgggtacatcttttttagataaaatgattgccttagttgaaggggcggaaagaaataaaacaccaaatgaaattgcactttttacattattaacaacgttaacaattatatttttagtcgttattgtaacattatatccaatagcatcttacctgcatttaattttacctattgcgatgctcattgcgttaacagtatgtttaataccaacgacaatcggtggtttgttatcggcaattggtattgctggcatggatcgtgttactcaattcaatgtattagcgaaaagtgggcgtgctgtagaagtatgtggagatgtcgatgtaatgattttagacaagacaggcacaatcacttatggcaatcgaatcgctagtgaatttttaccagtgaatcaacaaatgtgggaaaaattgatagtcgctgcttatatgtcatcaatctacgatgatacgccagaaggaaaaagtattgtgcgattagcgaagcagatgtatataaatgagctgcctaaagacattgatggcacatataagccttttacagctgaaactagaatgagcggaatcattacaaatgaaatatcggtattcaaaggtgcacctaatagtatgataaatcttgtcaaacaacaacaaggcgatattcctcttaatattgagtctatctgtatggatgtatcgagtaaaggtggcacaccattaatagttattgaaaacaacgtcatgcttggcgtgatttatttaaaagatgtgattaaagatggtctagtagaacgatttgctgaattgagaaaaatgggcattgaaacagttatgtgtacgggcgataatgctttaacagcagctacaattgcaaaagaagcgggtgttgatagatttgttgcagagtgtaaacccgaagataaaattaaagtcatcaaagatgaacaagcgaaaggccatattgttgcgatgacaggagatggtacaaatgatgcacctgcgctagcacaagcgaatataggattagctatgaactcagggacaattagtgctaaagaggcggccaatctaattgatttagattcgaatcctacaaagttaatagaggttgtaaaaataggcaaacaattattaatgacgagaggtgcattaacgacatttagtttggctaatgacgtagcaaaatactttgcaattttacctgcactaatgatgtcaacgattccagaaatgacttcactaaatattatgcatttatcgtcacctaaatctgcaatcatatcagctttgatattcaatgcattaatcattgttgccttaattccaattgccatgaaaggtgtaaaagtaaagggttacagcattgatagaatttttataaataatatgttgatttatggattaggtggattaatcgtcccgtttttaggcattaaattaatagatatgattgtacaattttttgtgtaa

SEQ ID NO: 8302 - DNA, 561 bp, Staphylococcus aureus
  CDS (1)...(561)
atgaatacgataagaaatagtatttgtttaacgataataactatggtattatgtggatttttattcccgttagctatcacgttaattggtcaaatatttttttatcaacaagcaaatggtagtttaattacgtatgacaatcgtatagttggatcaaaattgattggacagcactggacagagacacgatattttcacgggagaccgagtgcagttgattataatatgaatcctgaaaaattatataaaaacggcgtatcatcaggtggaagtaatgaatcgaatggaaacaccgaattaatagcacgcgtgaaacatcatgttaaatttggtaattcaaatgtaacaatagatgctgcaacaagttctgggtcgggcttagatccgcatattacgcttgaaaatgcattgaagcaagcacctcgtattgctgatgctcgtcatatatctacttcaagagtgaccgacttgattcaacatcgtaagcagcgtggtgtgctaacaaatgattatgtgaatgtgcttgaactaaatattgctcttgataagatgaaagattga

SEQ ID NO: 8303 - DNA, 360 bp, Staphylococcus aureus
  CDS (1)...(360)
atgatacatggaattggtgtagatttaatcgaaatcgatcgaataaaagtgttatatagtaagcaaccaaaattggttgagcggattttaactaaaaatgaacagcacaaattcaacaatttcacacatgagcaacgtaaaattgaatttttagctggcaggtttgctacaaaagaagcgttcagtaaagcattaggcacaggcttaggaaaacatgtagcttttaacgatatagactgttacaacgacgaacttggcaaaccaaagattgattacgaagggttcatcgtacatgttagtatctcacacactgagcaatatgcgatgagccaagttgttttagaaaagtcagcattttaa

SEQ ID NO: 8304 - DNA, 1173 bp, Staphylococcus aureus
  CDS (1)...(1173)
gtgggaattacaggaggaagtaatatgtcagataaatattatagatctgcgtatatgaatgtagatttaaacgctgttgcatcaaatttcaaagtattcagtacattacatccaaataaaacagtgatggctgtcgttaaagccaatgcctatggactaggtagtgttaaagtagcacgtcatttaatggaaaatggtgccacattttttgctgtagcaacgttagatgaagcgatagaacttagaatgcatgggattactgctaaaattttagtcttaggtgtgttaccagctaaagatattgataaagcgatacaacaccgagttgccttaacggttccgtctaaacagtggttgaaagaagcaattaaaaacatttctggtgagcaagagaaaaagttatggttgcatattaaattagatacaggaatgggacgtttaggtattaaagatactaaaacgtatcaagaagtgattgaaatcattcaacgatatgagcaacttgtatttgaaggcgtctttacacactttgcctgtgctgacgaaccaggagatatgacaactgaacaatatcaacgttttaaagatatggtcaatgaagcaattaaacctgaatatatacattgtcagaactcagcaggttctctattaatggattgccaattctgtaatgcaataagaccaggaatttccctttatggatattatccatcagagtatgtacagcaaaaagttaaagtacaccttaaaccaagtgtgcaattaattgctaatgtagttcaaacaaagacgctacaagcgggtgagtctgtaagttatggtgcaacttatacagctactgatccaacaacaatagcattgttacctattggatatgcagatggctatttacgcattatgcaaggtagctttgtaaatgtaaatggtcatcaatgcgaagttattggtcgcgtatgtatggatcagacaattgtaaaagtgccagatcaagttaaagctggagattcggtgattttaatagataatcatagagaaagtccacagtcggtagaggtggcagctgaaaagcaacatactattaattatgaagtgctatgtaacttgtcgagacgtttgccacgaatctatcatgatggtgatcaacgttttgtaacaaatgaattgttaaaataa

SEQ ID NO: 8305 - DNA, 2151 bp, Staphylococcus aureus
  CDS (1)...(2151)
atggacaatcaattgattaattcaatcatagagaaatatcaatttagtaaaaaacaaattgaagcagtgttaacactgcttgaagaaaaaaatacagtaccatttattgcgaggtatcgaaaagagcaaactggtggactagatgaagttcaaataaagcaaattgatgacgaataccaatatatggtcaatttacaaaaacgtaaagaagaagttataaaaaatatagaacagcaaggattacttactgaggaattaaagaaagatattttaaaacagaacaaattacaacgtgttgaagacctatatagaccttttaaacaaaagaaaaagactagggcaactgaggcgaaacgtaaaggattagaaccattagcgatatggatgaaggcacgtaaacatgaagtctcaattgaagaaaaagcacaacaatttataaatgaagaagtgcaatcggttgaagatgctatcaaaggtgcgcaagatatgattgcggaacaaatttcagataatcctaaatatagaacaaaaattttaaaagatatgtatcatcaaggtgtgttaactacatctaaaaagaaaaatgctgaagatgaaaaaggtatttttgaaatgtattatgcatacagtgagccaattaaacgcattgctaatcatagagttttagctgtgaatcgtggtgaaaaagagaaagtattatctgtaaagtttgaattcgatacgacatcagtagaggacttcattgcacgtcaagaaatcaatcataataatgtaaatcgcagttatattttagaggcgattaaagatagcttgaaacgcttaattgtcccttcgatagagcgtgaaatccatgctgatttaactgaaaaagctgaaaatcatgcaatagatgtttttagtgaaaacttaagaaatctattactgcaacctccaatgaaaggtaaacaaatattaggcgtagatcctgcatttagaacaggttgtaaattagcagtcattaacccattcggtacttttatagcaaaaggtgtgatttatccgcatccaccagtttctaaaaaagaagcagcagagaaggattttgtacaaatggttaaagcgtatgatgtgcaattaattgcaattggcaatggtacagcaagtcgtgaaacagaacaatttgttgcagatttaattaaaaagcatcagttgccagtacaattcatcattgtcaatgaagcgggcgcttcagtatactcagcatcagaaattgctagagatgaatttcctgattttcaagtggaagaaagaagtgccgtatcaattggacgacgcgttcaagatccattaagtgaattagttaaaatcgatcctaaatctattggtgttggacaataccagcatgatgttaatcaaaaagcactagaaaatgcattaactttcgttgttgaaacagcagttaaccaagtaggtgttgatgtcaatacagcatcatcatcattattacaatatgtgtctggtctaagttcgcaaattgctaaaaatataattgcatatagagaagaaaatggcgcaataaagcataataaagagttaagcaagattaagcgtttgggtgctaaaacttttgagcagagtataggatttttaagaatagtagacgggtcagagccattggataatacatcgattcatcccgaaagctataaagtaacgtatcagttattagataaactcggatttggtggtaatgatttaggtagtgatgcattaaaagctaaattaaattcattggatatggatgaactggcgattgaattacaagtcggtgtacctacattagaggatattattaaatccttgaaagcacctaatcgagatccaagggacgagtttgaaacaccaatccttaaatccgatgtgctatcaattgaagatttaaaagaaggaatgaaattgagtggcacagttagaaatgtagtagattttggagcatttgtagatataggtgttaaacaagatggacttgtccatgtttcgaaactttctaagaagttcgtaaaaaatccaatggatattgtcagtgtcggtgatatcgttgacgtttggatttacagtattgacaaaaataaagacaaagtatcattaacgatgattgatccacatgaataa

SEQ ID NO: 8306 - DNA, 927 bp, Staphylococcus aureus
  CDS (1)...(927)
gtgacacttgcaaaattagcagatcgacttggctttaagcgaatttggtttacggaacatcataatgtaccagcgtttgcgtgtagtagtccagaacttttgatgatgcatacattggcgcagacaaatcacatacgagttggctctggtggtgtgatgttgccgcactatcgaccttataaaattgctgagcattttagaatgatgacagcgttatatccaaatcgtattgatttaggtattggtaataatccaggtactactatggtaaagcaagctttagatggaataaatcctaaatatgatagttacgatgaatcgatttcgttattacgtgattatcttacaataaaggataaaccaagtgcgcatatgttaggtgtccaaccacacattgatcattttccagaaatgtggttattaagtagtagcgcaacatctgccaaaatagctgccgaactaggtatagggctttctgttggaacatttttgctaccagatataaatgcgatacatgcagcgaaggataacattgatatttacaaaaaacatttccgtgcatcaatgattaaaatggacgcaaaagtgatggcatctgtatttgtcattgtagctgataacgaagcggaagtagcagcattacaacatgccttagatgtttggttattaggtaaattacaatttgcagaatttgaacattttccatcggtagacacagcgcaaaagtataagctcaatgatcgagacaaagagatgattcaagcacatcaagcacgtatcattgcaggtacacaagaacaggttaaagcacaattagatgatttcattgctacgtttgaagttgatgaggtgttagtagcaccgcttattccaggcattgaagaacgttgtaaaacattaaaattactcgcagaaatctatttgtag

SEQ ID NO: 8307 - DNA, 1200 bp, Staphylococcus aureus
  CDS (1)...(1200)
atgtaccgatacaaaccacttttacaatcaatccacttacctaatggcatcaaaatttcgaatcgctttgtattatcaccaatgaccgtaaacgcatcaacaaaagaaggctatattacaaaagcagacttggcttatgctgcacgtcgctctaattcagctggtatgcaagtcaccggcgctgcttacattgaaccttatggtcaattgtttgaatacggctttaatattgatcatgatgcttgtatccctggattaactaacatggcatctacgatgaaacaacatggtagcctcgctattattcagttagcgcatgctggtcgtttttcaaatcaagcaattttaaattttggaaaggtgtatggaccaagccctatgacgttgcattcaccgattgaacacgatgttatcgccatgtctcaagagaaaatcaatagcatcattcagcagtatcgtgatgctacattacgcgcgattaaagcaggttttgatggtgtggaaatttcgattgcacaacgtttgctgattcaaacatttttctcaactttttcgaataaacgtacagaccattacggtgccgactcattaaaaaatcgtgcaagattatgtttagaagttatgcgcgcggtacaagaagtgattgataaagaagcacctgacaattttattttaggatttcgagcaacgccagaagaaaccagaggtagtgatttaggatataccattgacgagttcaatcaattaatcgattgggtcatggacgtttcaaacatccaatatttagcaatcgctagctggggtcgacatatttatcaaaatacgtctcgtacaccaggtgaacatttcggtcggccagttaaccaaattgtctatgaacatttagcaggtcgtatccctttaattgcaagtggcgggattaattctccagagtctgctttagatgctttacaacatgcagatatggtcggcatgtcttcgccttttgtcacagaacctgactttgtgcataaacttgctgaacagcgaccacatgatattgaccttgaattttctatggaagatttagaaaatttagccattccgcgtgccgcttttaaagatattgttaaaatgatggattatggggaaggtctaaagaagcatacccgtgacgctttacgtcaattagaacagaattatcatgactcatcgtcttaa

SEQ ID NO: 8308 - DNA, 1542 bp, Staphylococcus aureus
  CDS (1)...(1542)
atggaaatggcaaaagaacaagagttaatccttgtcttagactttggtagccaatacaaccaattaattacacgccgaattcgtgaaatgggcgtttatagtgaattacacgatcatgaaatttcaattgaagaaattaagaaaatgaatccaaaaggtatcatcttatcaggtggtccaaattcagtttatgaagaaggttcatttacaattgatccggaaatatataatttaggaattccagtacttggtatttgttacggcatgcaattaactactaaattattaggtggtaaagttgaacgtgccaatgaacgcgaatacggtaaagcaatcattaatgcgaagtcagatgagttattcgctggcttaccagcagaacaaacagtttggatgagtcattctgataaagtcattgaaattccagaaggctttgaagttatcgctgatagcccaagcacagactatgcagcaatagaagataagaaacgtcgcatttatggtgttcaattccatccagaagtacgtcatacagaatatggtaatgatttattaaataattttgtccgtcgtgtttgtgattgtaaaggtcaatggacaatggaaaactttatcgaaatcgaaatcgaaaagattcgtcaacgcgtaggagaccgtcgtgtattatgtgcgatgagtggcggcgtagattcatctgttgtagctgtactattgcataaagcaattggtgatcaactaacatgtatctttgtagaccatggcttacttcgtaaaggtgaaggcgacatggttatggagcaattcggtgaaggttttaacatgaatattattcgtgttaatgcgaaagatcgttttatgaataaattaaagggtgtttcagatcctgaacaaaaacgtaaaatcattggtaatgaatttgtatatgtgtttgacgatgaagcatcaaaacttaaaggtgtagacttccttgcgcaaggaacactatatacagacgtcatcgaatcaggtactaagacagcacaaacaatcaaatcacaccacaatgttggtggattaccagaagacatggaattcgaattaatcgaaccaatcaatacattgtttaaagatgaagtacgtaaattaggtattgaactaggtattccggaacatttagtgtggagacaaccattcccaggtcctggccttggtattcgtgtacttggagaaattactgaagataaactagaaatcgttagagaatcagacgcgattttacgccaagtgattagagaagaaggtcttgaaagagaaatttggcaatacttcacagtgttaccaaacattcaatcagtaggtgttatgggagactaccgtacgtatgatcacacagtaggtatccgtgcagtaacatctatcgacggtatgacaagtgactttgcacgcatcgattgggaagtcttacaaaagatttcaagtcgtatcgtaaacgaagtagaccatgttaaccgcgtagtctatgacattacatcaaaaccaccaagcacaattgagtgggaataa

SEQ ID NO: 8309 - DNA, 2715 bp, Staphylococcus aureus
  CDS (1)...(2715)
gtgaaaggtatgacaacacagttaaatatcaattcagtcattgaaaatgcgaaacgtgttattacaccattatcaccgatttcgatttttgcagcacgaaatccatgggaaggattagaagcggatacgtttgaagatgtcgcaaaatggttacgtgatgttcgagatgtggatattttcccaaataaagcattaatagaaagtgctgtggcacgcggtgaattagacgaaagtgtctttaatcaacttgttactgatatgttacttgaacatcactacaatatcccgcaacactacatcaatctttatattgataacattaaaacattaaaagacgtacctgcatcatatatgaatcattcaaatgttgatgttgttgctgatctactattagaaaaatcaaaacgtgatatggctgaatcatatcatcactatgatgtacgtccgatgagtgatgcaataatagatgaacaaggtatgccacttagcgaacaagtgaatcgtcaaatgattaaatggacgaaactttatatcgatcaatttctatcgagttggacaatgccgaagcgtgagcaaagtttttaccatgcatggttgcatttagcgcaacatgaccatagttttactaaagcacagcgccaagtgattaaaggcttacccaatgatcctaaaatgacgatagagtcagtattaaatcatttttcaatagtgcaggaagactaccaagcttactttgaaggacatcttttggcgttaccgggttgggcaggtatgttgtattaccgttcacaacagcatcactttgaacaacatttgttaacggattatttggccattcggttagttgtcgaacaattgctagttggtgatgagtttaagtcagtcactaaagattgtgaaagtagatcggaaaattggtttaagcaaactgttgcatcatggtgttactacagtgatatgcctagcgatgtattactacaacatgacgtcaatgaaattaaaacgtttattcattttgcagcaactatgaataaaaatgtatttaaaaatttatggttgattgcctgggaaatgacatacgaatctcagttaaaacaaaaaattaaagcaggtcatgagagtttggcgggcgcattagatgcaattcaagtaaatgtttcggaaaatgacaacgctaatcagtcacattcagtatcgttaaatgccacacaagcagttgatgaaaataatagcgagctaaatcaggtgggcacatcaacgaaagcgcaaattgcattttgtatagacgttcgttcagaaccatttcgcagacatatcgaagcagcagggccctttgaaacgattggtattgcaggtttctttggattacctattcaaaaagaagccgtcgacgaacaattcaaacatgattcattacctgtcatggtaccgccggcatatcgcattaaagaatttgcggaccgttacgatatgaatgtttatcgacaacagcaacagacaatgtcatcgatgttttacacatttaaattgatgaaaaataatgtcatgcctagtctgttattgcctgaattaagtggaccatttttaagcttgagtaccattgtcaatacgattatgcctagaaaaagtcgcgcgtctttacagaaaataaaacaaaaatggttgaagaagcctgaaacaaagttaacgattgatcgtgagtttgacagaacatcagacttacctgttggatttactgagcaagagcaaattgatttcgcgttacaagcgttgaaattgatggatttaaccgaagcatttgcgccgttcgttgtgttagcaggtcatgctagtcattctcacaataatccacatcatgcatcacttgaatgtggggcttgtggtggtgcatcaagcggttttaatgctaagttattagcgatgatatgtaatcgtctaaatgtcagacaaggattaaaacaagcaggtgtagtaattccggagaccacggtctttgcagcagcagaacattatacgtctactgatacgttggcatgggtatatgtgccagatacattatcagctttagctctagatgcatatgaatcattgaatgacgctatgccgatgatttctgaacacgcgaatcgcgaacgtttggacaaactgtcaacgattggtcgtgtgaatcatccagtggaagaagcgcagcggtttgcgagtgattggagtgaagtacgtccggaatggggtctggctaaaaatgcatcatttataattggacgacgccaattaacaaaaggcattgatttagaagggcggacatttttacacaattatgattggtgtaaagataaagatggcacattgttaaataccatcatttctggtccggcacttgtggcacaatggattaatttacaatattatgcgtcgacagttgcgccgcatttttacggaagtgggaataaagcgacacaaaccgtcacgtcaggtgttggtgtcatgcaaggtaatgcgagtgatctgatgtatggcttatcatggcaatctgttatggctgctgatcgaacgatgtatcattcgccaattcgtttgcttgtcgttgttcaggcacccgactatgttgtagcaagactactcgcgaataatgagcatttcgctaggaaggtgtctaatcattggctgcgtttaatgagcgttaatgaggaagggcgttttaaaagttggatttaa

SEQ ID NO: 8310 - DNA, 957 bp, Staphylococcus aureus; identical to SEQ ID NO: 4704
  CDS (1)...(957)

SEQ ID NO: 8311 - DNA, 570 bp, Staphylococcus aureus
  CDS (1)...(570)
atgtcattaattaacaaagaaatcttaccatttacagcgcaagctttcgatccaaaaaaagatcaatttaaagaagttacacaagaagatttaaaaggttcttggagcgtagtatgcttctatcctgctgacttctcatttgtttgtccaactgaattagaagacttacaaaaccaatatgaagaattacaaaaattaggcgtaaatgtattctcagtatcaactgatactcacttcgtacacaaagcatggcatgaccattcagatgcaattagcaaaatcacttacactatgattggtgacccatcacaaacaatcactcgtaattttgatgtattagatgaagctactggtttagctcaacgtggtacattcattatcgacccagacggtgttgtacaagcatctgaaattaacgctgacggaattggccgtgacgctagtacattagctcacaaaatcaaagcagctcaatatgttcgtaaaaaccctggcgaagtatgcccagctaaatgggaagaaggcgctaaaacattgcaacccggtttagatttagtaggtaaaatctaa

SEQ ID NO: 8312 - DNA, 1485 bp, Staphylococcus aureus
  CDS (1)...(1485)
gtgttaagttttcaattgctattttcactgtttgttattgcgcttatcattgcattgataagtggcttgttgtttttagcaccagttatgccaatgagatatattaaattacatttatacatactagtcatgccagtattatttgcagtaattggctttttcggtattcatggtcaacatgtcttaggtccatttaaaatagatcgtttatcttggttattagctggctttgtaatggcgcttggctttattattcaaaagttttcaatgcgatatttactaggtgatcatcattatagacattactttccattgttcactgcgattacgtcgtttgcatctttagcatggatgtctgaagacttaagactgatggcactctgctggggtatgacattattatgtttaacattgctgatgaacgttaatcgtttttggaaagtgccacgtgagtctgcgaaattatcgagcatgacatttttatgtggttggcttgcattcgttggagcaattgtaactatttatattgcgactggcgagtggcgggtaccacaacatatagcgcatccgacatggtcattgttgacgaatgtactgcttgtattagctgtcatgataccggcagcacaatttccttttcatcgatggttgattgaatctgtaacagcaccaacgccagtatcggcaattatgcatgcaggaattgtgaatgcaggtggtgttattctaactcgttttgcgccgatatttgataatggatttgcgttatcattattacttatcctttcaagcatttctgtattgttaggatcaggtattagcttggttcaagttgactataaacgccaattagtgggctctacgatgagtcaaatgggctttatgttagttcaatgcgcacttggtgtatattcagcagcgattatacatttaatattgcacggtatttttaaggcaacattatttttacaatcaggttctatcgtgaagcgattcaatattccaaaacaagcatctgctaaagacgcttatggctggattgtcatgggacgtgtattagctattatcgtggcatttctgttttggatgagtagtgacagaagtgcatatgaagtgttaagtgcactcattctagcatggtcattacttgtatcttggaatcaaatggtagcctttagtaaagggcgtatggcacgtctggttggcatgattttgatttcaattgtgacatttatctacatcatcacacataattatttttacgatgtattacaaaatataacaacacatgcgacaacgccgcctacaattagtgtcatcattagtgttgtcatattaatatttggtagtttattaagtatctgggtagcgcgtcatcgatactctaaggcttttgcggtattgtacgtgtggttagttaatctaggtgaagcacgctcgaaagcgatagaaagtcatccgaattatttgaagaagtatttatag

SEQ ID NO: 8313 - DNA, 243 bp, Staphylococcus aureus
  CDS (1)...(243)
atggcaggtggaccaagaagaggcggacgtcgtcgcaaaaaagtatgctatttcacagcaaatggtattacacatatcgactacaaagacactgaattattaaaacgttttatctcagaacgcggtaaaattttaccacgtcgtgtaactggtacttcagctaaatatcaacgtatgttgactacagctatcaaacgttctcgtcatatggcattattaccatatgttaaagaagaacaataa

SEQ ID NO: 8314 - DNA, 504 bp, Staphylococcus aureus
  CDS (1)...(504)
atgctaaatagagttgtattagtaggtcgtttaacgaaagatccggaatacagaaccactccctcaggtgtgagtgtagcgacattcactcttgcagtaaatcgtacgttcacgaatgctcaaggggagcgcgaagcagattttattaactgtgttgtttttagaagacaagcagataatgtaaataactatttatctaaaggtagtttagctggtgtagatggtcgcttacaatcccgtaattatgaaaatcaagaaggtcgtcgtgtgtttgttactgaagttgtgtgtgatagtgttcaattccttgaacctaaaaatgcgcaacaaaatggtggccaacgtcaacaaaatgaattccaagattacggtcaaggattcggtggtcaacaatcaggacaaaacaattcgtacaataattcatcaaacacgaaacaatctgataatccatttgcaaatgcaaacggaccgattgatataagtgatgatgacttaccattctaa

SEQ ID NO: 8315 - DNA, 297 bp, Staphylococcus aureus
  CDS (1)...(297)
atgagaacatatgaagttatgtacatcgtacgcccaaacattgaggaagatgctaaaaaagcgttagttgaacgtttcaacggtatcttagctactgaaggtgcagaagttttagaagcaaaagactggggtaaacgtcgcctagcttatgaaatcaatgatttcaaagatggcttctacaacatcgtacgtgttaaatctgataacaacaaagctactgacgaattccaacgtctagctaaaatcagtgacgatatcattcgttacatggttattcgtgaagacgaagacaagtaa

SEQ ID NO: 8316 - DNA, 1098 bp, Staphylococcus aureus
  CDS (1)...(1098)
atggctttaacagcaggtatcgttggcttaccaaacgttggtaaatcaacattatttaatgcaattacaaaggcgggtgccttggcagcaaactatccgttcgcaactatagacccaaacgtgggtattgtagaagtgccagatgcaagactacttaaattagaagaaatggttcaacctaaaaaaacattacctactacatttgaatttacagatattgccggaattgttaaaggtgcttctaaaggtgaaggtttaggtaataaattcttatcacatattagagaagtagatgcaatttgtcaggttgttcgtgcttttgacgatgataatgtaacacatgtagctggtcgagttgatccaattgatgacatcgaagttatcaatatggaattagtacttgcagacttagaatcagttgaaaaacgcttacctagaattgaaaaattggcacgtcaaaaagataagactgctgaaatggaagtgcgtattttaacaactattaaagaagctttagaaaatggtaaacccgctcgtagtattgactttaatgaagaagatcaaaaatgggtgaatcaagcgcaattactgacttctaaaaaaatgctttatatcgctaatgttggtgaagatgaaattggtgatgatgataatgataaagtaaaagcgattcgtgaatatgcagcgcaagaagactctgaagtgattgttattagtgcaaaaattgaagaagaaattgctacattagatgatgaagataaagaaatgttcttagaagatttaggtatcgaagaaccaggattagatcgattaattagaacaacttatgaattattaggattatcaacatattttactgctggtgtgcaagaagtacgtgcttggacatttaaacaaggtatgactgcacctcaatgtgctggtatcattcatactgattttgaacgtggatttatccgtgccgaagtaacaagttatgacgactatgtgcaatatggtggcgaaagtggcgctaaagaagcgggcagacaacgattagaaggtaaagaatatattatgcaagatggcgatatcgttcatttcagatttaatgtataa

SEQ ID NO: 8317 - DNA, 882 bp, Staphylococcus aureus
  CDS (1)...(882)
atggatcaagttatgagtattatttcatcgctattcgaaccattaactaaaattgaaacatatgaaagtgtcgctactaaattagcgatgataattatatatattatcgttgcattaatcgtaattaaaatacttgataaaatgattgctcaaggatttaaaatacaaaacaagagtaaaaagggtaataaaaaacgttcgaaaacattaatatcattggtgcaaaatgttgttaaatatatcgtgtggtttatagttatcactaccattttaagtaaatttggcattagtgttgaaggggtaattgccagtgctggtgtcgtaggcttagcagtaggttttggtgctcaaactatagttaaagacgtaattacaggattctttattatatttgaaagccaatttgatgtaggtgattatgttaagataaataacggtggtacaactgtagcagagggaacagttaaatcaattggactccgttcaacacgtattaatacaatatctggggaacttacaatcttgccaaatagtagcatgggtgaaataacgaattactcaattacgaatggaacagcaattgttaaaattccagtatctgtagatgaaaatattgataatgttgagaagaaattaaacaaattatttacatctctgcgtagtaaatattatttatttgtaagtgatcctgttgtgattggtattgatgcctttgaagatactagagtaatattaagggtttcagcagaaacaataccaggtgaaggtttctctggtgcgcgtattattcgtaaagaagtacaaaaaatgtttttacaagaaggcattaagacaccacaaccaataatgacaccttttaatcatagtgaaaacggtgtttag

SEQ ID NO: 8318 - DNA, 1104 bp, Staphylococcus aureus
  CDS (1)...(1104)
atgaaggatacacagttagcccaaatcacattaactgatgattcaaccggtgctatagcgaatccaatccatttatctactgcctacaagcatccaaaactaggacaatcgacaggttttgattatacacgtactaaaaatcctacacgctcaacatttgaaacctgttttgccaaactcgaacatggtattgcatcattcgctacatcaagtggaatgtcagccattcaattaatatgtaatttatttaaaccacacgatgaaattttagtttcattcgatttatacggcggcacatttagattatttgaattttatgagcaacaatacaatatcaaatttaagtacgttgattttacagattatgaacaagttgaaaaagaaatcactgataaaacagtagcattattcattgaaccaatatctaacccacaaatgattgctattgatgtaaagccgtactatcaactttgtaaagctaaaggcttattgtcaattatcgacaatacttttttaacaccttatctttcaacaccattagcagaaggtgctgatatagtcttacattcagctacgaaatatattggtggacataacgatgtactagcaggtgtcgtaaccgtcaaagatgaatcactcgcgcaacagttgtttgattttcacaacatgactggcgcaacactttcaccaatagatagttatttgttgttacgtggacttaaaactttgcatttacgcattgagcgtgcgcaatcaaacgcaagaaaacttgctaaaaaatgtcagtcacttcaagcaattgacgaagtactatatagcgggcaaactggcatgcttagtttaagacttaacaaggcctatagcgtcgctaaactattagaaaatttagacatttgtatttttgcagaaagtttaggaggtactgaaacattagtgacgttcccttacacacaaacacatgttgatatgccagatgctgaaaaagataaacgtggcattgatgagtatttaatccgcttatcactaggcgttgaaaattatgaagacatcgaacgcgatatcatccaagcattagataaagctcagattggagagattgtatga

SEQ ID NO: 8319 - DNA, 1182 bp, Staphylococcus aureus
  CDS (1)...(1182)
atgacgagagtcgtattagcagcagcatacaggacacctattggcgtttttggaggtgcgtttaaagacgtgccagcctatgatttaggtgcgactttaatagaacatattattaaagagacgggtttgaatccaagtgagattaatgaagtcatcatcggtaacgtactacaagcaggacaaggacaaaatccagcacgaattgctgctatgaaaggtggcttgccagaaacagtacctgcatttacagtgaataaagtatgtggttctgggttaaagtcgattcaattagcatatcaatctattgtgactggtgaaaatgacatcgtgctagctggcggtatggagaatatgtctcaatcaccaatgcttgtcaacaacagtcgctttggttttaaaatgggacatcaatcaatggttgatagcatggtatatgatggtttaacagatgtatttaatcaatatcatatgggtattactgctgaaaatttagtagagcaatatggtatttcaagagaagaacaagatacatttgctgtaaactcacaacaaaaagcagtacgtgcacagcaaaatggtgaatttgatagtgaaatagttccagtatcgattcctcaacgtaaaggtgaaccaatcgttgtcactaaggatgaaggtgtacgtgaaaatgtatcagttgaaaaattaagtcgcttaagaccagctttcaaaaaagacggtacagttacagcaggtaatgcatcaggaatcaatgatggtgctgcgatgatgttagtcatgtcagaagacaaagctaaagaattaaatatcgaaccattggcagtacttgatggctttggaagtcatggtgtagatccttctattatgggtattgcaccagttggcgctgttgaaaaggctttgaaacgtagtaaaaaagaattaagcggtattgatgtatttgaattaaatgaagcatttgcagcacaatcattagctgtagatcgcgaattaaaattacctcctgaaaaggtgaatgttaaaggtggcgctattgcattaggacaccctattggtgcatctggtgctagagttttagtgacattattgcatcaactgaatgatgaagtcgaaactggtttaacatcattgtgtattggtggcggtcaagctatcgctgcagttgtatcaaagtataaataa

SEQ ID NO: 8320 - DNA, 1230 bp, Staphylococcus aureus
  CDS (1)...(1230)
atgacaaattatgaacaagttaacgatagtacgcaattttcaagacgtacatttttgaaaatgttaggtattggcggtgccggtgttgcaattggcgcaagtggtgttggtagcatgtggtctttcaaatcaatgttcaatacaccagaagatccggaaaaagatgcgtatgaattttatggtaaagtgcaaccaggcattaccacaccaacgcaaaaaacatgcaatttcgttgcgttagatttgaagtcaaaagatagagatgcaattaaggcaatgtttaaaaagtggacggttatggctgatcgtatgatggatggtgatacagttggcaagacgagtaacaatcctttaatgccaccagtagataccggtgaatcgataggattaggtgcaagcaagttaacgattacctttggaattagtaagtctttgatgaagaaaattgggttatctagtaaaattcccgatgcctttaaagatttaccgcattttccgaatgatcagttaatagacgattacagcgatggtgatattatgattcaagcatgctcaaatgattcgcaagtatcctttcatgcggttcataatttagttcgtccatttcgagatattgttaaggtacgttggtcgcaatctggttttatctctgctaaaggtaaggaaacacctagaaatttaatggcatttaaagatggaacaattaatcctagaaagagtaatcaacttaaagattatgtgtttattgatgacggatgggcgaaacatggaacttattgtgttgtcagacgtattcaaatacacattgaaacgtgggatcgtactgcactggaagaacaagaggctacatttggtcgcaagcgacatagtggtgcaccgttaacaggtgggaaagagtttgatgaaattgacttaaaagcgaaagatagtcatggcgagtatattattgataaagatgcccatacgagactagcgaaagaagcaaatacgtcaattttacgtagagcctttaattatgttgatggtacggatgaccgcacaggtaacttcgaaacaggcttgttgttcattgcttttcaaaaagcgacccaacaatttatcgatattcaaaacaatttaggtagtaatgataagttaaatgaatacattacacatagaggttctgcttcatttttagtattaccaggtgttagtaagggaggataccttggtgaaacattatttgactaa

SEQ ID NO: 8321 - DNA, 1578 bp, Staphylococcus aureus
  CDS (1)...(1578)
atgattcaagcccaactagatcaataccatttaaagttaaattatgtccacaataaaggattcaatattattggtgaggaagatcattatcgtaaagcgtatgcacactttatacatcaatatatgaaacaagctgcaccttttatagaggctgatatctttaattcagaatctatcgcattggttcgccgtgccattattaagacattaaatagtgaaaattatcatttagttcagtcggctatcgatggcttaatctatcatatactcattgccattcagcgtttaaatgaaaatttttcgttcgatatacctatcaatgaaattgataaatggcgacatactaatcagtatgctattgctttaaaaatgatagaaaacttagaacgcagttgtaatgtcacatttccagagtctgaaattatctttatcacgttacatttactaggctctaaaatgaccgaacatacagcatcttcaattacctttgaataccatgatttatcgcaaaatatacatgaattgatcacttatgttagccaagaattaggcattgatatgtcaaaagacaacaagttgcataccagtctaatcacacatatcaaaccagctatacatcgtattaaatacgatatgctacaacctaatcctttgaggcaagaagttatgcgtcgctatcctcaaatcattgaagccgttagcaagcatattagcccaattgaacaagatgctgctattcgcttcaacgaagatgaattaacatacattacaattcatttcgcatcaagtatagagcgtgttgcaacacataaacaatcaatgattaaggttgtcttactatgtggttctggtataggcacgtcgcaacttttaaaatcaaaactaaatcatctgtatcctgagtttcacatttgggatgcctattccatttatcaattggaagaaagtcgattattgcaagataacattgattatgtcatttcaacagtaccttgtgaaatctcaactgtaccagttattcatgtcgatccatttatcaatcagcaatctcgtcaaaaattgaatcaaattatcaatgactcaagagaacaacgagtcatgaaaatggcaactgatggcaagtcactctcagatttattgcctgaacatcgcatcataataaataaacaaccattatcaattgaatcggcaattacagtggctgtgcaacctttaatcaatgatggcattgtcaattcaaattatacagctgcaattttaaaacaattagaacaattcgggtcatatatggtcattagtccacatattgcacttattcacgctggtactgattatgtacagaatggtgtaggtttcgcactaacttatttcactgaaaggattatttttggtagtaaagctaacgatcccgttcaccttgtaattacattagcaacggaccaccccaatgcacatttaaaggcattgggacagttaagcgaatgcttaagcaacgatttatatcgacaagatttcttagatgggaatatttttaaaattaaacaacacattgctttaactatgacaaaggaggtttaa

SEQ ID NO: 8322 - DNA, 444 bp, Staphylococcus aureus
  CDS (1)...(444)
gtgtcattagacattttgtcaacaacacgcatcattgtaaaagaacaagtaaatgattggactgaagctataactatagcttctcagccattactacaagaacaaattattgaacaaggctatgttcaagcaatgattgatagcgttaatgaatttggaccttatatcgttatcgcacctgaaattgcaattgcacatgcaagaccgaacaatgacgtacatcaagttggtttaagtctattaaagttgaatcaacatgtggcattttgtgatgaagatcactacgcatcactcatttttgtattgagtgccatcgacaatcattcacacttatctgtattacaaaatttagcaaccgtactgggcgataaccaaacagtccagcaactattaactgcaacaaacgcacaagacattaaaaacattttaaaggagcatgattaa

SEQ ID NO: 8323 - DNA, 1347 bp, Staphylococcus aureus
  CDS (1)...(1347)
atgcaagcaatccttaattttatagtcgatattttaagtcaaccagccattcttgttgcactgattgcctttataggtttaatcgttcagaaaaaacctgccgcaacaatcacttcaggaaccattaaaacgatattaggcttcttaattttaagtgcaggtgctgatgtcgtcgttcgatctcttgagccattcggcaaaatatttcaacacgcattcggtgtgcaaggtatcgtacctaacaacgaagctatcgtctcactagccttaaaagattttggaacaacagctgcactcatcatggtctgtggcatgattgttaatattttaattgcccgcttcactaatttaaaatatatctttttaacaggtcatcatacattttacatggctgcgtttttagcaatcattttaacagtcagtcatattaaaggctggctaacgattgttatcggcgcactcgtattaggattaatcatggcagtcttacctgcattactccaacctacgatgcgaaaaattacagggaatgatcaagtagcgttaggtcatttcggctcaatcagttactttgccgcaggtgctgtaggtcaattattcaaaggtaagtctaaatcaacggaagagattaaatttccaaaaggattaagtttcttgcgagaaagtacaattagtatctcgattacgatggcattactttacttcatcgcatgcttatttgcgggcgttagttatgtacacgaatctattagtgatggtcaaaactttattgtattttcattaattcaaggtgtgacatttgctgctggtgtatttattattttaacgggcgttcgcttaatcttagctgaaatcgtcccagcatttaaaggcatttctgaaaagcttgtaccaaattctaaacctgcattagactgccctattgtgttcccttatgcacaaaatgcagtactaattggattctttgtcagctttattacaggtgtcatcggtatgtttatcttattcttatttggtggcgtcgtcattttacctggcgtagttgcacacttcttcttaggtgcaacggctgctgtattcggtaatgcaagaggcggtattaaaggtgctgttgctggcgccgctctaaatggtatcctaataacgtttttaccattattattcttgccatttttaggcgaattaggtggtgctgcaacaacattctcagatacagactttttagctgtcggtatcgtgttcggtaacgcagtaaaatatatgggattatttggtgcgattctatttattattatcgtaggtgcgacagcaattttattaaaaggtcgtcaaaagccacagcaatag

SEQ ID NO: 8324 - DNA, 333 bp, Staphylococcus aureus
  CDS (1)...(333)
atgaaaaagttagccaattatttatgggtagaaaaagtaggagatttgtatgtgtttagtatgacacctgaattgcaagatgatattgggacagtaggttatgttgaattcgtgagtccagatgaagttaaagtggatgatgaaattgtgagtatcgaagcatcgaaaacggtcattgatgtgcaaacgccattgtcaggaacgattattgagcgaaatacaaaagcggaagaagaaccgacaattttaaattctgaaaaaccagaagaaaattggttgttcaaattggatgatgtcgataaagaagcattcctggcattaccggaggcttaa

SEQ ID NO: 8325 - DNA, 1350 bp, Staphylococcus aureus
  CDS (1)...(1350)
gtgatttttgaatgtatggcttgtggttatcaatctcctaaatggatggggaaatgtcctaattgtggcgcttggaatcaaatggaggaaattgttgaaaaagcagccaatcctaaacatggagtgaaaaccaaggaattaacaggtaaagtacaaaaattaaatagtattaaacatgaaacaacgccgagagtgttaacagattcagcagaattcaaccgtgtattaggtggaggtattgtgagcggatcgttagtacttattggtggggatccaggtattggtaagtcaacgttacttttacaaatttgtgcatcgttatctcaaaagaaaaaagtactatatattactggagaagaatcgcttagtcagactaaattacgtgcagagcgattagatgaagattcaagtgaattgcaagtattagctgaaacagatcttgaagttatttatcaaacagtaaaagaagaacaacctgatttattagtagtggattcgattcaaacaatatatcatcctgaaatcagctctgcgccaggttctgtttcacaagttcgtgaaagtacacaaagtttaatgaatattgctaaacaaatgaacattgcaacttttatagtgggtcatgtaacgaaagaaggtcaaattgctggcccaagattgctagaacacatggttgatactgtgctttattttgaaggcgatgaacaccacgcatatcgaattttgcgagctgttaaaaaccgttttggttcaacgaatgaaatgggaatcttcgaaatgaagcaaagtggattaaaaggtgtaaataatccatctgaaatgtttttagaagaacgttcaacaaatgttccaggttcaacaattgttgcaaccatggagggaaccagaccacttttaatagaagttcaagcgctggtaactccaacgacttttaacaatccgagacgaatggcaacagggattgatcataatcgattaagtttgttgatggctgttttggaaaagaaagaaaattatctattacaacaacaagatgcttatatcaaagtagctggcggtgtgaagttaacggagccagcagttgatttaagtgtaattgtagcaactgcgtctagctttaaagataaagctgtcgacggattagattgctatattggagaagttggtttaacgggtgaggtacgtcgtgtatctcggatagaacaacgcgtgcaagaggctgcaaaactaggtttcaaacgtgtaattattcctaaaaataatataggcggatggacatatcctgaaggtatacaagtaataggtgtaactactgtacatgaagcattgtcatttgctcttcattcataa

SEQ ID NO: 8326 - DNA, 2457 bp, Staphylococcus aureus
  CDS (1)...(2457)
atgttatttggtagattaactgaacgtgcacagcgcgtattagcacatgcacaagaagaagcaattcgtttaaatcattcaaatataggaacagaacacctattattggggttaatgaaagaacctgaaggaattgctgcaaaagtattagaaagttttaatatcactgaagataaagtaattgaagaagttgaaaaattaattggacatggtcaagatcatgttggtacattgcattatacacctagagctaaaaaagtcattgaattatcgatggatgaagctagaaaattacatcacaattttgttggaacggaacatattttattaggcttgattcgtgaaaatgaaggtgttgcagcaagagtttttgcaaatctagatttaaatattactaaagcacgtgcacaagttgtgaaagctttaggaaaccctgaaatgagtaataaaaatgcacaagctagtaagtcaaataatactccaactttagatagtttagctcgtgacttaacagtcattgccaaagacggtacattagatcctgttataggacgtgatagagaaattacacgtgtaattgaagtgttaagtagacgtacgaaaaacaatcctgtacttattggagaaccaggtgttggtaaaactgctattgctgaaggtttagcgcaagccatagtgaataatgaggtgccagagacattaaaagataagcgtgttatgtctttagatatgggaacagtagttgcaggtactaaatatcgtggtgaatttgaagagcgtctgaaaaaggttatggaagaaatccaacaagcaggtaatgtcatcctatttattgatgagttgcatactttagttggtgctggtggtgctgaaggtgctatcgatgcttcgaatattttgaaaccggcattagcacgtggtgaattacaatgtattggtgctactacattagatgaatatcgcaaaaatattgaaaaagacgcggctttagaacgtcgtttccaacctgtacaagttgatgaaccttcagtagtagatacagtcgctattttaaaaggattaagagatcgttacgaagcacaccatcgtattaatatttcagacgaagctattgaagcagctgttaaattaagtaacagatacgtttcagatcgtttcttaccagataaagcaattgatttaattgatgaagcaagttctaaagtaagacttaagagtcatacgacacctaataatttaaaagaaattgaacaagaaattgaaaaagttaaaaatgaaaaagatgccgcagtacatgctcaagagtttgaaaatgctgctaatctgcgtgataaacaaacaaaacttgaaaagcaatatgaagaagctaaaaatgaatggaagaacgcacaaaatggcatgtcaacttcattgtcagaagaagatattgctgaagtcattgcaggatggacaggtatcccattaactaaaatcaatgaaacagaatctgaaaaacttcttagtctagaagatacattacatgagagagttattgggcaaaaagatgctgttaattcaatcagtaaagcggttagacgtgcccgtgcagggttaaaagatcctaaacgaccaattggtagctttatcttccttggaccaactggtgttggtaaaactgaattagctagagctttagctgaatcaatgttcggcgatgatgatgcgatgatccgtgtagacatgagtgaatttatggaaaaacacgcagtgagccgattagttggtgctcctccaggatatgttggtcatgatgatggtggacaattaactgaaaaagttagacgtaaaccatattctgtaattttatttgatgaaattgaaaaagcacatccagatgtatttaatattctattacaagttttagatgacggacatttgacagatacaaaaggacgtacagttgatttcagaaatacaattatcataatgacatcaaacgttggagcacaagaattacaagatcaacgatttgctggattcggtggttcaagtgatggacaagattatgaaacaattcgaaaaacgatgttaaaagaattaaaaaattcattccgtccagaatttttaaaccgtgtagatgatatcattgtattccataaactaacaaaagaagaattaaaagagattgtaacaatgatggttaataaattaacaaatcgattatccgaacaaaacataaatattattgttactgataaagcgaaagacaaaatcgcagaagaaggatatgatccagaatatggtgcaagaccattaattagagcgatacaaaaaactatcgaagataatttaagtgaattaatattagatggtaatcaaattgaaggtaagaaagttacagtagatcatgatggtaaagagtttaaatatgacattgctgaacaaacttcagaaactaaaacaccatcgcaagcataa

SEQ ID NO: 8327 - DNA, 1023 bp, Staphylococcus aureus
  CDS (1)...(1023)
gtgaggtgcaacatgatgacgcataatattcatgataatatcagccaatggatgaaaagtaatgaagaaacaccaattgttatgtcttctagaattcggttagcgcgtaatttagaaaatcatgtgcatccactaatgtatgctactgaaaatgatggatttagagttataaatgaggtacaagatgccttgccaaattttgaattaatgcgtcttgatcaaatggatcaacaaagtaaaatgaaaatggttgcaaagcatttgattagtcctgaactaataaaacaaccagcagccgcagtattagtgaatgatgatgaatctttaagtgtcatgataaatgaagaggaccatattcgtattcaagctatgggaactgacacgacattacaggctttatataatcaagcttcatcaattgatgatgaattagatcgaagccttgatataagttatgatgaacaacttggttatttaactacatgtcctaccaatataggtactggtatgagagcaagcgtgatgctacatttaccaggtctatctattatgaaaagaatgacacggattgctcaaaccattaatcgttttggatatacaatcagaggtatttacggtgaaggttcgcaagtttatggacatacttatcaagtatccaaccaacttacacttggtaaatctgagttagaaatcatagaaacattaacagaagttgttaatcaaatcattcatgaagaaaaacaaatacgacaaaagttagacacttataatcaattagaaacacaagaccgtgtttttcgctcgctaggtattttacaaaactgtagaatgataactatggaagaggcttcttatagattaagcgaagttaaacttggtatagatttaaattacattgaattacaaaactttaaatttaatgaattgatggtagctatacagtcaccatttttattagatgaagaagatgacaaatctgtaaaagaaaaacgagcagatatactaagagaacatataaagtag

SEQ ID NO: 8328 - DNA, 567 bp, Staphylococcus aureus
  CDS (1)...(567)
gtgctttgtgaaaattgtcaacttaatgaagcggaattaaaagttaaagttacaagtaaaaataaaacagaagaaaaaatggtgtgtcaaacttgtgctgaggggcaccatccgtggaatcaagctaatgaacaacctgaatatcaagaacatcaagataatttcgaagaagcatttgttgttaagcaaattttacaacatttagctacgaaacatggcattaattttcaagaagtagcgtttaaagaagaaaaacgttgcccatcatgtcatatgactttgaaagatattgcacatgttggtaaatttgggtgtgctaattgttatgcaacatttaaagatgacatcattgatatcgtccgcagagttcaaggtggacaatttgagcacgttggaaagacaccacattcttcacataaaaagatagctttaaagcgaaaaatcgaagaaaagaatgaatatttgaaaaaacttattgaaatccaagattttgaggaagcagccattgttagagatgaaattaaagcactaaaagctgagagtgaggtgcaacatgatgacgcataa

SEQ ID NO: 8329 - DNA, 561 bp, Staphylococcus aureus
  CDS (1)...(561)
atgaaaataggtgtattagcattacaaggtgcagtacgtgaacatattagacatattgaattaagtggtcatgaaggtattgcagttaaaaaagttgaacaattagaagaaatcgagggcttaatattacctggtggcgagtctacaacgttacgtcgattaatgaatttatatggatttaaagaggctttacaaaattcaactttacctatgtttggtacatgcgcaggattaatagttctagcgcaagatatagttggtgaagaaggataccttaacaagttgaatattactgtacaacgaaactcattcggtagacaagttgacagctttgaaacagaattagatattaaaggtatcgctacagatattgaaggtgtctttataagagcgccacatattgaaaaagtaggtcaaggcgtagatatcctatgtaaggttaatgagaaaattgtagctgtccagcaaggtaaatatttaggcgtatcattccatcctgaattaacagatgactatagagtaactgattactttattaatcatattgtaaaaaaagcatag

SEQ ID NO: 8330 - DNA, 888 bp, Staphylococcus aureus
  CDS (1)...(888)
atgagtaaaataattggatcagacagagtcaaaagaggtatggccgaaatgcaaaaaggcggcgttatcatggatgtcgttaatgctgagcaagcaagaattgcggaagaagcaggtgcggtagcagtcatggctttagagcgtgtaccttctgatattagagcagctggtggcgttgcacgtatggcaaatcctaaaattgtagaagaagtaatgaatgctgtttcaattcctgtaatggctaaagcacgtattggtcatattacagaagcaagagtattagaagctatgggtgttgactatattgatgaatcagaagtattaacaccagcagatgaggaatatcacttaagaaaagatcaatttacagtgccatttgtatgtggttgtcgtaatttaggtgaagctgcacgaagaatcggtgaaggtgctgctatgttacgtactaaaggtgaaccaggtacaggtaatattgttgaagctgtaagacatatgagacaagttaattctgaagttagtcgattgactgtaatgaatgatgatgagattatgacttttgcgaaagatatcggtgcgccttatgaaattttaaaacaaattaaagacaatggtcgtttaccggtagttaactttgcagctggtggcgttgcgactcctcaagatgctgctttaatgatggaattaggtgccgacggtgtattcgttggatcaggtatttttaaatcagaagatccagaaaaatttgctaaagcaattgttcaagcaacaacacattaccaagactatgaactaattggaagattagcaagtgaccttggcactgctatgaaaggtttagatatcaatcaattatcattagaagaacgtatgcaagagcgtggttggtaa

SEQ ID NO: 8331 - DNA, 1662 bp, Staphylococcus aureus
  CDS (1)...(1662)
atgaatattattgatcaagtgaaacaaacattagtagaagaaattgcagcaagtattaacaaagcaggattagcagatgagattcctgatattaaaattgaaattcctaaagatacaaaaaatggagattatgctactaatattgcgatggtactgactaagattgcaaagcgtaatcctcgtgaaattgctcaagcgattgttgataacttagatactgaaaaagcacatgtaaaacaaattgacattgctggtccaggattcattaatttttacttagataatcagtatttaacagcaattattcctgaagcaattgaaaaaggtgatcaatttggacatgtaaatgaatcaaaaggtcaaaatgtattgcttgagtatgtttcagctaaccctacaggagatttacatattggtcatgctagaaatgcagcagtgggtgatgctttagctaatattttaactgcagctggctataatgtaacacgtgaatattatattaatgatgctggtaatcaaattactaacttagcgcgttcgattgaaacacgtttctttgaagctttaggtgacaatagttattcaatgccagaagatggctataatggaaaagatattattgaaataggaaaagatttagcagagaaacaccctgaaattaaagattattctgaagaagcacgtttgaaagaatttagaaaattaggcgtagaatacgaaatggctaaactgaaaaatgatttagcagagttcaatacgcattttgataattggtttagtgaaacatctttatatgaaaaaggcgaaattcttgaagttttagcaaaaatgaaagaattaggttatacgtatgaagctgatggcgctacatggttacgtacaactgattttaaagacgacaaagacagagtattaattaaaaatgacggtacatatacgtatttcttaccagatattgcgtaccacttcgataaagttaaacgtggtaatgacattttaatcgatttatttggtgctgatcatcatggttatattaaccgtttgaaagcatctcttgaaacgtttggtgtagatagtaatcgtttagaaattcaaatcatgcaaatggttcgtttaatggaaaatggtaaagaagtgaagatgagtaaacgtactggtaatgcgattactttaagagaaattatggatgaagttggcgttgacgctgcacgttatttcttaactatgcgtagtcctgatagtcactttgattttgatatggaattagcaaaagagcaatctcaagacaatccagtttactatgctcaatatgcacatgcgcgtatttgttcaattttaaaacaagcgaaagagcaaggaattgaggtagctgctgcgaatgattttacaacgattacaaatgaaaaagcgattgaattgttgaaaaaagtagctgatttcgaacctacaattgaaagtgctgctgagcatagatcagcacatagaattactaattatattcaagatttagcttctcatttccataaattctataatgctgaaaaagtgttaacagatgatattgaaaaaacaaaagcacatgttgctatgattgaagcggtcagaattacattgaaaaatgcattggcaatggtcggtgtaagcgcacctgaatcaatgtaa

SEQ ID NO: 8332 - DNA, 1011 bp, Staphylococcus aureus
  CDS (1)...(1011)
atgagagcagcagttgtaacgaaagatcacaaagtaagtattgaggacaaaaagttaagagctttaaaacctggtgaagcattggtacaaacggaatattgtggcgtttgtcataccgatttacatgttaagaatgctgattttggtgatgttacaggcgttactttaggtcatgaaggtattggtaaagtcatcgaagttgcagaagatgtagaatcattaaaaattggagaccgtgtgtctatcgcttggatgttcgaaagctgtggaagatgtgaatattgtacaacaggtcgtgaaacactttgccgtagtgtgaaaaatgctggttatacagtagatggtgcaatggctgaacaagttattgttactgcagactatgctgtgaaagtacctgaaaaattagatccagcagcagcgtcttctattacatgcgcaggtgtgacaacttataaagctgtaaaagtaagtaatgtaaaacctggacaatggttaggtgtttttggtataggtggtttaggtaacctagctttacaatatgctaaaaacgttatgggggctaaaattgttgccttcgacatcaatgatgataaattagcattcgcgaaagaattaggtgcagatgctattattaattctaaagatgttgatccagttgcagaagttatgaaattaactgataacaaaggattagatgcaacagtggtaacttcagttgctaagacgccatttaaccaagcggttgatgttgtaaaagctggtgcaagagttgttgccgttggtttacctgttgataaaatgaacttagatatcccaagattagtgcttgatggtattgaagtagtaggttcacttgttggtacaagacaagacttacgtgaagcgtttgaatttgctgctgaaaataaagtaacacctaaagttcaattaagaaaattagaagaaatcaatgatatttttgaagaaatggaaaatggtactataactggtagaatggttattaaattttaa

SEQ ID NO: 8333 - DNA, 537 bp, Staphylococcus aureus
  CDS (1)...(537)
atgattactgttttgtttggtgggagtagaccaaacggtaatactgcacaattaacaaaattcgctttgcaagatttagagtatcaatggattgacgtgacacaacatcagtttaaaccgatacgtgacgtgagacatacagcagagactattacttcatatgacgatgactatttgccgattctagataaaatattggctagtgatacaattatttttgcatcaccagtgtattggtatagcatttcagcaccattgaaagcatttatcgaacattggtcagaaacattacaagataaacgatatcctaattttaaggcacaaatggccgaaaaggattttagagttattttagttggtggagattgtccaaaaataaaagcgaagccagcaattacgcaaatgaaatatagtttagactttttaggtgccactttaaatggttatattattgggactgctgaaaagcctggtgacatcatgaaagacaattatgccttagcacgtgcaactgagtggaatagtatattgcaataa

SEQ ID NO: 8334 - DNA, 939 bp, Staphylococcus aureus
  CDS (1)...(939)
atgaagcaatttgtaaacttaggtaaatctgatgttgaagtgtttccaatcgcacttgggacgaacgcagtaggtgggcataatttatatccgaacttagatgaagaacaaggaaaagaagttgttcgtcaagccattaatcatggtattaatttattagatacggcatatatttatgggccagaacgttcagaagaattggttggagaagttgttaaagaatatccgcgagagcaaattaaaattgctacgaaagggtctcatgaatttgatgaaaatcaagaagtacatcagaacaatcaaccggaatatttaaaacaacaagttgagaatagtttgaaacgtctacaaactgattatatcgatttatattatattcattttccagatgacaacactccgaaagatcaagcagttgcagcattacaagagcttaaggaacaagggaagattaaagccattggtgtatcaaatttcacattagatcaacttaaagaagcaaataaagatggttacgttgatgttgtacagttagaatataatttattgcatcgcgaaaatgaggcagtattacaatattgtgttgatcaccaaatcacatttattccatatttcccattagcatccggtattttagctggaaaatatgatgagaacactaaatttagtgaccatcgtactacacgtcgtgattttaaaccaggtgtatttgaagaaaatgtgcgtcgcgtaaaagctttggaaagcctagctgcagcacatcaaacttcaattgcgaacattgtattagcattttatttaacgagaccagctattgatgtgattattcctggtgcaaaacgtgcagaacaagtcattgaaaatattaaagctgcagatatcgttttatcagatgatgagattcaatatatcgatgaactgtttccaattgaagactaa

SEQ ID NO: 8335 - DNA, 354 bp, Staphylococcus aureus
  CDS (1)...(354)
gtgggtagcaatatgaaaaatacattccttatttgtgatgaatgtcaggcagtcaatataagaacgttacaaaagaagttggaaaaattagatcccgatgctgaaatcgtgataggttgtcaatcttattgtggacctggacgccgaaaaacattcacttttgttaataaccgcccactggctgcgcttactgaagaagaattaatcgaaaaagtttctcaacaattaaagaaaccacgtgatcctgaagaagaagagcgtttaagaaaacgacatgaagaacgtaaacgtcgtaaagaagaacaagatagaaagcttaaagaaaaattagaaaagcgaaaagcacaacaataa

SEQ ID NO: 8336 - DNA, 897 bp, Staphylococcus aureus
  CDS (1)...(897)
atgaataatagcatatctgttacattagaaaaattttacactgaaacgaaagtcacttttaacgaccagttaacacaggatcaattttggttgaatggtgaaaaggttagtggcaaagaattagagaaaatttcaaaatatatggatattgtcagaaatagagctggcatcgattggtatgcagaaattgaaagcgacaattttgtaccaacagcagcagggttggcttcatcagcaagcgcatatgcagctttagcagcagcttgtaatcaagcgctagacttgcagctgtcagataaggatttatcgagattggcgcgaatcggttcgggttctgcgtcgcgtagtatttatggtggatttgcagaatgggaaaaagggtataatgatgagacgtcatatgccgttccacttgaatcgaatcattttgaagatgaccttgccatgatatttgttgtgattaatcaacattctaaaaaggtacctagtcgatatggtatgtcgttgacacgaaacacatcaaggttttatcaatattggttagatcatattgatgaagatttagctgaagcaaaagcagcgattcaagacaaagattttaaacgccttggtgaagtaattgaagaaaatggtttgcgtatgcatgccacgaatctaggatcaacaccgccgttcacatatcttgtgcaagaaagttatgatgtaatggcgctcgttcacgaatgccgagaagcggggtatccgtgctattttacgatggatgcgggtcctaatgtgaaaatacttgtagaaaagaaaaacaagcaacagattatagataaattattaacacagtttgataataaccaaattattgatagtgacattattgccacaggaattgaaataattgagtaa

SEQ ID NO: 8337 - DNA, 837 bp, Staphylococcus aureus
  CDS (1)...(837)
atggatttagcgagtaaatattttaatggcgtcaactggcgatatatcgaccattcttctggattagagcctatgcaatctttcgcattcgatgatacattttgcgaaagtgtgggcaaagatatatcagataatgttgtgcgtacttggattcatcaacatactgttattcttggtattcatgattcaagattgccgtttttaaaagatggcattgattatttaacgaatgagattggttataatgccattgttagaaattctggcggcctaggtgtcgttctagatcaaggtgtattaaatatatcgctgatgttcaaaggacaaacagaaacaacgattgatgaagcgtttactgtgatgtatctcttaattagcaaaatgttcgaagatgagaatgttgatattgatacgatggaaattgaacattcttattgcccaggaaaatttgacttaagtatcgatggtaagaaatttgcaggcatatcgcaacgaagagttagaggcggtattgctgtacaaatttatctttgtgttgaagggtctggttcagaacgtgcattgatgatgcaaacattttatgaacatgctttaaaaggtgaagtgactaaatttaaatatcctgaaattgaaccatcttgtatggcctcattagagacattgcttaacaaaacgattactgttcaagatgtaatgtttttactattatatgcaatcaaagatcttggcggtgtattaaatatgacgccaattactcaagaagaatggcaaagatacgatacgtattttgataaaatgattgaaagaaacaagaaaatgatagaccaaatgcaatag

SEQ ID NO: 8338 - DNA, 987 bp, Staphylococcus aureus
  CDS (1)...(987)
atggctgatttattaaatgtattaaaagacaaactttctggtaaaaacgttaaaatcgtattacctgaaggagaggacgagcgtgttctaacagctgcaacacaattacaagcaacggattatgttacaccaatcgtgttaggtgatgagactaaggttcaatctttagcgcaaaaacttaatcttgatatttctaatattgaattaattaatcctgcgacaagtgaattgaaagctgaattagttcaatcatttgttgaacgacgtaaaggtaaagcgactgaagaacaagcacaagaattattaaacaatgtgaactacttcggtacaatgcttgtttatgctggtaaagcagatggtctagttagtggtgcagcacattcaacaggcgacactgtgcgtccagctttacaaatcatcaaaacgaaaccaggtgtatcaagaacatcaggtatcttctttatgattaaaggtgatgaacaatacatctttggtgattgtgcaatcaatccagaacttgattcacaaggacttgcagaaattgcagtagaaagtgcaaaatcagcattaagctttggcatggatccaaaagttgcaatgttaagcttttcaacaaaagggtctgctaaatcagacgacgtgacaaaagttcaagaagctgtcaaattagcacaacaaaaagctgaagaagaaaaattagaagcaatcattgatggcgaattccaatttgatgctgcgattgtaccaggtgttgctgagaaaaaagcgccaggtgctaaattacaaggtgatgcaaatgtctttgtattcccaagtttagaagctggtaatattggttacaaaattgcacaacgtttaggtggatatgatgcagttggtccagtattacaaggtttaaattctccagtaaatgacttatcacgtggctgctcaattgaagatgtatacaatctttcaattattacagcagcgcaagccttacaataa

SEQ ID NO: 8339 - DNA, 879 bp, Staphylococcus aureus
  CDS (1)...(879)
atgactgaatttgatttatcgacacgagaaggtcgttggaaacactttggttccgtagatcctatcgaaggcacgaaacctactactaagaacgaaatgacagatttacaaagtacacataaagatttcttatttgaaatagaagaagttggtattaaaaacttagtgtaccctgtacttgttgaccagtatcaaacagctggcacatttagtttttcaacaagtttaacaaaagacgaaaaaggtattaatatgagccgtattattgaaagtgttgaaaagcactatgataatggtattgaacttgaatttaatacactttatcaggtgttacgcactttacaaacgaatatgaaacaaaatgcggcaggcgttgatgtttctgggaaatggttctttgatcgctatagtccaaccacaaatattaaagcagttggtaatgccgatgtcacttatggattagcaattgacggtgataaagttacacgtaaagaacttactattgaagcaactgtcacaacgctatgcccttgttcaaaagaaataagtgaatattcagcgcacaaccaacgtggtgttgtcactgttaaaacatatattaataaagatcaagacatagttgatgactataaaaacaaaattttagatgcaatggaagctaatgcaagttcaattctataccctattttaaaacgtcctgatgaaaaacgtgtgacagagcgtgcatatgaaaatccacgttttgtcgaagacttaattcgtttaattgccgcggacttagttgaatttgattggttagacggtttcgatatcgaatgtcgtaatgaagagtctatccatcaacatgatgctttcgctaaattaaagtatcgcaaataa

SEQ ID NO: 8340 - DNA, 2799 bp, Staphylococcus aureus
  CDS (1)...(2799)
atgaataataaaaagacagcaacaaatagaaaaggcatgataccaaatcgattaaacaaattttcgataagaaagtattctgtaggtactgcttcaattttagtggggacaacattgatttttgggttaagtggtcatgaagctaaagcggcagaacatacgaatggagaattaaatcaatcaaaaaatgaaacgacagctccaagtgagaataaaacaactgaaaaagttgatagtcgtcaacaaaataatattgaacaaagtacaacgtcagaccaaccaaaagtaaatgagtctgataatacttcagttaaagaaactactgaagaacctcaaaatacaacttctacacaaccaactaaacaaaataacgatgcgatggcaaataaagataatttagcggctcaaaatatttcaacgcaggctaaagatgtttcaactacgcctaaaacaacaactattaaaccaagaacattaaaccgcatggcagtgaatactgttgcagctccacaacaaggaacaaatgttaatgataaagtacattttacgaacattgatattgcgattgataaaggacatgttaataaaacaacaggaaatactgaattttgggcaacttcaagtgatgttttaaaattaaaagcgaattacacaatcgatgattctgttaaagagggtgatacatttacttttaaatatggtcaatattttcgtccaggttctgtaagattaccttcacaaactcaaaatttatataatgcccaaggtaatattattgcaaaaggtatttatgatagtgaaacaagcacaacaacatatacttttacgaattatgtagatcaatatacaaatattagcggtagctttgaacaagtcgcatttgcgaaacgtgaaaatgcaacgactgataaaactgcttatccaatggaagttacattaggaaacgataaatatagtaaaaacgtcattgtcgattatggtaatcaaaaaggtcaacaacttatttcgagtacaaattatattaataatgaagatttgtcacgtaatatgactgtttatgtaaatcaacctaaaaagacctatacaaaagaaacatttgtaacaaatttaactggttataaatttaatccagatgctaaaaactttaaaatttatgaagtaactaaccaaaatcagtttgtggatagtttcaccccagatacttcaaaacttacagatgtcactgataaatttaaaattacatacagtaatgataataagacggcgacagtagatttattgaatggtcaatctagtagtgataaacagtacatcattcaacaagtagcatatccagataatagttcaacagataatgggaaaattgattatactttagaaacacaaaatggtaagagtagttggtcgaacagttattcaaatgtgaatggctcatcaactgcaaatggcgaccaaaagaaatataatctaggtgactatgtatgggaagatacaaataaagatggtaaacaagatgccaatgaaaaagggattaaaggtgtttatgtcattcttaaagatagtaacggtaaagaattagatcgtactactactgatgaaaatggtaaatatcagttcacaggtttgggaaatgggacttacagtgtagaattttcaacgctagcaggttacacaccaaccactgcaaatgcaggaactgatgatgctgttgattcagatggactaactacaacaggtgtcattaaagacgctgacaacatgacattagacagtggtttctataaaacaccaaaatacagtttaggtgattatgtttggtacgacagtaataaagacggcaaacaagattcaactgaaaaaggtatcaaagatgttaaagttactttattaaatgaaaaaggcgaagtaattggaacaactaaaacagatgaaaatggtaaatatcgtttcgataatttagatagcggtaaatataaagttatttttgaaaagcctgctggcttaacacaaacaggtacaaatacaactgaagatgataaagatgcagatggtggcgaagttgacgtaacaattacggatcatgatgatttcacacttgataatggctactacgaagaagaaacatcagacagcgactcagattcagatagcgattcagactcagacagcgactcagattcagatagcgattcagactcagatagcgactcagattcagacagtgattcagattcagacagcgactcagactcagatagcgactcagactcagatagcgactcagattcagatagcgactcagattcagacagtgattcagattcagacagcgattcagattcagatagcgactcagactcagatagcgactcagactcagacagcgattcagactcggatagcgactcagattcagatagtgactcagattcagacagtgactcagattcaggtagtgactcagattcagacagcgattcagactcagacagcgattcagactcagatagcgactcagattcagacagcgattcagattcagatagcgactcagattcagacagcgattcagattcagatagtgactcagactcagacagtgattccgattcagatgtaggtaaacatactccggctaaaccaatgagtacagttaaagaccatcacaataaagcgaaagcattaccggaaacaggtagtgaaaataataattcaaataatggcacattattcggtggattattcgcggcattaggatcattattactattcggtcgtcgtaaaaaacaaaataaataa

SEQ ID NO: 8341 - DNA, 684 bp, Staphylococcus aureus
  CDS (1)...(684)
atggaatggatattatttgataaagatggtacgttaattgaatttgatagaagttgggaaaaaataggggtaagatttgtacaatcattgcttgagactttcccagtacataataaagaagctgctttaagacaactcggtgtcattaaagaatctattgatccaaaatcagtgatgggttcaggatctttacagcaaattattcaggcatttaatgatgtgactggacaagatacaaccgactggtccaagtcaacaagtcaaaagttggtagatgaacgtattcctgaaattaattgggtagaaggtgttaaagaagcacttatcgatttgaaagcaaaaggctatcaactaggtattgttacgagtgatactaaaaaaggcgtagaacaatttttagcacataccaatgctacctcgttgttcgatttgatcatttctaccgaagcggatgcctatgagaagccaaatcctaaagtattatcgcctttatttgagaaatataatgtagatcctcagaaagtagctatagtaggagacactgctaatgatatgaagacagcaagtaatgcaaatttaggtatggcaataggtgtattaacaggtattgcaacaaaagaagaattacatgaagctgatattattttaaatagtgcggcagatattttagaagctttaaattaa

SEQ ID NO: 8342 - DNA, 879 bp, Staphylococcus aureus
  CDS (1)...(879)
atgtcacaagatgtaaatgaattaagtaagcaaccaacgccagataaagcagaagataacgcatttttcccatcaccatattcccttagtcaatatacagcacctaaaacagattttgatggtgttgaacacaaaggtgcctataaagatggtaaatggaaagtattgatgattgctgctgaagagagatatgtattattggaaaatggaaaaatgttctctacgggtaatcatcctgttgaaatgttattacctttacatcatttaatggaagcaggttttgacgttgatgttgcgacattatctggttatccagctaaattagaattatgggctatgccaactgaagacgaggcagttataagcacttataataaattgaaagaaaaattaaaacagccaaaaaaattagcagatgtgattaaaaatgaattaggacctgattcagactatttatctgtctttatcccaggtggacatgctgcagttgttggtatttctgaaagcgaagacgttcaacaaacattagattgggcattagaaaatgaccgatttatagttacattatgtcatggaccagcagcactactttcagcagggcttaacagagaaaaatctccattagaaggatactctgtttgtgtcttccctgactcattagatgaaggtgcaaatattgaaataggttatttacctggacgcttgaaatggttagttgctgatttattaactaaacaaggattaaaagtagtcaacgacgatatgacaggaagaacgttaaaagatcgcaaattattaacaggtgacagtcctttagcttcaaatgagttaggaaaattagcagttaatgaaatgttaaatgcaatacaaaataaataa

SEQ ID NO: 8343 - DNA, 1188 bp, Staphylococcus aureus
  CDS (1)...(1188)
gtggttcaatcattacatgagtttttagaggaaaatataaattatctaaaagaaaatggtttgtataatgaaatagatacaattgaaggtgcaaacggaccagaaatcaaaatcaatgggaaatcatacattaacttatcttcaaataattatttaggactagcaacaaatgaagatttgaaatcggctgcaaaagcagctattgattcacatggtgtaggtgcaggcgctgttcgtacaataaatggtacattagatttacacgacgaattagaagaaacactagcaaaatttaaaggaacagaagctgcaatagcttatcaatcaggatttaattgtaatatggctgctatttcggctgttatgaataaaaatgatgctattttatcagatgagcttaatcatgcatcaattattgatggatgtcgcttatctaaagctaaaattattcgagttaaccattcagacatggatgatttacgtgcgaaagcaaaagaagcagttgaatcaggtcaatacaataaagtgatgtatatcactgatggcgtttttagtatggatggtgatgtggctaaattacctgaaattgtagaaattgcagaagaatttggtttattaacttatgttgacgacgctcatggttcaggtgttatgggtaaaggcgctggtacggttaaacattttggtttacaagataaaatcgatttccaaataggtacgctttctaaagcaattggtgtcgttggcggttatgtagcaggtacaaaagagttaatagattggttaaaagcacaatcacgaccattcttattctctacatcattagcacctggggatactaaagcaataactgaagcagttaaaaagttaatggcttcaactgaattacatgataaattatgggacaatgcacaatatttaaaaaacggattgtcaaaattaggatatgatacaggtgagtcagaaactccaattacaccagtaattattggtgatgaaaaaacaactcaagaatttagtaagcgtttaaaagacgaaggtgtctatgtgaaatctatcgtttttccaacagtaccaagaggtacaggacgtgtaagaaatatgcctacagctgcacatacaaaagacatgttagatgaagcaattgcggcttatgaaaaagtaggaaaagaaatgaagttgatttaa

SEQ ID NO: 8344 - DNA, 1185 bp, Staphylococcus aureus
  CDS (1)...(1185)
atggcaaaagaaaaatttgatcgttctaaagaacatgccaatatcggtactatcggtcacgttgaccatggtaaaacaacattaacagcagcaatcgctactgtattagcaaaaaatggtgactcagttgcacaatcatatgacatgattgacaacgctccagaagaaaaagaacgtggtatcacaatcaatacttctcacattgagtaccaaactgacaaacgtcactacgctcacgttgactgcccaggacacgctgactatgttaaaaacatgatcactggtgctgctcaaatggacggcggtatcttagtagtatctgctgctgacggtccaatgccacaaactcgtgaacacattcttttatcacgtaacgttggtgtaccagcattagtagtattcttaaacaaagttgacatggttgacgatgaagaattattagaattagtagaaatggaagttcgtgacttattaagcgaatatgacttcccaggtgacgatgtacctgtaatcgctggttcagcattaaaagctttagaaggcgatgctcaatacgaagaaaaaatcttagaattaatggaagctgtagatacttacattccaactccagaacgtgattctgacaaaccattcatgatgccagttgaggacgtattctcaatcactggtcgtggtactgttgctacaggccgtgttgaacgtggtcaaatcaaagttggtgaagaagttgaaatcatcggtttacatgacacatctaaaacaactgttacaggtgttgaaatgttccgtaaattattagactacgctgaagctggtgacaacattggtgcattattacgtggtgttgctcgtgaagacgtacaacgtggtcaagtattagctgctcctggttcaattacaccacatactgaattcaaagcagaagtatacgtattatcaaaagacgaaggtggacgtcacactccattcttctcaaactatcgtccacaattctatttccgtactactgacgtaactggtgttgttcacttaccagaaggtactgaaatggtaatgcctggtgataacgttgaaatgacagtagaattaatcgctccaatcgcgattgaagacggtactcgtttctcaatccgtgaaggtggacgtactgtaggatcaggcgttgttactgaaatcattaaataa

SEQ ID NO: 8345 - DNA, 2148 bp, Staphylococcus aureus
  CDS (1)...(2148)
atgcttagggcatcgccatatctatcgtatttattcagtaatataaactggaaggagaaaaaatacatggctagagaattttcattagaaaaaactcgtaatatcggtatcatggctcacattgatgctggtaaaacgactacgactgaacgtattctttattacactggccgtatccacaaaattggtgaaacacacgaaggtgcttcacaaatggactggatggagcaagaacaagaccgtggtattactatcacatctgctgcaacaacagcagcttgggaaggtcaccgtgtaaacattatcgatacacctggacacgtagacttcactgtagaagttgaacgttcattacgtgtacttgacggagcagttacagtacttgatgcacaatcaggtgttgaacctcaaactgaaacagtttggcgtcaggctacaacttatggtgttccacgtatcgtatttgtaaacaaaatggacaaattaggtgctaacttcgaatactctgtaagtacattacatgatcgtttacaagctaacgctgctccaatccaattaccaattggtgcggaagacgaattcgaagcaatcattgacttagttgaaatgaaatgtttcaaatatacaaatgatttaggtactgaaattgaagaaattgaaattcctgaagaccacttagatagagctgaagaagctcgtgctagcttaatcgaagcagttgcagaaactagcgacgaattaatggaaaaatatcttggtgatgaagaaatttcagtttctgaattaaaagaagctatccgccaagctactactaacgtagaattctacccagtactttgtggtacagctttcaaaaacaaaggtgttcaattaatgcttgacgctgtaattgattacttaccttcaccactagacgttaaaccaattattggtcaccgtgctagcaaccctgaagaagaagtaatcgcgaaagcagacgattcagctgaattcgctgcattagcgttcaaagttatgactgacccttatgttggtaaattaacattcttccgtgtgtactcaggtacaatgacatctggttcatacgttaagaactctactaaaggtaaacgtgaacgtgtaggtcgtttattacaaatgcacgctaactcacgtcaagaaatcgatactgtatactctggagatatcgctgctgcggtaggtcttaaagatacaggtactggtgatactttatgtggtgagaaaaatgacattatcttggaatcaatggaattcccagagccagttattcacttatcagtagagccaaaatctaaagctgaccaagataaaatgactcaagctttagttaaattacaagaagaagacccaacattccatgcacacactgacgaagaaactggacaagttatcatcggtggtatgggtgagcttcacttagacatcttagtagaccgtatgaagaaagaattcaacgttgaatgtaacgtaggtgctccaatggtttcatatcgtgaaacatttaaatcatctgcacaagttcaaggtaaattctctcgtcaatctggtggtcgtggtcaatacggtgatgttcacattgaattcacaccaaacgaaacaggcgcaggtttcgaattcgaaaacgctatcgttggtggtgtagttcctcgtgaatacattccatcagtagaagctggtcttaaagatgctatggaaaatggtgtcttagcaggttatccattaattgatgttaaagctaaattatatgatggttcataccatgatgtcgattcatctgaaatggccttcaaaattgctgcatcattagcacttaaagaagctgctaaaaaatgtgatcctgtaatcttagaaccaatgatgaaagtaactattgaaatgcctgaagagtacatgggtgatatcatgggtgacgtaacatctcgtcgtggacgtgttgatggtatggaacctcgtggtaatgcacaagttgttaatgcttatgtaccactttcagaaatgttcggttatgcaacatcattacgttcaaacactcaaggtcgcggtacttacactatgtacttcgatcactatgctgaagttccaaaatcaatcgctgaagatattatcaagaaaaataaaggtgaataa

SEQ ID NO: 8346 - DNA, 471 bp, Staphylococcus aureus
  CDS (1)...(471)
atgcctcgtaaaggatcagtacctaaaagagacgtattaccagatccaattcataactctaagttagtaactaaattaattatcaaaattatgttagatggtaaacgtggaacagcacaaaggattctttattcagcattcgacctagttgaacaacgcagtggtcgtgatgcattagaagtattcgaagaagcaatcaacaacattatgccagtattagaagttaaagctcgtcgtgtaggtggttctaactatcaagtacctgtagaagttcgtccagagcgtcgtactactttaggtttacgttggttagttaactatgcacgtcttcgtggtgaaaaaacgatggaagatcgtttagctaacgaaattttagatgcagcaaataatacaggtggtgccgttaagaaacgtgaggacactcacaaaatggctgaagcaaacaaagcatttgctcactaccgttggtaa

SEQ ID NO: 8347 - DNA, 450 bp, Staphylococcus aureus
  CDS (1)...(450)
gtgggattaaaaagtgaagagaggaggacatatcacatgccaactattaaccaattagtacgtaaaccaagacaaagcaaaatcaaaaaatcagattctccagctttaaataaaggtttcaacagtaaaaagaaaaaatttactgacttaaactcaccacaaaaacgtggtgtatgtactcgtgtaggtacaatgacacctaaaaaacctaactcagcgttacgtaaatatgcacgtgtgcgtttatcaaacaacatcgaaattaacgcatacatccctggtatcggacataacttacaagaacacagtgttgtacttgtacgtggtggacgtgtaaaagacttaccaggtgtgcgttaccatattgtacgtggagcacttgatacttcaggtgttgacggacgtagacaaggtcgttcattatacggaactaagaaacctaaaaactaa

SEQ ID NO: 8348 - DNA, 3597 bp, Staphylococcus aureus
  CDS (1)...(3597)
atgaaaataggattggcttcacctgaaaaaatccgttcttggtcttttggtgaagttaaaaaacctgaaacaatcaactaccgtacattaaaacctgaaaaagatggtctattctgtgaaagaattttcggacctacaaaagactgggaatgtagttgtggtaaatacaaacgtgttcgctacaaaggcatggtctgtgacagatgtggagttgaagtaactaaatctaaagtacgtcgtgaaagaatgggtcacattgaacttgctgctccagtttctcacatttggtatttcaaaggtataccaagtcgtatgggattattacttgacatgtcaccaagagcattagaagaagttatttactttgcttcttatgttgttgtagatccaggtccaactggtttagaaaagaaaactttattatctgaagctgaattcagagattattatgataaatacccaggtcaattcgttgcaaaaatgggtgcagaaggtattaaagatttacttgaagagattgatcttgacgaagaacttaaattgttacgcgatgagttggaatcagctactggtcaaagacttactcgtgcaattaaacgtttagaagttgttgaatcattccgtaattcaggtaacaaaccttcatggatgattttagatgtacttccaatcatcccaccagaaattcgtccaatggttcaattagatggtggacgatttgcaacaagtgacttaaacgatttataccgtcgtgtaattaatcgaaataatcgtttgaaacgtttattagatttaggtgcacctggtatcatcgttcaaaacgaaaaacgtatgttacaagaagccgttgacgctttaattgataatggtcgtcgtggtcgtccagttactggtccaggtaaccgtccattaaaatctttatctcatatgttaaaaggtaaacaaggtcgtttccgtcaaaacttacttggtaaacgtgttgactattcaggacgttcagttatcgcggtaggtccaagcttgaaaatgtaccaatgtggtttaccaaaagaaatggcacttgaactatttaaaccattcgtaatgaaagaattagttcaacgtgaaattgcaactaacattaaaaatgcgaagagtaaaatcgaacgcatggatgatgaagtttgggacgtattggaagaagtaattagagaacatcctgtattacttaaccgtgcaccaacacttcatagacttggtattcaagcatttgaaccaactttagttgaaggtcgtgcgattcgtctacatccacttgtaacaacagcttataacgctgactttgatggtgaccaaatggcggttcacgttcctttatcaaaagaggcacaagctgaagcaagaatgttgatgttagcagcacaaaacatcttgaaccctaaagatggtaaaccagtagttacaccatcacaagatatggtacttggtaactattaccttactttagaaagaaaagatgcagtaaatacaggcgcaatctttaataatacaaatgaagtattaaaagcatatgcaaatggctttgtacatttacacacaagaattggtgtacatgcaagttcattcaacaatccaacatttactgaagaacaaaacaaaaagattcttgctacgtcagtaggtaaaattatatttaatgaaatcattccagatttatttgcttatattaatgaacctacgcaagaaaacttagaaagaaagacaccaaacagatatttcatcgatcctacaactttaggtgaaggtggattaaaagaatactttgaaaatgaagaattaattgaacctttcaacaaaaaattcttaggtaatattattgcagaagtattcaacagatttagcatcactgatacatcaatgatgttagaccgtatgaaagacttaggattcaaattctcatctaaagctggtattacagtaggtgttgctgatatcgtagtattacctgataagcaacaaatacttgatgagcatgaaaaattagtcgacagaattacaaaacaattcaatcgtggtttaatcactgaagaagaaagatacaatgcagttgttgaaatttggacagatgcaaaagatcaaattcaaggtgaattgatgcaatcacttgataaaactaacccaatcttcatgatgagtgattcaggtgcccgtggtaacgcatctaactttacacagttagcaggtatgcgtggattgatggccgcaccatctggtaagattatcgaattaccaatcacatcttcattccgtgaaggtttaacagtacttgaatacttcatctcaactcacggtgcacgtaaaggtcttgccgatacagcacttaaaacagctgactcaggatatcttactcgtcgtcttgttgacgtggcacaagatgttattgttcgtgaagaagactgtggtactgatagaggtttattagtttctgatattaaagaaggtacagaaatgattgaaccatttatcgaacgtattgaaggtcgttattctaaagaaacaattcgtcatcctgaaactgatgaaataatcattcgtcctgatgaattaattacacctgaaattgctaagaaaattacagatgctggtattgaacaaatgtatattcgctcagcatttacttgtaacgcacgacatggtgtttgtgaaaaatgttacggtaaaaaccttgctactggtgaaaaagttgaagttggtgaagcagttggtacaattgcagcccaatctatcggtgaaccaggtacacagcttacaatgcgtacattccatacaggtggggtagcaggtagcgatatcacacaaggtcttcctcgtattcaagagattttcgaagcacgtaaccctaaaggtcaagcggtaattacggaaatcgaaggtgtcgtagaagatattaaattagcaaaagatagacaacaagaaattgttgttaaaggtgctaatgaaacaagatcataccttgcttcaggtacttcaagaattattgtagaaatcggtcaaccagttcaacgtggtgaagtattaactgaaggttctattgaacctaagaattacttatctgttgctggattaaacgcgactgaaagctacttattgaaagaagtacaaaaagtttaccgtatgcaaggggtagaaatcgacgataaacacgttgaggttatggttcgacaaatgttacgtaaagttagaattatcgaagcaggtgatacgaagttattaccaggttcattagttgatattcataactttacagatgcaaatagagaagcatttaaacaccgtaagcgccctgcaacagctaaaccagtattacttggtattactaaagcatcacttgaaacagaaagtttcttatctgcagcatcattccaagaaacaacaagagttcttacagatgcagcaattaaaggtaagcgtgatgacttattaggtcttaaagaaaacgtaattattggtaagttaattccagctggtactggtatgagacgttatagcgacgtaaaatacgaaaaaacagctaaaccagttgcagaagttgaatctcaaactgaagtaacggaataa

SEQ ID NO: 8349 - DNA, 3411 bp, Staphylococcus aureus
  CDS (1)...(3411)
atgtttagagacatttctccaattgaagattttactggtaatttgtcattagagtttgtggattaccgtttaggagaaccaaaatatgatttagaagaatctaaaaaccgtgacgctacttatgctgcacctcttcgtgtaaaagtgcgtctaatcattaaagaaacaggagaagttaaagaacaagaagtctttatgggtgatttcccattaatgactgatacaggtacgttcgttatcaatggtgcagaacgtgtaatcgtatctcaattagttcgttcaccatccgtttatttcaatgaaaaaatcgataaaaatggtcgtgaaaactatgatgcaacaattattccaaaccgtggtgcatggttagaatatgaaacagatgctaaagatgttgtatacgtgcgtattgatagaacacgtaaactaccattaacagtattgttacgtgcattaggtttctcaagtgaccaagaaattgttgaccttttaggtgacaatgaatatttacgtaatactttagagaaagacggcactgaaaacactgaacaagcgttattagaaatctatgaacgtttacgtccaggtgaaccaccaactgttgaaaatgctaaaagtctattgtattcacgtttctttgatccaaaacgctatgacttagcaagcgtgggtcgttataaaacaaacaaaaaattacatttaaaacatcgtttattcaatcaaaaattagctgagccaattgtgaatactgaaactggtgaaattgtagttgaagaaggtacagtgcttgatcgtcgtaaaatcgacgaaatcatggatgtacttgaatcaaacgcaaacagcgaagtgtttgaattgcatggtagcgttatagacgagccagtagaaattcaatcaattaaagtatatgttcctaacgatgaagaaggtcgtacgacaactgtaattggtaatgctttccctgactcagaagttaaatgtattacaccagcagatatcatcgcttcaatgagttacttctttaacttattaagtggtattggatatacagatgatattgaccatttaggtaaccgtcgtttacgttctgtaggtgaattactacaaaaccaattccgtatcggtttatcaagaatggaaagagttgtacgtgaaagaatgtcaattcaagatactgagtctatcacacctcaacaattaattaatattcgacctgttattgcatctattaaagaattctttggtagctctcaattatcacaattcatggaccaagcaaatccattagctgagttaacgcataaacgtcgtctatcagcattaggacctggtggtttaacacgtgaacgtgctcaaatggaagtacgtgacgttcactactctcactatggccgtatgtgtccaattgaaacacctgagggaccaaacattggattgattaactcattatcaagttatgcacgtgtaaatgaattcggctttattgaaacaccatatcgtaaagttgatttagatacacatgctatcactgatcaaattgactatttaacagctgacgaagaagatagctatgttgtagcacaagcaaactctaaattagatgaaaatggtcgtttcatggatgatgaagttgtatgtcgtttccgtggtaacaatacagttatggctaaagaaaaaatggattatatggatgtatcgccgaaacaagttgtttcagcagcgacagcatgtattccattcttagaaaatgatgactcaaaccgtgcattgatgggtgcgaacatgcaacgtcaagcagtgcctttgatgaatccagaagcaccatttgttggtacaggtatggaacacgttgcagcacgtgattctggtgcagctattacagctaagcacagaggtcgtgttgaacatgttgaatctaatgaaattcttgtacgtcgtctagttgaagagaacggcgttgagcatgaaggtgaattagatcgctatccattagctaaatttaaacgttcaaactcaggtacatgttacaaccaacgtccaatcgttgcagttggagatgttgttgagtataacgagattttagcagatggaccatctatggaattaggagaaatggcattaggtagaaacgtagtagttggtttcatgacttgggacggttacaactatgaggatgccgttatcatgagtgaaagacttgtgaaagatgacgtgtatacttctattcatattgaagagtatgaatcagaagcacgtgatactaagttaggacctgaagaaatcacaagagatattcctaatgtttctgaaagtgcacttaagaacttagacgatcgtggtatcgtttatattggtgcagaagtaaaagatggagatattttagttggtaaagtaacgcctaaaggtgtaactgagttaactgccgaagaaagattgttacatgcaatctttggtgaaaaagcacgtgaagttagagatacttcattacgtgtacctcacggcgctggcggtatcgttcttgatgtaaaagtattcaatcgcgaagaaggcgacgatacattatcacctggtgtaaaccaattagtacgtgtatatatcgttcaaaaacgtaaaattcatgttggtgataagatgtgtggtcgacatggtaacaaaggtgtcatttctaagattgttcctgaagaagatatgccttacttaccagacggacgtccgatcgatatcatgttaaaccctcttggtgtaccatctcgtatgaacatcggacaagtattagagctacacttaggtatggctgctaaaaatcttggtattcacgttgcatcaccagtatttgacggtgcaaacgatgacgatgtatggtcaacaattgaagaagctggtatggctcgtgatggtaaaactgtactttatgatggacgtacaggtgaaccattcgataaccgtatttcagtaggtgtaatgtacatgttgaaacttgcgcacatggttgatgataaattacatgcgcgttcaactggaccatattcacttgttacacaacaaccacttggcggtaaagcgcaattcggtggacaacgtttcggtgagatggaggtatgggcacttgaagcatatggtgctgcatacacattacaagaaatcttaacttacaaatccgatgatacagtaggacgtgtgaaaacatacgaggctattgttaaaggtgaaaacatctctagaccaagtgttccagaatcattccgagtattgatgaaagaattacaaagtttaggtttagatgtaaaagttatggatgagcaagataatgaaatcgaaatgacagacgttgatgacgatgatgttgtagaacgcaaagtagatttacaacaaaatgatgctcctgaaacacaaaaagaagttactgattaa

SEQ ID NO: 8350 - DNA, 609 bp, Staphylococcus aureus
  CDS (1)...(609)
atgagtcattattatgatgaagatccaagtgtaattagcaatgaacaacgtattcaatatcaattaaatcatcataaaattgatttaataactgataacggagtgttttcgaaagataaagtagattatggttcagatgttcttgttcaaactttttttaaaacgcatccacctggtccaagtaagcgaattgccgatgttggttgtggttacggaccaattggtttgatgattgctaaagtattaccacatcattcaattacgatgttagatgttaatcacagagcgctagccttagttgaaaaaaaccaaaaattaaacggtattgataatgtgatcgtaaaggaaagtgatgctttgtctgctgtggaagacaaaagttttgattttattttaaccaatccaccaataagagcagggaaagaaaccgtgcatcgtatattcgagcaagcattacatagattagactcgaatggtgaactattcgttgtaattcagaagaagcaaggtatgccatctgcaaagaaaagaatgaatgaactttttggaaatgtagaagtggtaaataaagataaaggatattacattctgagaagtataaaagcttga

SEQ ID NO: 8351 - DNA, 369 bp, Staphylococcus aureus
  CDS (1)...(369)
atggctaatcatgaacaaatcattgaagcgattaaagaaatgtcagtattagaattaaacgacttagtaaaagcaattgaagaagaatttggtgtaactgcagctgctccagtagcagtagcaggtgcagctggtggcgctgatgctgcagcagaaaaaactgaatttgacgttgagttaacttcagctggttcatctaaaatcaaagttgttaaagctgttaaagaagcaactggtttaggattaaaagatgctaaagaattagtagacggagctcctaaagtaatcaaagaagctttacctaaagaagaagctgaaaaacttaaagaacaattagaagaagttggagctactgtagaattaaaataa

SEQ ID NO: 8352 - DNA, 501 bp, Staphylococcus aureus
  CDS (1)...(501)
atgtctgctatcattgaagctaaaaaacaactagttgatgaaattgctgaggtactatcaaattcagtttcaacagtaatcgttgactaccgtggattaacagtagctgaagttactgacttacgttcacaattacgtgaaactggtgttgagtataaagtatacaaaaacactatggtacgtcgtgcagctgaaaaagctggtatcgaaggcttagatgaattcttaacaggtcctactgctattgcaacttcaagtgaagatgctgtagctgcagcgaaagtaatttctggatttgctaaagatcatgaagcattagaaattaaatcaggcgttatggaaggcaatgttattacagcagaagaagttaaaactgttggttcattaccttcacacgatggtcttgtatctatgcttttatcagtattacaagctcctgtacgcaacttcgcttatgcggttaaagctattggagaacaaaaagaagaaaacgctgaataa

SEQ ID NO: 8353 - DNA, 432 bp, Staphylococcus aureus
  CDS (1)...(432)
gtgcacatcgtggctaaaaaagtagataaagttgttaaattacaaattcctgcaggtaaagcgaatccagcaccaccagttggtccagcattaggtcaagcaggtgtgaacatcatgggattctgtaaagagttcaatgcacgtactcaagatcaagcaggtttaattattccggtagaaatcagtgtttatgaagatcgttcatttacatttattacaaaaactccaccggctccagtattacttaaaaaagcagctggtattgaaaaaggttcaggtgaaccaaacaaaactaaagttgctacagtaactaaagatcaagtacgcgaaattgctaacagcaaaatgcaagacttaaacgctgctgacgaagaagcagctatgcgtattatcgaaggtactgcacgtagtatgggtatcgttgtagaataa

SEQ ID NO: 8354 - DNA, 549 bp, Staphylococcus aureus
  CDS (1)...(549)
atgtctgaagaagttggcgcaaagcgttggtatgcagtgcatacatattctggatatgaaaataaagttaaaaagaatttagaaaaaagagtagaatctatgaatatgactgaacaaatctttagagtagtcataccggaagaagaagaaactcaagttaaagatggtaaagctaaaacaaccgttaaaaaaacattccctggatatgttttagtggaattaatcatgacagatgaatcatggtatgtggtaagaaatacaccaggcgttactggttttgtaggttctgcaggtgcagggtctaagccaaatccgttgttaccagaagaagttcgcttcatcttaaaacaaatgggtcttaaagaaaagactatcgatgttgaactcgaagttggcgagcaagttcgtattaaatcaggtccatttgcgaatcaagttggtgaagttcaagaaattgaaacagataagtttaagctaacagtattagtagatatgtttggccgagaaacaccagtagaagttgaattcgatcaaatagaaaagctttaa

SEQ ID NO: 8355 - DNA, 183 bp, Staphylococcus aureus
  CDS (1)...(183)
atggctaaaaaagaaagtttctttaaaggcgttaagtctgaaatggaaaaaacaagttggccgacgaaagaagagctatttaaatatactgtaattgtagtttctactgttatattcttcttagtctttttctatgccttagatttaggaattacagcattgaaaaatttattatttggttag

SEQ ID NO: 8356 - DNA, 525 bp, Staphylococcus aureus
  CDS (1)...(525)
atgaaagaacgttacttaatcattgatggatacaatatgataggacaatcaccaactctaagcgccattgcaaaagagaatttagaagaagctagaatgcaattaatagatgcaattgcaaattataatgctgttatttcagatgaaattatttgtgttttcgatgcttatgaccaatcgggtgttgaaagagaatacatgtatcatggtgttaaaacgatttttaccaaggaaaaagaaacagctgatagtttcatagaacgttatgtctatgaactttatgacaagcacactaagcatattacagttgtaacaagtgatatgagtgagcaacatgctatctttggatcaggtgcatatagaatatcatctcgcgaaatgtggagagatttaaaagaaaatgaaattgatgtgagtaaatcattagatgatataagtgaaaacaagccaagaactcgaattccgttatcttctgaaatccttgcagaatttgaaaaaatacgaagaggacatcataagaaatga

SEQ ID NO: 8357 - DNA, 681 bp, Staphylococcus aureus
  CDS (1)...(681)
atgtatttacgtagttcaatcattgaggaggaaatgatcttgttaaaaagaatgagagacgatataaaaatggtatttgagcaggatccagcggcacgttcaacattagaagtcattacaacgtatgcaggtttacatgcagtttggagtcatttgattgcacataagttatacaaccaaaaaaaatatgttgcagcacgcgcgatatctcaaatttcaagatttttcacaggtatagaaatccatccaggtgctaaaattggaaagcgtctatttatagatcatggtatgggcgttgtaataggagaaacatgtacaattggtgataatgtgacaatctatcaaggcgtgacacttggtgggacagggaaagaaagagggaaaagacacccagatataggagacaatgttttaatagcagcgggtgcgaaagttttaggaaatattaaaataaattcaaatgtaaatattggtgcaaattcagttgttttacaatcagttccaagttattcaacggttgttggtataccaggacatattgttaagcaagatggtgttcgagttggaaaaacatttgatcatcgccatctacctgatccaatttatgaacaaattaagcatttagaacgacaacttgaaaagactaggaatggagagattcaagatgattacattatataa

SEQ ID NO: 8358 - DNA, 1464 bp, Staphylococcus aureus
  CDS (1)...(1464)
gtgaaaaaaatgagcgatcgtataagagtaagatatgcaccaagtccaactggttatcttcatattggtaatgcaagaacagcattattcaattacttgtatgctaaacattataacggagattttgtgattcgaattgaagatactgataaaaaacgtaatttagaagatggagaaacatcacaatttgataatcttaaatggttaggattagattgggatgaatctgtagataaagacaatggctacggaccatatcgtcaatctgaacgtcaacatatctaccaaccattaatagatcagttactagcagaagataaagcatataaatgctatatgacagaagaagaattagaagctgaacgtgaagcgcaaatcgctcgtggtgaaatgcctcgctatggtggtcaacatgcgcatttgactgaagaacaacgtcaacaatttgaagcagaaggacgccaaccatcaattcgtttccgagtacctcaaaaccaaacgtattcttttgatgatatggtaaaagggaatatttcatttgattcaaatggtattggtgactgggttatcgttaaaaaagatggcattccaacgtacaattttgcagtagctatagatgattattacatggaaatttcagatgttattcgtggtgatgatcatatttcaaacacgcctaaacaaattatgatttatgaagcatttggctgggagccacctcgttttggtcatatgtcattaattgttaatgaagaacgtaaaaagttaagtaaacgtgatgggcaaattttacaatttattgagcaatatcgtgacttaggttatttacctgaagcgttatttaattttattgcgttattaggttggtctcctgaaggtgaagaagaaatcttttctaaagaagaatttatcaaaatctttgatgaaaagcgtttgtcaaaatcaccagcatttttcgataagcaaaaattagcatgggttaataaccaatatatgaaacaaaaagatactgaaacagtattccaattagcattacctcatttaattaaagcgaatttgattcctgaggtgccgtcagaagaggatttatcttggggacgcaaattaattgcgctttatcaaaaagaaatgagttatgccggtgaaattgttcctttatcagaaatgttctttaaagaaatgccagctcttggtgaagaagaacaacaagtgatcaatggagagcaagtaccagagttaatgacgcacttattcagtaaattagaagcacttgaaccatttgaagcggctgaaattaaaaagacaattaaagaagttcaaaaagaaacaggaataaaaggcaagcaattatttatgcctattcgtgttgctgtaacaggccaaatgcatggtcctgaattaccaaatacaattgaagtacttggaaaagaaaaagtgctaaaccgtttaaaacaatataagtaa

SEQ ID NO: 8359 - DNA, 1080 bp, Staphylococcus aureus
  CDS (1)...(1080)
atgatgacgattaaagttggaatcattgggtgtggtggtattgcgaatggcaagcacatgccaagtttacaaaaagttgaaaatgttgaaatgatcgcattttgtgacgtagacatttcgaaagcagcgtctgcagcagaagcatacggtactgacaatgcaaaggtttatgatgattacaaagcattgttaaaagatgacacgattgatgttatccatgtttgtacgccaaatgactcgcattgtgaaattactgtagcagggttgcatgccggtaaacatgtgatgtgtgaaaaaccaatggctaaaacgacagcagaagctcaaaaaatgatagatacagctaaatcaacaggtaaaaaattaacaataggttatcaaaatcgcttcagaccagatagtcaatttttatataaatcagcacaacgtggcgacttaggtgacatttatttcggaaaggcacatgctattcgtcgtcgagcagtaccaacatggggggtctttctagacgaagaagctcaaggtggcggaccattaatcgatatcggtacacacgctttagatttaacgttatggatgatggataattatgaaccagaatcagtgatgggttcaacattccataaattaaataaacagcatgatgcggcaaacgcttggggttcatggaatccagatgaatttacagttgaagattctgcgtttggctttattaaaatgaagaatggagcgacgattattttagaatccgcttgggcgattaattctttagaagtggatgaggcaaaatgttcattatcaggaacgaaagcaggtgctgatatgaaagatggtctacgtattcatggtgaagatatgggcacactttataccaaacacgttgaattggaaaacaaaggcgtcgacttttatgaaggtaatgaagtggatgaagctgaagaagaagcaaaagcttggattgatgcagttgtaaatgatactgaaccagttgtgaaaccggaacaagcaatggtagttacaaaaattcttgaagcaatttatcagtctgcaaaatcaggcaaagcaatttactttgaataa

SEQ ID NO: 8360 - DNA, 1041 bp, Staphylococcus aureus
  CDS (1)...(1041)
atgacaaaattaaaagttggtgtgataggtgttggtggtattgcacaagaccgtcatattccagcattgctgaaactcaaagacacagtctcattagttgcagtacaagatattaatacagtgcagatgattgatgttgcgaagcgctttaatatacctcatgtagttgagacacctagcgagctgtttaaacttgttgatgcggtggtcatttgtacacctaataaattccatgctgatctttctatagaagcattgaatcatggcgtccatgtattgtgtgaaaagccaatggcgatgacgacggaagagtgtgaccgcatgattgaagcggctaataaaaattgtaagttactaactgtcgcttatcattatcgccatacggatgtcgctatgactgctaaaaaagcaattgaatcaggtgtggttggtaaacctttagtagcacgtgtacaagcgatgcgtaggcgtaaagtgcctggctggggcgtttttaccaataaagcgttgcaaggtggcggtagtttaatcgattatggttgccacttgttagacttatctttgtggctactaggtaaagatatggtgccgcatgaagttctaggaaaaacatataatcaattgagcaaacaaccgaatcaaattaatgattggggaacatttgatcacactaaatttgatgtcgatgatcatgtgactagttatatgacatttgccaatcgagcaagcatgcagtttgaatgttcgtggtctgcaaatataaaggaagataaggtacacgttagtttatcaggcgaagatggcggtatcaatttatttccatttgaaatatatgagccccgctttggaactatttttgaaagcaaagctaatgttgagcataacgaagacattgctggtgagagacaggcgcgtaactttgtcaatgcgtgtttagggatagaagagattgtggtgaaaccggaagaagcacgcaatgtaaatgcccttatagaagcgatttatcgtagcgatcttgataacaagagcatacaactttaa

SEQ ID NO: 8361 - DNA, 969 bp, Staphylococcus aureus
  CDS (1)...(969)
atgaaaataggtgtattttcagtattattttacgataaaaattttgaagatatgttagattatgtcgcagaatctggattggatatgattgaagttggaacaggtggtaacccaggagataaattttgtaagttagatgagttgttagaaaatgaagataagcgacaagcatttatgaagtcaatcacagacagaggcttacaaataagtggtttcagttgtcataacaatccaatttctccagatccgacagaagcgaaagaagcggatgaaacgttacgtaaaacaatccgattagcaaatttattagacgtgccagttgttaatacattttctggcattgcaggatcagatgatactgctaaaaagcctaattggcctgttacaccttggccaacagcctactctgaaatttatgattatcagtggaatgaaaagttgataccatattggcaagatttagctgagtttgcaaaagagcaagatgtaaaaattgccatagagttgcatgcaggatttttagttcatacaccatatacgatgttgaagttgcgtgaggctacaaatgaatatatcggtgctaacttagatcctagtcatttatggtggcaaggtattgacccaattgctgcgattcgcatattaggccaagcaaatgcaattcatcacttccatgctaaagatacgtatattaatcaagaaaatgtaaatatgtatggcctaactgatatgcaaccatatggtaacgttgcaacaagagcatggacattccgtacagttggttatggacatagtccatatgtatgggcagatatcataagccaacttattattaatggatatgattatgtattaagtattgaacatgaagatcctattatgtcagtagaagaaggtttccaaaaagcttgtcaaactttgaaatctgttaatatttacgataagccagcagacatgtggtgggcataa

SEQ ID NO: 8362 - DNA, 2073 bp, Staphylococcus aureus
  CDS (1)...(2073)
atgaaaaagcaaataatttcgctaggcgcattagcagttgcatctagcttatttacatgggataacaaagcagatgcgatagtaacaaaggattatagtaaagaatcaagagtgaaagagaacagtaaatatgattcgccaatttcagactggtatttaagtagtgttttgaacaggttaggggatcaaatttactacgctaaggaattaactaataaatatgaatatggtgagaaagagtataagaaagcaatagataaattgatgactagagttttgggagaagatcaatatctattagaaaaaaagaaagcacaatatgaagtatacaaaaaatggtttgaaaagcataaaagtgaaaatccaaattctgatttaaaaatgactaaattccatgactttgatatatatagactaagtatgaaagaatacaatgagatacatcaatctataaaagaagctgttgacgattttaatagtgaagtaaaagaaattcaatataaagaaaaagatttagtaccatacaatgaagaaactgaaaagcgtgtaactaacggtatatatgactttgtttgtgagatagatacactatacgcagcatatttcaatcataatcaatatggtcataatgcgaaagagttaagagcgaagttagatattattcttggtgatgtaaaagatcctattagaattacaaatgaaagaataagaaaagaaatgatggatgacttaaattcgattattgatgatttctttatggatacaaatatgaatagaccattaaatataagtaaatataatcctgatattcatgattataccaacaagcctgaaaatagagctaacttcgataaattagttaaagaaacaagagaagcggtcgataaggcagatgattcttggaaaactaaaactgtcaaaaattacggtgaatctgtaacaaaatctcctgttgtaaaagaagagaagaaagttgaagaacctcaagcacctaaagttggtaaccaacaagaggttgaaactacagttgataaagctgaagaagcaacacaaccagtggcacagccattagttaaaattccacagggcacaattacaggtgaaattgtaaaaggtcccgactatctaacgatggaaaataaaacgttacaaggtgaaatcgttcaaggtcctgatttcccaacaatggaacaaaacagaccatctttaagcgataattatactcaaccgacgacaccgaaccctattttagaaggtcttgaaggtagctcatctaaacttgaaataaaaccacaaggtactgaatcaacgttgaaaggtattcaaggagaaccaagtaatattgaggttaaacctcaagcaactgaaacaacagaaacttctcaatatggtccgagaccgcaatttaacaaaacacctaagtatgtgaaatatagagatgctggtacaggtatccgtgaatacaacgatggaacatttggatatgaagcgagaccaagattcaacaagccaagtgaaacaaatgcatacaacgtaacgacaaatcaagatggcacagtatcatatggcgctcgcccgacatacaagaaaccaagtaaaacaaatgcatataacgtaacaacacatgcaaacggccaagtgtcatacggagctcgcccaacacaaaacaagccaagcgaaacaaacgcatataacgtaacaacacatgcaaacggccaagtatcatacggagctcgcccgacacaaaacaagccaagcgaaacaaacgcatataacgtaacaacacatgcaaatggccaagtatcatacggcgcccgcccaacatacaacaagccaagcgaaacaaatgcatacaacgtaacaacgcatgcaaacggccaagtatcatacggagctcgtccgacatacaagaagccaagcgaaacaaatgcatacaacgtaacaacacatgcaaacggccaagtatcatatggcgcccgcccaacatacaacaagccaagcgaaacaaatgcatacaacgtaacaacacatgcagatggtactgcgacatatgggcctagagtaacaaaataa

SEQ ID NO: 8363 - DNA, 1194 bp, Staphylococcus aureus
  CDS (1)...(1194)
atgataaccatgcaagaagcatacattgtagcttatgggcgttcagccgcagcgaaagcaaagcaaggcgcattattccacgaaagacctgatgatgtcgcagccaaagtattacaaggcgtattgaaacgtattgatggaaaattcaataagaatatgattgaagatgtcattgttggtacggcttttccagaaggattacaaggacaaaacattgcacgaacgattgcattgcgtacgggtttatctgacacggtaccgggtcaaacagtgaatcgctactgctcatcaggattacaaaccatcgcgattgcagccaatcaaattatggctggtcaaggagatatacttgtagctggtggcgttgaattgatgagtgccgtaccaatgggtggcaacgagcccacaaacaatccaaccttacaatatgatgatataggtgcgtcatatcctatgggtttaactgctgaaaatgtagcatcccaatttgacgtatcacgcgaagaccaagatgcttatgctgtcagaagtcatcaacgtgcctatgacgcacaacgtgatggtcggttcaaagatgaaattattccaatacaagtaaactcagttgaatatacaaacgcaggaccaaaagtacacacaaatatctttgaccaagatgaatttatacgacctgataccacgatggaggcattagccaaattacgtacagtatttaaagctgacggcactgtgactgcaggaacatctgccccactttctgatggtgcaggatttgtagttttaatgtctggagataaagtgaaagaactcggcgtgacacctattgcacgattcgttggttataaggcagtaggtgttgacccgaaaattatgggtattgggcctgcatatgcgattcctgaagtattgtcactcagcaatctatctgttgaagatattgatttgatcgaattgaacgaagcatttgcttctcaaacgattgcatctatcaaagaagtaggtctagatatatcacgtacgaatgtgaatggtggcgctattgctttaggtcatccattaggtgctacaggcgcaatgttaaccgcgcgtttacttaatgaaatgggtagacgtcccgatagccgttacggcatggttacgatgtgtattggtgtcggtatgggtgcagctgctatatttgagtatgtgcgttag

SEQ ID NO: 8364 - DNA, 2262 bp, Staphylococcus aureus
  CDS (1)...(2262)
atgacaattaataaagtaaccgttcttggcgcaggcacaatgggcgctcaactggcagcactctttgtgaatgctggacttaaagtaaaactattagatattgtagtggacaaaaacgatccaaatctcattgcgaaaaaatcttacgataaaattacagataagaaacgaccgctactattcgacttaaatctagcgagtcatttaacatatggtaattttgatgatgacttggtaaatgatgatgctgatttatatatcgaagcagtcaaagaagatattgaaattaagcatgctgtttggcaacaagttctacaacatgctaaagaagatgctttattcgctacaaatacatcaggtattccaattaatgcgattgctcaagcatttaacgagaaggatcaagaacgattctttggtctacatttctttaacccaccacgtattatgaaattagtggagttaatacctacgtcacacacgaaggaatctattatattagatgtaaaaaatttcgcgcaaaatgtgttaggtaaaggtgtcattgtcgtcaatgatgtgcctggctttgtcgcaaatagagtcggcacgcaaacaatgaatgatattatgtatcgcgccgagcaacacaagttaagcattgtagatgtagatgctttaactgggcaagcgattggtcgtcctaaaacaggtacatatgccctatctgacctagtcggtttagatattgcagtgtctgtaattaaaggcatgcaacaagtacctgaagaaacaacttattttcatgatgtcaaaattgtaaatacgttgtttgaaaatggcgcactcggacgtaaaacgaaacaaggattttacaaaaagaataaagaaactaaagctcgacttgtttacgatgttgaaaaacaagattatgtacctgtatcgcaaccacaattaccaattttaaatgaatttaataaagacttagtgcataaccttgatgtcatattcaatgcgcaagacgaagcgggactatttttatgggagacattacgtaataatttctattactctgctatcaatgtacctaaagctaccgatgatttccgagacatagatcgtgcgcttgtctgggggttcaactggaaacttggtccattccaattatgggatgcaatgggatacgaacgtgttaaaacacgtatggaagacgaacttggagacttaccacaatggattagtgatttagacggtggcttttataaacaagatgagaccattgaatatgcaacacctgtttctcacttcgtaaaagacgaactttgggataaaggtgatgccaaactttccgtaactcatgatgatcaactgctactgaaattacaaagtaaaaataatgtcattaccgatgaattcaacgatgcgttagttgatgcaattgattttctggaaaatgaacattacacaagtatggttatttatgcagatggtaataatttcagtgtgggtgctaaccttttcttaatgaaaaaggcacatgaagacggtcttgtagatgatgtcgttgcacaatcaattgataaattgcattatagctttaatcgtttgaagtatagtttgaaaccagtagtcacagctgttcaaggtcgtgccttaggcggtggctgtgagcttgtactttactcacctattgttgtcgctgcaagtgaaacatatatcggtcttgttgaagcaggtgttggcttattaccgagtggcggtggccttgcagaaatggctgatcgcatattacgcacatcgcataagtttgatgacaaacaagcttccatgacaaaagtactgaccaatatcgcatttgcgaaagtctctacaaatgcctttgaggcacgccgttatggttatttacgtgatacagatacgattattttcaatacagcacaacgtgtcgaagttgcgctcaaacgtgcgaaatatgaagcagaaacaaactatattccgaatcctagacatcaatatatcgctttaggcgaagacttcaaagcattaatccaaggacaattagatgcgcaaagacgggggcattttattagcgaccatgattatcatatcgccttaaatatcgccacaattttagcgggtggtgatttaccaagaaatacatttatcaatcaacgttacattcaatcgttggagaaaattggctttattgacttactaaaatctaaaaaatcatatgaaagaattgcgcatatgttaaaaactggtaagccattacgtaattaa

SEQ ID NO: 8365 - DNA, 2118 bp, Staphylococcus aureus
  CDS (1)...(2118)
atgctcaaaggaggatcgaacatgaacggggataatcagcaaatactcagagaaattgtattgaatcctactattcatggtaaagaacttgaatcgatatttggtttgtctcgtagacaacttggatatcgcattcaaaaaatcaatttgtggcttgaacaagagggttatccaaaacttgaaagaacaagccaaggaaattttattgtaagttctgaaatcatgacgttattcaagcgagatgtatcggagcagcaaatgttaaacggcaacaatgtcatttttagcatagaaacacgtcgttattatttaatgctcatgctttttagtaaggaaaacgcaatgtctctaaaccatttttcaattgatttacaagtcagtaaaaatactgtcattcacgatataaatcatgtgaaagagcaattggaagatcatggtttgtcacttaagtattctcgaaaacatggttatgaaattgttggtgatgaatttgaagttcgccgtttcttcattaagttgattgatcaaaggttaaatcatgatattactaaaagtgaagttttaaaggcgctcaacttaacattcgaagatatcgcatatcaaaaagacaagatcaaacaggtagaacaatttttgaagagtcgctttatagacaaatcacttagttcattgccttatgtcctttgtgtgattcgtagacgaattcaaaatggtcatgtgattaatccattaaatattaattatcagtatttgagggatacgaaagaatatcaagcaacggagattatgacgcaacatgagccggatttgccagaagcggaaaagttatatttgacattacacttactttcaacaagtgtgcaatggactgatttgcaggaatcagataacatatcgaatttaacgatggccatcgctcaaatgattcaccattttgaacaaatcacttttattaacattgaagataaggagaaattatcacagcaactcttgttacatttaacgcctgctttttataggattaaatacaacttaacggatcgtgatgaattaataaatcctttacaaggaaattatcaatccttatttcatatggtgaaacaatcatgtcaatcgttaactgaatatttcggaaaatcgttgcctgataatgaaatagcatatttaaccatgttgttcggaggtagtttgagacgtcaagatgaaaacttcgatggcaagataaaagctattatcgtgtgtacacaaggcacgtcagtatcacaaatgatgttatacgagttgagaaacttatttccagaaattattttcttagatgcgatttcacttagaacatttgaaaattacacattagattatgacatcgtcttttcaccaatgtttgtcctaacacataaaaaattatttatcacaaaagtagctttatctgaaaatgaacaacgaaagttacgtaaagaagtgatgaagtacattaataaggaatcggctgacattgataaggaaataaacaagttaatggcattaattgaacgcactacgacagttaatgacattacagaactacgtgatggtttagaagattttattgcgaattataattcaatttcaaccattaatggatcgattgtcacacaaaataagacattagatttagctgacttgatacccgcaaggcacgtgaaaagaatacatcatgttgaaaatattgatgaagctattgctaaagcaagtgatgtgttagttgctaatcattttattgatattaaatatattcatgagatgcaacaggcatttgatgattcgtatatggttatcatgcaaaatattgctattccacatgcatactctgaaaagcatgtacataaaacggcgatgagtatgttgatattacaagaaccaatatacatgtcagatggcacagcaatccatattattgtacctattgctgctgttgataaagtgacacacttaagagcgttattacaattgagagatgtggcgcaagacaatgacgcaattaagcgcatcatacaaagtcgcaaaaattctgatgtaaatgagattttaaaaaattattcaaataaagaagcgagggaaaatggatgggacagcaattag

SEQ ID NO: 8366 - DNA, 1065 bp, Staphylococcus aureus
  CDS (1)...(1065)
gtgtttgtggtgaaagctttagtaaaaacaagagaaggacatggcaacttagaacttcttgataaagaagttgcaacaccgctagatgataaagtaaagattaaagtacattatgcaggaatttgtggcacagatattcatacttatgaaggtcattataaagttaattttccagtgacattaggtcatgaattttctggtgaaatcgttgaagttggagcagacgttaaagattttaaagttggtgaccgtgtcacttctgaaacgacattctatgtttgtaatgagtgtgaatactgtgaatcaaaagactataatttatgcaaccatcgaaaaggtattggaacacaagttgatggcgcatttactaattatgtcattgcacgtgaagaaagtttgcatcatattccagatgaagtatcgtaccagtctgcagctatgacagaaccattagcatgtgcacatcatggcgtttctaagattcaagtgaactctggcgatgtagcagttgtaatggggcctgggccaatcggattacttgtagcacaagtgttaaaaagtaaaggcgcaactgttgtggtaactggattggacaatgacaaagtcagattagataaagcagaagcattgcacatggattatgtagtcaatttacaacaaacagacttaaaaacgtatatcaatggaattacagacggttacggtgcagatgttgttgttgaatgttcaggtgcagttccagcagcacgacaaggtttggatattttacgcaaaaaaggtttctacagtcaaataggtatttttaaggatgctgaaatcccatttgatatggaaaaagtgattcaaaaagaaataacagttgttggtagtagaagtcaaaagccagcagattgggaaccttcattgcaacttatggctgatggtttagtaaatgctgaagctttggtgacaaaaatatatgatatttcgaaatgggacgaggcgtatcaacatttaaaatctggcgaaggtattaaagcattacttaagccgctcgatttagatgaaaatgaaggagagaattaa

SEQ ID NO: 8367 - DNA, 135 bp, Staphylococcus aureus
  CDS (1)...(135)
atgctaacttttatgcttgggccattgagacaaatcactgatttttatatggaacatttactcgtaagtaattccatcgtcattgcaggttattttgcgacaggtatttttaaaaagaaaaaagttgtgaattaa

SEQ ID NO: 8368 - DNA, 1044 bp, Staphylococcus aureus
  CDS (1)...(1044)
gtgaaagcattgaaattatatggcgtggaagatttacggtatgaggataatgaaaagccagtcattgaaagtgtgaatgacgttattgttaaagtacgagcgactggcatatgtggttcagacacgtcacgatacaaaaaaatggggccatacattaaaggtatgccatttggtcatgaattttcaggtgttgtagatgccattggaagtgatgttacgcatgttaatgtaggcgacaaagtgacaggttgcccagcaataccttgttatcaatgcgagtattgtttaaaaggtgaatatgcacgatgtgaaaagttgttcgtcattggctcatatgaacctggatcgttcgcggaatatgtcaaattgccagcgcaaaatgttttaaaggttccagacaatgttgattacattgaagcagcaatggttgaaccatcagccattgttgcgcatgggttttataaatcaaatatacaacctggtatgactgttgcagtaatggggtgtggcagtataggattgttagctattcaatgggcacgaatatttggtgctgcacatatcatcgctatagatatagatgcgcataaactagatattgcaacatcattgggcgcacatcaaacaattaattcaaaagaagaaaatcttgagaaattcatcgaaaatcattacgccaatcaaatcgatttagctatagaatcatcaggtgctaaagttacgattggtcaaatattgacgctaccgaaaaaaggtggcgaggtggtattactcggaataccatatgatgatattgagattgaacgcgttcattttgaaaaaattctgcgtaacgagttgacagtatgtggctcttggaactgtttgtccagtaattttccgggcaaagagtggacggcaaccttacattatatgaagacgaaagatattaatgtaaagcctattatttctcattttttaccgttagaaaaaggcccggagacatttgataaattagttaacaagaaagaacgatttgataaagtcatgtttacgatttattag

SEQ ID NO: 8369 - DNA, 729 bp, Staphylococcus aureus
  CDS (1)...(729)
atggaggacaacatgatttatgcaggtattttagcaggaggtattggttcgagaatgggaaacgtgccattaccaaaacaatttttagatattgataataaaccgattttaatccatacaattgagaagttcattttagtgagtgaatttaatgagattattattgcaacgccagcacagtggatttcccatacacaggatattttaaaaaaatataacattacagatcaacgtgtcaaagtagttgcaggtggtacggatcgaaacgaaacaatcatgaacattatcgaccatattcgcaatacgcagggtatcaatgatgatgatgtgattgtaactcatgatgccgtaagaccatttttaactcaacgtattattaaagagaacattgaagtagcagcaaaatatggtgcagtagatacagtcattgaagcaattgatacgattgtaatgtctaaagataaacagaacatacacagtatccctgtaaggaatgaaatgtatcaaggccaaacaccacaatcatttaatattaaattattacaagatagttatcgcgccttaagtagtgcacaaaaagaaatcttatcagatgcatgtaaaatcattgtcgaatctggacatgcagttaaattggtacgtggagaactctacaacattaaagtgacaacaccgtatgatttaaaagtagcaaatgccattattcaaggtgatattgccgatgattaa

SEQ ID NO: 8370 - DNA, 1053 bp, Staphylococcus aureus; identical to SEQ ID NO: 4694
  CDS (1)...(1053)

SEQ ID NO: 8371 - DNA, 1695 bp, Staphylococcus aureus
  CDS (1)...(1695)
atgacaaaaacgaaacaagcaatacatattgataacatatactgggaacgtgttcagttatatattgaaggacatagtgaaggtgtcgatttaacatcaggacaatttgttctgaggaatttaaccgaaacaaaaacattagaagcaaatgaaatgaaaatagacggtaataaatttatatgtagattcaacgtcgcaatattagacgatgggtattatttaccaatggataaatatttatttgtttatcatgaccagttagagtatattggacaacttaatccaaatattattgatcaagcttatgcggcattaaatgaagagcaaattgaagaatacaatgagctgactacacaaaatggaaaatcaaactatgtgttagccaacgaagctaaagttttccgcaaaggtggcgtatcacaacatacggtctataccattactccggaaatagcaagtgacgttaacgaatttgtatttgatattgaaatcaccttacctcaagagaaatcaggggtcattgcgacaagcgcacactggcttcataaacaaggccataaagcttcatttgaaagtagaagtttcttatttaaagctatttttaatattacaaagttactacatattaaaagaagcaaaacaatattattcacatcagattcacgtccgaatttatcaggtaactttaaatatgtatatgatgagttactacgccaaaaagtagattttgattacgatattcaaacagtatttaaggcgaatattacggatagacgtaaatggagagacaagtttagattgccatatttacttggtaaggccgattatatttttgtcgatgatttccatccattaatttatacggttcgctttagaccatcacaagaaattattcaagtgtggcatgccgttggtgcttttaaaacagttggctttagtcgtacaggtaaaaaaagtggtccgtttatcgattcattaaaccatcgtagttacacgaaagcatatgtttcatcagaaaccgatattccattttatgctgaagcatttggaattagagaagaaaatgttgtaccaacaggtgtaccacgtactgatgtactatttgatgaagcttatgcaacacaaattaaacaagagatggaagatgaattgccaattataaaaggtaagaaagttattctattcgcaccgacatttagaggtaatggtcacggtacggcacattatccattttttaaaattgattttgaacgtttagcaagatactgtgaaaaaaataatgcggttgtattatttaaaatgcatccatttgtaaaaaatagactcaatatttcacgtgaacacagacaatactttatcgatgtatcagattatcgtgaagtcaatgatattctctttgttacagacttattgattagtgattattcatcattaatatatgaatacgcagtatttaaaaagccaatgattttctatgcatttgacttagaagattatattacgacacgtgatttttatgagccatatgaatcatttgttccaggtaaaattgtgcaatcctttgatgcattaatggatgctttggataatgaagattatgaggttgaaaaagttgtgccattcttagataaacattttaaatatcaagatggtcgctcaagtgaacgtttagtcaaagatttgtttagacgctaa

SEQ ID NO: 8372 - DNA, 1233 bp, Staphylococcus aureus
  CDS (1)...(1233)
atggttacaatgagcttgctcatacatattaatataattacaaaaacacgtcggaggtacgacatgattaaaactacaattaaaaaattgatagaacacagtatatatacgacttttaaattactatcaaaattgccaaacaagaatctaatttattttgaaagctttcatggtaaacaatacagcgacaatcccaaagcattatatgaatacttaactgaacatagcgatgcccaattaatatggggtgtgaaaaaaggatatgaacacatattccaacagcacaatgtaccatatgttacaaagttttcaatgaaatggtttttagcgatgccaagagcgaaagcgtggatgattaacacacgtacaccagattggttatataaatcaccgcgaacgacctacttacaaacatggcatggcacgccattgaaaaagattggtttggatattagtaatgttaaaatgctaggaacaaatactcaaaattaccaagatggctttaaaaaagaaagccaacgttgggattatctagtgtcacctaatccatattcgacatcgatatttcaacatgcatttcatgttagtcgagataagattttggaaacaggttatccaagaaatgataaattatcacataaacgcaatgatactgaatatattaacggtattaagacaagattaaatattccattagataaaaaagtgattatgtatgcgccaacttggcgtgacgatgaagcgattcgagaaggttcatatcaatttaatgttaactttgatatagaagctttgcgtcaagcgctggatgatgattatgtcattttattacgcatgcattatttagttgtgacacgtattgatgaacatgatgattttgtgaaagacgtttcagattatgaagacatttcggatttatacttaatcagcgatgcgttagttaccgactactcatctgtcatgttcgacttcggtgtattaaagcgtccgcaaattttctatgcgtatgacttagataaatatggcgatgagcttagaggtttttacatggattataaaaaagagttgccaggtccaattgttgaaaatcaaacagcactcattgatgcattaaaacaaatcgatgagactgcaaatgagtatattgaagcacgaacggtattttatcagaaattctgttcattagaagatggacacgcgtcacaacgaatttgccaaacgatttttaagtga

SEQ ID NO: 8373 - DNA, 717 bp, Staphylococcus aureus
  CDS (1)...(717)
atgaaatacgctggtattctagctggaggtataggctcaagaatgggtaacgtacctttacctaaacaatttttagatttagacaacaaaccgattttaatccatacattagaaaaatttattttaattaatgattttgaaaaaattattatcgcgacgccacaacaatggatgacgcatacgaaagatacacttagaaaattcaaaatttctgatgaaagaattgaagtcattcaaggtggtagagatcgtaacgatacaattatgaatatcgttaaacatattgaatcaacaaatggtattaacgatgacgatgtcattgtgacacatgatgcagttagaccatttttaacgcatcgtattattaaagaaaatattcaagctgctttagagtacggtgcagtagatacagtgattgatgctatagatacgattgttacatctaaagataatcaaacgattgatgcaattccagtgcgtaatgaaatgtaccaaggtcaaacacctcaatcgtttaatattaatttattaaaagaaagctatgcacagttaagtgatgagcaaaagagtgttttatctgatgcttgtaagattattgtagaaacaaacaaaccggttcgacttgtaaaaggtgagttatataacattaaagtaacaacaccttacgatttaaaagtagcgaatgctattattcgaggtggtattgccgatgattaa

SEQ ID NO: 8374 - DNA, 1053 bp, Staphylococcus aureus; identical to SEQ ID NO: 4657
  CDS (1)...(1053)

SEQ ID NO: 8375 - DNA, 1557 bp, Staphylococcus aureus
  CDS (1)...(1557)
atgaaggcgaatgatgtcaaaatagatgggaatcaattcgtttgtcgtttcaatgtagctatcttagataatggttattacttacctgaagataagtacttattagtgaatgagcaagaacttgattatattgcacagttaaacccagatgtgattaatgatgcatatcaaaatctaaagccagaacaagaagaagaatacaacgaattagaaacacaaaatggtaaaatcaatttcttattgcagacttacctaaaagaatttagaaaaggcggcatttcaaagaaaacggtttatactgttacacctgaaatttctagcgatgttaatgaatttgtccttgatgttgttgtaacgactccggaagttaaaagtatttatatcgttcgtaaatataaagaattacgtaagtatttccgcaaacaatcatttaatacaagacaatttatttttaaagcgatatttaatacgacgaaatttttccacttgaaaaaagggaatacggtgttgttcacatcagactctagaccaacgatgtctggaaactttgaatacatctataacgaaatgttacgtcaaaatttagataaaaagtatgatattcacactgtttttaaagcgaatattacagatagacgtggcatcatcgacaagtttagattgccatatttacttgggaaggcagactacatctttgttgatgactttcacccattgatttatacagtgcgttttagacgttctcaagaagttattcaagtatggcatgccgttggtgcctttaaaacagttggctttagtcgtactggtaaaaagggtggaccatttattgattcattaaatcatcgtagctatacaaaagcttatgtatcatctgaaaccgatattccattctacgctgaagcatttggtattaaagagaaaaatgtagtgcctactggtgttccacgtactgatgtactatttgatgaagcttatgcgacacagatcaaacaagagatggaagatgaattaccaattattaaaggtaagaaagtcattcttttcgcaccaacatttagaggtagtggtcatggtacagcacattacccatttttcaaaattgatttcgaacgtttagcaagatattgcgaaaaaaataacgcggttgtattatttaaaatgcatccatttgtgaaaaatagacttaatattgcagacaaacataaacaatattttgttgatgtttctgactttagagaagttaatgatatactgttcataacagatttattaattagtgactattcatctttaatatatgaatatgcagtatttaaaaagccaatgattttctatgcatttgatttagaagattatattacgacgcgtgatttttatgagccatatgaatcatttgttccaggtaaaattgtgcaatcatttgacgcattaatggacgccttggacaatgaagattatgaaggagaaaaagtcattccattcttagataaacattttaaatatcaagatggccgatcaagtgagcgtttagtcagaaatttatttggtagctaa

SEQ ID NO: 8376 - DNA, 1722 bp, Staphylococcus aureus
  CDS (1)...(1722)
atgatgaaattttcagtaatagttccaacatacaattcagaaaagtatataacagaattactcaatagccttgcgaaacaagattttccgaaaactgaatttgaagtggttgtagttgatgactgttcaacagatcaaacgttacaaatagttgaaaagtatcgtaataaattgaacttgaaagtaagtcaactcgaaacaaattctggtggtccgggtaaacctagaaatgtggcgttaaaacaagcagaaggtgaatttgtattatttgtggactccgatgactatataaacaaagagactttaaaggatgcagcagcatttattgatgaacatcactcagatgttttattgattaaaatgaaaggtgttaatggtcgtggtgtaccacaatctatgtttaaagaaacagcacctgaagttactttgttaaattcaagaattatctatactttaagcccgactaaaatctatagaacagcattactaaaagataatgacatatattttccagaagaattaaagagtgcagaagatcaattatttacaatgaaagcatatttgaatgcaaatcgaatcagtgtgttaagtgataaagcgtattattatgctacaaagcgtgaaggggaacatatgagtagtgcgtatgtttcacctgaagacttttacgaagtcatgagattgattgctgtagaaatattaaatgcagatttagaagaagcccataaagatcaaatcttagcagaatttttaaatcgtcattttagtttttctcgtacgaatggcttctcacttaaagttaaactagaagagcaaccacaatggattaatgctctaggagactttatacaagcagttccagaacgtgtagatgcattggtgatgagtaaattacgaccattgttgcactacgcgagagcgaaagatatagacaactatagaactgtagaagaaagttaccgtcaaggtcaatactaccgttttgatattgtagatggtaaattaaacattcaattcaatgaaggcgaaccatactttgaaggcattgatatcgctaagccaaaagtgaaaatgacagcatttaaatttgataatcataaaattgttacagagctaacgttaaatgaatttatgattggcgaaggacattatgatgtcagacttaaattacattcacgaaacaagaagcacacaatgtatgtacctttaagtgtcaatgcgaacaaacaatatcgttttaacattatgttagaagatattaaagcgtatttacctaaagaaaaaatttgggatgttttcttagaagtccaaataggtacggaagtatttgaagtgcgtgttggtaatcaacgtaataaatatgcttatactgcagaaacaagtgcattaattcatttgaataatgatttttatagattaacaccgtatttcacaaaagactttaataacatttcgttatactttacagctattacattaacggattcattctcaatgaagttaaaaggtaaaaacaaaatcattttaacgggtctggatcgtggttatgtatttgaagaaggtatggctagtgtcgtgctaaaagacgacatgattatgggaatgttaagccaaacgtcagaaaacgaagtggaaatcttacttagtaaagatattaagaagcgagacttcaaaaatattgttaagttaaacactgcacatatgacttattcgctaaaataa

SEQ ID NO: 8377 - DNA, 693 bp, Staphylococcus aureus
  CDS (1)...(693)
atgaggaggtcgtctataatgataaataaaaatgatatagtagcagatgtagtaacagattatccgaaagcagcagatatttttagaagcgtaggtatagacttttgctgtggtggacaagtaagtatagaagcagcatccttagaaaagaaaaatgtagatttgaacgaattattacagcgtctcaacgacattgaacaaacgaatacaccaggttcgcttaaccctaaatttttaaatgtttcgtcacttattcaatatattcaagcagcatatcatgaacctcttagagaagaatttaaaaatttaacaccttatgtgatgaaattatcgaaagtacatggacctaatcatccatatttagtcgagttaaaagaaacatatgatacatttaaaaatggcatgttagagcatatgcaaaaagaagatgatgttgattttccaaaactaattaaatatgaacaaggtgaagtagtagacgatattaatacagtgattgatgatttagtatctgatcacattgcaacgggacaattgttagtgaaaatgagcgatttaacatcaagctatgaaccaccgatagaggcatgtggtacttggcgactcgtttatcagagattaaaagcacttgaagtgttaacacatgagcatgttcatttagagaatcatgttttatttaaaaaagtatcataa

SEQ ID NO: 8378 - DNA, 1755 bp, Staphylococcus aureus
  CDS (1)...(1755)
gtgctatcgctaacaatgttattacttgagcgtgtaggtttaattattattttggcctatgtgttgatgaatattccatattttaaaaacttaatgaatcgtcgacgtacatggaaagcacgttggcaattatgtattattttcagtttgtttgccttaatgtctaatttaactggtatcgtcatcgatcatcaacatagtttgtcaggaagtgtgtacttccgtttagatgatgatgtatctttagctaacactcgtgtattaacgataggtgtcgcaggattagttggtggcccttttgtaggtctatttgttggcgttatttcaggtattttcagagtgtatatgggtggggcggatgcacaagtttatcttatctcatctatatttatcggtataattgctggttattttggcttacaagctcaaagacgcaagcgttacccgagtattgcgaaaagtgccgtgattggaattgttatggaaatgattcaaatgttgagcattttaacattttcccacgacaaagcatatgcggttgacctcatatcattaattgcactaccaatgattattgttaatagcgttggtacggcgatttttatgtctattatcatttcaacattaaagcaagaggagcaaatgaaggctgttcaaacacatgatgtactgcaattgatgaaccagacattgccgtattttaaagaaggattgaatagagaatcggcacagcaaattgcgatgattattaaaaatttaatgaaagtatctgccgtagcaattacaagcaaaaatgaaatcttatcgcatgtaggtgcaggtagtgatcatcacataccaacaaatgaaatattaacaagtctgtctaaagatgtattgaaatcagggaagttgaaagaagttcatactaaagaagagattggttgtagtcatccgaattgcccgcttagagcagctatcgtgataccacttgagatgcatggttctatcgtcggtacattgaagatgtattttacaaaccctaatgatttaacttttgtggaacgtcaacttgcagaaggattggcaaatatttttagtagccaaattgaacttggtgaagccgaaacgcaaagtaagttattgaaagatgctgagattaagtcattacaggcacaagtgagtccacattttttcttcaattcaattaacacgatttcagctttagttagaataaatagcgaaaaggcacgagagttactattagaattgagttattttttcagagcgaatttacaaggctcaaagcaacatacgattactttagataaagagttaagtcaagtgcgtgcatacttatcactcgaacaagcacgttacccaggaagatttaatatcaatattaatgttgaagacaaatatcgcgatgtgcttgtaccaccatttttaattcaaattttagttgaaaatgccatcaaacatgcgtttacgaatcgaaagcaaggtaacgatattgacgtgtcagtgattaaagaaactgcaacacatgtacgtattattgtacaagataatggtcagggtatttctaaagataaaatgcatttgttgggagaaacatctgtagaatcagaatctggaactggtagtgctttagaaaatttaaacttacgcctaaaaggattatttggaaaatccgcagcattacaatttgaatcgacatcgagcggtaccactttttggtgtgtacttccttatgaaagacaagaggaggaataa

SEQ ID NO: 8379 - DNA, 741 bp, Staphylococcus aureus
  CDS (1)...(741)
atgaaagcattaatcatagatgatgagccattagcacgtaatgaattaacatatttattaaatgaaattggtggttttgaagaaattaatgaggcagaaaatgtaaaagaaacattggaagcactactgataaatcaatatgacattatatttttagatgtcaatttaatggatgaaaatgggatcgaattaggagctaaaattcaaaagatgaaagagccacctgcgattatttttgcaactgcacatgaccaatacgcagtacaggcatttgaattaaatgcgacagactatattttgaaaccgtttggtcaaaaacgtattgaacaagcagtcaataaagttcgtgcgactaaagccaaagatgataatagcgcaaatgcaattgcgaatgatatgtcggcgaattttgatcaaagtttacctgttgaaattgacgataaaattcacatgttaaagcaacaaaatattattgggattggcacacataatggtattacaaccatacatacaacgaatcataaatacgaaacaacagagccattgaatcgttatgaaaaacgattgaatcccacttattttatacgtattcatcgttcatatattattaacactaaacacattaaagaagtgcaacaatggtttaactacacttatatggtaatattgacaaatggtgtcaagatgcaagttggacgttcatttatgaaagattttaaagcgtcgataggattactttaa

SEQ ID NO: 8380 - DNA, 1776 bp, Staphylococcus aureus
  CDS (1)...(1776)
gtgaagaaaatcattagtatcgcaattatagttttagcgttggtattaagtggttgtggtgtccctacgaaatcagaagtggctcaaaagtcatcgaaagttgaagtgaaaggcgagcgaccaacgatacatttcctaggacaagcaagttatgaaaatgatatgaatatcgtcaaagatcaattggaaaatgcaggatttaacgtgaagatgaatatccaaccagattatggaagctatcgtacacaacgtcaagccggcaattatgatatccaaatcgatgactggatgacagtattcggtgacccgaactatgctatgacggcattatttagttctacaggatcaaatagtttattgaaagataaacatgtagaccagttgttaaataaagcttctactcaaaatgaagcagatgttaaacaaacatataagcaaattgaagatgaagttgtatttgataaagggtatatggcgcctttatatggatcaaaaaagaatttagtatatgacaataaagtgttagataaaaatagtgttggattgccaaattcacgtgcattaatatggcaacaatttgattacaacaatagtagagaacgagatacgcggccacttgtgatgacacaacaagatggtgaaattcctacattggatccaatacgttcaattgcgccgtcagtatattcaattaatatgaatatgtacacaaggttattattattagatgaaaatgaccacttaacaacgaaaggttcgttaagtcgtgattatgctgtgaataaggacaataaagcgttttatttcttgttaagagatgatgattattttgcgaaagtggtcaatggacaagcacgtaatactggagagcgtgtatcggctgaagatgttaagttttctttagatagagcacgtgataaaaagtctgtgcctaacaataatacttataatatgcacaaacatataaatgacatcaagatattaaaagatgaggacatcgatcagttgcgtaaagagaaagacaaggacgataaatccatctatgataagttgattaaagcttataacgtcaaatcgttaacgacagatggtcaaagagtaaataataaagacggtatttatcaaattgttaaaattacgacagatcaatcgatgcctcgagaggtaaattacttaacacactcttcggcaggcattttatctaaaaaatttgttaatcaagtaaatcaagaatatccaaaaggatatggggatagcagtaccattcctgcaaattcagatggaaaaaatgcgctttatgcaagtggtgcatacattatgacacagaaaaatgcatatcaagcaacgtttcaacgtaatccaggattcaacgaaacagaaaaaggtagttatggaccagctaaaattaaaaatattacattgaagtttaatggtgacccgaataatgcattgtcagaacttagaaatcattcaattgatatgttggcagatgtgaatcaaaaacattttgatttaattaagtcggataaaaatttaagcattattcgcaaaaatggacgcaagtcagtctttttaatgctaaatattaaaaaaggtatatttaagacgcatccaaacttgagacaagcagtagttaatgcgatagatcaggatcaatttattaagttttatcgtggcgataaatttaaaattgcatcaccgattacaccacttgtcgatactggtaacgagcaacgtcaagatttagaaaaagtagaaaaagccattaatcaataa

SEQ ID NO: 8381 - DNA, 843 bp, Staphylococcus aureus
  CDS (1)...(843)
atgataagtcatatatttccattctattatcaagttgagggggtaatacttatgggcaataaatataaagattatgctcaagacatccttacagctgtagggggtgtcgaaaatattgttaatgtttcgtatgatacggtacgcatgaccattcatatgcatcatgcaattccttctactgctaatgaagtaacacaaatagatggcgtggcgtcagttgatgaaaatgaaacacagttagttatcgtatttaatgaagaagtaaaatatgtatatcaacaattacaattgttaatggacgacgccaagcatcaagaagatacgaatcatgatgctgtggatactcaagaaacagaacagaaagcgcaagtaaaagtaacaaccccaattttagtgaaagcaccaatcgctggtcgtcgtattttacttaaagaagtaagagattcaatttttagagagaaaatggtaggcgaaggcttggcaatcaaagctcatgaagaatccaaagtaatcgcaccgttcaatggcttagtatctatgattgtaccaactaagcatgcagttggtattcaatcagaagacggtgtggacatagtcattcatattggtgtgaatacagttgacttggaaggtaaaggattcaagtgctttgtaaagcaaaatgatcgtgttgaagcagggcaaacgttgttacaattcgatcaacaatatattcaggaacaaggttataactcagacgttattgtcgttattagcaactctgccgatttaggaaaagtagaactgacaatgaatgaaatcattacgactgaagatgttatttttaaaatatttaaaaactag

SEQ ID NO: 8382 - DNA, 1437 bp, Staphylococcus aureus
  CDS (1)...(1437)
atgacaaaattaccgcaaaattttatgtggggtggcgctcttgccgcaaatcaatttgaaggtggatatgataaaggtggtaaagggttaagtgtaattgatgttatgacgagtggtgcacatggcaaagcacgtcagattacagaatctatagatcccaatcactattatccaaatcatgaaggtattgatttttatcatcgttataaggaagatattgccttgtttaaagaaatgggattgaaatgtttacgtacgtcgattgcgtggacacgtatctttcctaatggggatgaagatgtgccaaatgaagaaggacttgccttttatgatcgtatctttgatgaattaattgcacaaggtattgaacctgttgtgacgttatcacattttgagatgccacttcatttagcgaaacattatggtggatttagaaatagagaagttgtcgattattttgtgcattttgcgcgtgttgtatttgaaagatataaagataaagtgacatattggatgacgtttaatgaaattaataatcagatggacacatcaaatcctatctttttatggacgaattctggggtagcattaacagaaaatgataatcccgaagaattcttgtatcaagtagcacatcatgaacttttagccagtgctttagcggttcgtcttggtaaagagattaatccgaaatttaagattggaacaatgatttcacatgtacccatttatccatattcgtgtcatccgaaagatatgatggaagcacaaattgcgaatcgcttacgtttctttttcccggatgttcaagtaagaggttattatccaagctatgctaaaaaaatgttggcacgaaaaggatatgattttggatggcaagaaggggacgacagtattttacagcagggcacggttgattatattggctttagttattacatgtctacggctgtaaaacatgatgttgatactacagttgaaaacaacatcgtcaacggtggtttgaatcattctgtggagaatccgcatatcgcaacgagtgattggggttgggcgattgatccagatggcttaagatatacattgaatgtgttatatgatcgttatcagttgccactttttattgtggaaaatggttttggtgcagttgatgaagtggtagatggacatattcatgatgattatcgcattgaatatttaaaagcacatattacagcagcgatagaagcagttgatcaagatggtgtagatttaatcggttatacaccgtggggaatcattgatattgtttcatttacaactggtgaaatgaagaaacgctatggtttaatatatgttgatcgagataatgatggtcatggcacgatggaacgcttgaaaaaagattcgttctattggtatcaacaagtgatagcatcaaatggagataaattataa

SEQ ID NO: 8383 - DNA, 1002 bp, Staphylococcus aureus
  CDS (1)...(1002)
gtgagaacaatgtgcacaggattcacaatacaaactttaaataatcaagtacttcttggacgcacgatggattatgattatccattagatggttcgccagcagtgacgcctagaaattatcgttggacatctcgcactggcacgacaggccaaacgcaatatggctttattggtacaggaacagatatggaaggttttatttatggtgatggtgttaatgaacatggcgttgccatttcaacacaatatttccgaggttatagttcatatggctcaacacacaaagcggatgcgatgaatattacgcaaaatgaaattgtgacatggattttgggatatacaacaagcattgaagatatgaaacaacaagcatcccaaatacatgttgtagctgtatatttaaatgatatcggtgaagttccgccattgcattatcatgtttccgatgcaactggacattcagtcgaagtttcatttaaagagggtgaagtgattataaaagataaccctattggtgtcttaacaaatcatccagacttagattggcattatagtaatttaagacaatatatcaatatttctccttatccagcaacagcaaatttattggaaggtgaaacgattgaacctttaggcaatgaagcaggtacatttggattgccaggtggatttacttcaactgagcgctttgtgagaatggcatttatgaaagcaaacattgctcaaaacaatgataaagaaatggatttaatgaatgcattttatttattagatgcggtaaatataccgattggaattgtacgtccgcatgatgctgacaatcactatacaatgtatcagaccgtaataaatttaactacaagaacgttatatattaagtattatggcagcaatgaaatagtagcattaaagctcacagatgatttaattaatagaaaagatatgacgatttttaagcctgagaagcatatcactattaaaaagttgaatgacaatcaatag

SEQ ID NO: 8384 - DNA, 918 bp, Staphylococcus aureus
  CDS (1)...(918)
atgggcttcgctacatttacaatggcgcatcaagcctatgcagcagatacgacaaacacccaacaagcacatacacaaatgtcaacacaatcacaagacgtatcttatggtacttattatacaattgattctaatggggattatcatcacacacctgatggtaactggaatcaagcaatgtttgataataaagaatatagctatacattcgtagatgcacaaggacatacgcattatttttataactgttatccaaaaaatgcaaatgccaatggaagcggtcaaacatatgtgaatccagcaacagcaggagataacaatgactacacagcgagtcaaagccaacaacacattaatcaatatggttatcaatcaaatgtaggcccagacgcgagctattattcacatagtaacaacaaccaagcgtataacagtcataatggtaatggaaaggttaattaccctaatggcacatctaatcaaaatggcggttcagcaagtaaagcgacagctagtggtcatgcgaaagacgcaagctggttaacaagtcgtaaacaactacaaccatatggacaatatcacggtggtggtgcgcattacggtgtcgactatgcaatgcctgaaaattcaccagtttactcattaactgatggtacagtagtacaagcaggttggagtaactatggtggtggtaatcaagtaacgattaaagaagcgaacagtaataactaccaatggtatatgcataataatcgtttaactgtttcagctggtgataaagtcaaagctggtgaccaaattgcatattcaggtagtacgggtaattcaacagcacctcacgtacacttccaacgtatgtctggtggcatcggtaatcaatatgcagtagacccaacgtcatacttacaaagtagataa

SEQ ID NO: 8385 - DNA, 1335 bp, Staphylococcus aureus
  CDS (1)...(1335)
atggttaaaaatcataaccctaaaaatgaaatgcaagatatgttaacgcctttagatgctgaagaagcagctaaaacaaaattacgcttagatatgagagagattcctaagtcttcaattaaaccagaacattttcatttaatgtacttattagaacaacattctccatattttatagatgctgaattaactgaactacgtgatagtttccaaatacattatgacattaatgacaatcatacaccttttgataatattaaatcatttactaaaaatgaaaaattacgttacttactcaatatcaaaaatttagaagaagtaaatcgtacacgctacacatttgtgttggcaccagatgaattatttttcacaagagatggattaccaattgctaaaacaagagggttacaaaatgttgttgatccattaccggtgtcagaagctgaatttttaacaagatataaagcactggttatctgtgcattcaatgagaaacaatcatttgatgctttagttgaaggaaacttagaactacataaaggaacgccatttgaaactaaagttattgaagcggcaacgttagatttactaacggcatttttagatgaacagtatcagaaacaagaacaagattatagtcaaaattatgcatatgtacgcaaagtaggacataccgtttttaaatgggtctctatcggtatgacaacgttaagtgttttattaattgcatttttagcctttttatatttttcagtaatgaagcataatgagcgcattgaaaaaggataccaagcatttgtaaaggatgattatacgcaagtactaaatacgtatgatgatttagatggtaaaaaattagataaagaggcactttacatttatgccaaaagttatatccaaacaaataaacaaggtttagaaaaagataagaaagaaaatttacttaataacgtgacaccaaattcaaataaagactacttattatattggatggaattaggacaaggacatcttgatgaagcgattaatattgccacttatttagatgataacgatattacaaagttagcgttgattaataagttaaatgagattaaaaataacggagatttatcgaatgataaacgttctgaagaaacgaaaaagtataacgataaattgcaagatattttagacaaagaaaaacaagttaaagatgaaaaagcgaaatctgaagaagagaaagcaaaagcaaaagatgagaaattaaagcaacaagaagagaacgaaaagaaacaaaaagaacaagcacaaaaagataaagaaaaacgccaagaagctgaaagaaaaaaatag

SEQ ID NO: 8386 - DNA, 4449 bp, Staphylococcus aureus
  CDS (1)...(4449)
atgcataaattgattataaaatataacaaacaattgaagatgctcaatttgcgagatggtaagacatatactattagcgaagacgagcgtgcagatattacgttgaaatcgttaggcgaagtcattcatttagaacaaaataatcaaggtacttggcaagcgaatcatacttctattaataaggtgcttgttagaaaaggtgaccttgatgacattacattacagctttatacagaagctgattatgcatcatttgcgtacccttcgattcaagatacgatgacgattggatcaaatgcatatgatgacatggtcattcaaagtttgatgaatgccatcattattaaagattttcaatcgatacaagaaactcaatatgtgcgcatcgtgcacgataaaaatacagatgtgtatattaactatgaactacaagagcaattaacaaacaaagcttacattggtgatcatatttatgttgaagggatatggctcgaagtacaagctgatggtttaaatgtattgagtcagaatacagtggcatcgtcattaattcgcttaacacaagagatgccacatgcacaggcagatgattacaatacgtaccatcgttcgccaaggattattcaccgtgaaccgaccgatgatattaagattgaaagaccaccacagccaatacagaagaacaatacagtgatatggcgttccattataccgccattagtaatgattgctttaactgttgtcatctttttagtgagaccaattggtatttatattttaatgatgattggtatgagtacagtaacgatagtatttggtattacaacgtatttctctgaaaagaaaaagtataacaaagatgttgaaaaacgagagaaagattacaaagcttatttggataataaatctaaagaaattaataaagcgattaaagcacaacgttttagtttgaattatcattatccaacagttgctgaaattaaagatatcgttgaaacgaaagcaccaagaatatatgaaaaaacatcgcatcatcacgatttcttacattataagttaggtattgcgaatgtagaaaagtcattcgaattagattaccaagaagaagaatttaaccaacgtcgggatgaactattcgacgatgctaaagaattgtatgaattttacacagatgtagaacaagcaccattaatcaatgatttaaatcatggaccaattgcatatattggtgcacgacatctcattttagaagaattggagaaaatgctaatccaattgtcaacattccatagttatcatgatttagagtttctatttgtgacacgtgaagatgaagttgaaacattgaaatgggcacgttggttgccacatatgacattgagaggtcaaaacattagagggtttgtttacaatcaacgaacgcgtgaccaaattttaacgtcaatctacagcatgattaaagaacgtatccaagctgtgcgtgaacgcagcagaagtaatgagcaaattattttcacaccgcaattagtgtttgtcattacagatatgtcattaattattgatcatgtcattttagaatatgtaaaccaagatttatcagaatatggtatttcattaatctttgttgaagatgtgattgaaagtttgccagagcatgtagataccattattgatatcaagtctcgtacagaaggcgaactgattacgaaagaaaaagaattagttcaattgaaatttacacctgaaaatattgataacgtcgataaagaatatatcgcgcgacgtttggcgaatttgatacacgtcgaacatttgaaaaatgcaattcctgatagtattacatttttagagatgtataacgtgaaagaagtagatcagcttgatgtggttaatcgatggagacaaaacgaaacatacaaaacgatggcagtacctttaggtgtaagaggtaaagatgatattttatcattgaacttacatgaaaaagcacacgggccacatggtttagttgctggtaccactggttcagggaaatctgagattattcaatcatacattttatctttagctattaattttcatccacatgaagttgcgttcctattgattgactataaaggtgggggtatggcgaacttatttaaagatttagtccatttagttggtacgattacaaacttagatggcgatgaagcgatgcgtgccttaacatcaatcaaagctgaattgagaaaacgtcaacgtttattcggagagcatgatgttaaccatattaatcaataccataagttatttaaagaaggtgttgcgacagaaccaatgccacatttattcattatttccgatgagtttgccgaattaaaatcagaacaacctgattttatgaaagaacttgtatcaacggcacgtattggacgttcgttaggtattcatttaatacttgcgacacaaaaaccatcgggtgttgttgatgaccaaatttggtctaactctaaatttaaattggcattaaaagtacaagatagacaagacagtaatgaaattttaaaaacaccagatgcagcagacattacattaccaggtcgtgcgtatttacaagttggtaataatgaaatttatgaattgttccaatctgcatggagtggagcaacatatgacatcgaaggcgataaattagaagttgaagataagacgatttacatgattaatgattatggtcaacttcaagcaatcaacaaagacttgagtggacttgaagatgaagaaacgaaagaaaatcaaactgagttagaagcggttatcgatcatatcgaatctattacaacacgattagaaattgaagaagttaagcgtccatggttaccaccattaccagaaaatgtatatcaagaagatttagtagaaacagatttcagaaaattatggtcagatgatgcaaaagaagtggaattaacattaggacttaaagacgtaccagaagaacaatatcaaggaccgatggtattgcaattgaaaaaagctgggcacatcgcgttaatcggaagtccaggatatggtagaacaacgttcttacacaacattattttcgatgttgcaagacaccatcgtcctgatcaagcacacatgtacttgttcgatttcggtaccaatggtttgatgccagtcacagatataccacatgtcgctgattactttacagtagatcaagaagacaagattgcgaaggcgatacggaagatacatgatattatttctgagcgaaaaagactattaagtcaagagagagtagttaatatagagcaatataataaagaaactggaaattcaattccaaatgttttcttaattatcgataactacgacacggtgaaagaatcaccatttatggaagaatatgaagaaatgatgtctaaggtgacacgtgaaggtttagcattaggggtatacatcgttctttcaggatcaagatcaagtgcaataaaatcagctatatttactaacattaaaacaagagttgcgctgtacctctttgaaaataatgaattaacaaatattattggttcttataaaaaaggtgtgaaagatgttaaaggtagagctgcaataaatgatgataacttcacacagttccaaattgcgcaaccatttgaattagcagatggacaaacatataacgagcgcattaaaaatgaagtagcacaaatgaaagaattctatgtaggagattatccaaaacatatcccaatgatgccagataaggtattaatggaggatatacaagaaacatatgatttggaaaaaatcattcatgaagaacacaaattaccattaggattagactttgaggatgtggaactagttagcttagatctgacaagttcttcgattgtaacagcaattaaaccaactgagatggaaaaaatgaatgatgttataatgtctagtttatcagtatatagtaaaaaccaatttgttatcttggttgatgcagaagataatatgagccagtatgcagaagatgtaacctcttattattcagcaccatcagatttgagcaacattagattaggatttaagcaagaaatagaagcaaggaaaaatggcgagaaaagtatagaggaatgcaagattgtatttataaataatattaaacgattcaatcaattaactggaatgacagaagctgaactacgtgtgttatttcatgacggtcagaaagttcatattatcattattgcaagtggactatactcagatacaattggtgcatttgatagagaaagtaaaatgatggtaagaactataaatcaagctttgattagtcataagatatcggaacaagaatttataagagttaaagatcgatttggtgaaccagaattaaaagtgggagaaatgtattacattaataatcaagaatatcaaaaaataaaactaatggagggatag

SEQ ID NO: 8387 - DNA, 930 bp, Staphylococcus aureus
  CDS (1)...(930)
atggctaaaacatatattttcggacataagaatccagacactgatgcaatttcatctgcgattattatggcagaatttgaacaacttagaggtaattcaggagccaaagcataccgtttaggtgatgtgagtgcagaaactcaattcgcgttagatacatttaatgtacctgctccggaattattaacggatgatttagatggtcaagatgttatcttagttgatcataacgaattccaacaaagttctgatacgattgcctctgctacaattaagcatgtaattgatcatcacagaattgcaaatttcgaaactgctggtcctttatgttatcgtgctgaaccagttggttgtacagctacaattttatacaaaatgtttagagaacgtggctttgaaattaaacctgaaattgctggtttaatgttatcagcaattatttcagatagcttacttttcaaatcaccaacatgtacacaacaagatgttaaagcagctgaagaattaaaagatattgctaaagttgatattcaaaagtacggcttagatatgttaaaagcaggtgcttcaacaactgataaatcagttgaattcttattaaacatggatgctaaatcatttactatgggtgactatgtgactcgtattgcacaagttaatgctgttgaccttgacgaagtgttaaatcgtaaagaagatttagaaaaagaaatgttagctgtaagtgcacaagaaaaatatgacttatttgtacttgttgttactgatatcattaatagtgattctaaaattttagttgttggtgctgaaaaagataaagttggcgaagcattcaatgttcaattagaagatgacatggccttcttatctggtgttgtttctcgaaaaaaacaaatcgtacctcaaatcactgaagcattaacaaaataa

SEQ ID NO: 8388 - DNA, 1515 bp, Staphylococcus aureus
  CDS (1)...(1515)
atgataaaatgtaagaaaatatttaggtcgattggagagatacaggtgtaccaattagaagacgacagtttaatgttacataatgacttatatcaaattaatatggctgaaagttattggaatgataatattcatgaaaaaatggctgtatttgatttgtattttagaaaaatgccatttaatagtggctatgctgtttttaatggtttaaaacgcgtcattgattttatagaacattttggattttcagaatctgatttggaatatttaaagtctattggctacaaggatgatttcttatcatatttaaaagatttaaaattcacaggcagcatccgttcgatgcaagaaggcgaattatgctttggtaacgaaccattgttacgcgtagaagcaccattgattcaagcgcaattaatagaaacaattttattaaacattgtaaatttccatacactaattacaacaaaggctagtagaattcgtcaaattgcatcaaatgataaattaatggagtttggtacacgtcgtgcgcaagaaattgatgcagcattgtggggcgctagagctgcttacatcgggggctttgattctacaagtaatgttagggcaggtaaattatttggtatacctgtgtctggtacacatgcacacgcatttgtccaaacttatggagacgaatatgttgccttcaaaaaatatgctgaaagacataaaaattgtgtgttcctagtagatacattccatactttaaaatctggcgtgccaaatgcaataaaagttgcaaaagaattaggtgacaaaattaactttgtaggtattcgattggattctggagatatcgcttatttatctaaagaggcaagacgtatgcttgatgaagcaggatttactgaaactaaaattatcgcgtctaatgatttggatgaagaaacgattacgagtttgaaagcacaaggtgcaaaagtagattcttggggcgttggtacaaagctgattacaggatacgatcaaccagcattaggtgcagtatataaacttgtagctattgaaaatgaagatggttcatatagtgatcgtattaaattatcaaataacgctgaaaaggttacgacgccaggtaagaaaaatgtatatcgcattataaacaagaaaacaggtaaagcagaaggcgattatattactttggaaaatgaaaatccatacgatgaacaacctttaaaattattccatccagtgcatacttataaaatgaaatttataaaatctttcgaagccattgatttgcatcataatatttatgaaaatggtaaattagtatatcaaatgccaacagaagatgaatcacgtgaatatttagcacaaggattacaatctatttgggatgaaaataagcgtttccttaatccacaagaatatccagtcgatttaagcaaggcatgttgggataataaacataaacgtatttttgaagttgcggaacacgttaaggagatggaagaagataatgagtaa

SEQ ID NO: 8389 - DNA, 822 bp, Staphylococcus aureus
  CDS (1)...(822)
atgagtaaattacaagacgttattgtacaagaaatgaaagtgaaaaagcgtatcgatagtgctgaagaaattatggaattaaagcaatttataaaaaattatgtacaatcacattcatttataaaatctttagtgttaggtatttcaggaggacaagattctacattagttggaaaattagtacaaatgtctgttaacgaattacgtgaagaaggcattgattgtacgtttattgcagttaaattaccttatggagttcaaaaagatgctgatgaagtagagcaagctttgcgattcattgaaccagacgaaatagttactgtaaatattaaacctgcagttgatcaaagtgtgcaatcattaaaagaagccggtattgttcttacagatttccaaaaaggaaatgaaaaagcgcgtgaacgtatgaaagtacaattttcaattgcttcaaaccgacaaggtattgtagtaggaacagatcattcagctgaaaatataactggtttttatacgaagtatggtgatggtgctgcagatatcgcacctatatttggtttgaataaacgacaaggtcgtcaattattagcgtatcttggtgcgccaaaggaattatatgaaaaaacgccaactgctgatttagaagatgataaaccacagctcccagatgaagatgcattaggtgtaacttatgaggcgattgataattatttagaaggtaagccagttacgccagaagaacaaaaagtaattgaaaatcattatatacgaaatgcacacaaacgtgaacttgcatatacaagatacacgtggccaaaatcctaa

SEQ ID NO: 8390 - DNA, 1296 bp, Staphylococcus aureus
  CDS (1)...(1296)
atgattgaacgctattctagagaagaaatgtctaatatttggactgatcaaaatcgctatgaagtatggttagaagtggaaattttagcatgtgaggcatggagtgaattaggacatataccgaaagctgacgtacaaaaaattcgtcaaaacgcaaaggtaaatgtcgaacgtgcacaagaaattgaacaagaaacgcgccatgatgttgtagcctttactagacaagtttctgaaacgctaggtgaagaacgtaagtgggtacattatggtttaacttctactgatgttgtagatacagctttaagtttcgttattaaacaagcaaatgacattattgaaaaagatttagaaagatttatcgacgttttagctgaaaaagcaaaaaattataaatatacattgatgatgggacgtacacatggagtgcatgcagaaccaactacatttggtgtcaaaatggcattgtggtacacggaaatgcaacgtaacttacaacgtttcaaacaagtaagagaagaaattgaagtagggaaaatgagtggtgcagtaggtacttttgctaacattcctcctgaaatagaaagttatgtgtgtaaacatttaggtattggcacagcgcctgtatcaacgcaaacattgcaacgcgatcgacatgcatactatattgcgacattagcattaatcgcgacgtcactagaaaaatttgccgttgaaattcgtaaccttcaaaaaactgaaacaagagaagttgaagaagcatttgcaaaaggtcaaaaaggttcatctgcaatgcctcataaacgaaatccaattggttctgaaaatatcacaggtatttcaagagtaattcgtggttatattactacagcttatgagaatgtgccattatggcatgaaagagatatttctcattcttcagctgagcgtattatgttaccagatgttacaatagcactagattatgcattgaatcgtttcacgaatattgtggaccgtttaactgtatttgaagataatatgcgtaataacatagataaaacatttggtctgattttctcacaacgtgtcttattagcattaattaataaaggtatggttcgtgaagaagcatacgacaaagtacaaccaaaagcgatgatatcttgggaaacgaaaacacctttccgtgaattaatcgaacaagatgagtctattacaagtgttttaacaaaagaagaattggatgaatgtttcgatcctaaacatcatttgaatcaagttgacactattttcgaacgcgctggattagcataa

SEQ ID NO: 8391 - DNA, 2193 bp, Staphylococcus aureus
  CDS (1)...(2193)
atgaatgcgttattaaatcatatgaatacagagcaaagtgaagctgtaaagacaacagaaggaccattgttaattatggcaggtgctggttcagggaagacacgtgttttaacacatagaattgcttatttattagacgaaaaagatgtctcaccatacaatgttttggctattacttttacaaataaagctgcaagagaaatgaaagaacgtgttcaaaaattagtaggtgatcaagcagaagttatttggatgtcaacattccactcaatgtgtgttcgtattttacgtcgtgatgcagatcgaattggtatagaacgcaattttacgataattgatcctacagaccaaaaatctgttattaaagacgtcctaaaaaatgaaaatattgatagtaaaaagtttgaacctcgtatgtttatcggtgcaatcagtaatttgaaaaatgaacttaaaacacctgcggatgctcaaaaagaagccacagattatcactcgcaaatggtagcaacggtttatagtggatatcaacgccaattgtcacgtaatgaagcgttagattttgatgaccttattatgacaacgattaacttatttgagcgtgtaccagaagttttagaatattatcagaacaaattccaatatattcatgtagatgagtatcaagataccaataaagcacaatacacattagttaaattattagcaagtaagtttaaaaacttatgtgttgtaggtgactcagatcagtcaatttatggttggcgtggtgctgatattcaaaatatcttatcatttgaaaaagactacccagaagcgaatacaatctttttagagcaaaattatcgttcgacgaaaacgattttaaatgcggctaacgaagtgattaaaaataattctgaacgtaagccaaaaggactgtggactgcaaatacgaatggtgagaaaattcattactatgaagcaatgacagaacgtgatgaagcggaatttgtaatacgagaaattatgaagcatcaacgtaatggtaagaaatatcaagatatggcaattttatatagaacaaatgcacaatcacgtgtacttgaggaaacattcatgaaatctaatatgccatacacaatggttggtggccaaaagttctatgaccgtaaagaaatcaaagatttattaagttatttgcgtataattgccaatagtaatgatgacattagtttgcaacgtattattaatgttccaaaaagaggtgtaggtccttcatctgttgaaaaagttcaaaattatgcacttcaaaacaatatcagtatgtttgatgcacttggagaagctgattttatcggattgtcaaaaaaggtgacacaagagtgtcttaatttttacgagttgatccaaagcttgataaaagaacaagaatttttagaaattcatgaaatagttgatgaagtattacaaaagtctggctaccgagaaatgcttgaacgtgaaaatacactagaatctcgaagtagattagaaaacatcgatgaatttatgtcagtaccaaaagactatgaggaaaataccccattagaagaacagtcattaattaactttttaacggatttatcgttagtagctgatattgatgaggcagatactgaaaatggcgtaacactaatgacgatgcactcggctaagggccttgaatttccaatcgtctttataatggggatggaagaatctttattcccacatattagagcgattaagagtgaagatgatcatgaaatgcaagaagaacgtcgtatttgttatgtagcaatcacaagggctgaagaggtgttatatatcactcatgcgacatcaagaatgttatttggtcgccctcagtcaaatatgccatctagatttttaaaggaaattccagaatcactattagaaaatcattcaagtggcaaacgacaaacaatacaacctaaggcaaaaccttttgctaaacgtggatttagtcaacgaacaacgtcaacgaaaaaacaagtatcgtcatctgattggaatgtaggtgacaaagtgatgcataaagcctggggagaaggcatggtgagtaatgtaaacgagaaaaatggctcaatcgaactagatattatctttaaatcacaagggccaaaacgtttgttagcgcaatttgcaccaattgaaaaaaaggaggattaa

SEQ ID NO: 8392 - DNA, 2004 bp, Staphylococcus aureus
  CDS (1)...(2004)
atggctgatttatcgtctcgtgtgaacgagttacatgatttattaaatcaatacagttatgaatactatgtagaggataatccatctgtaccagatagtgaatatgacaaattacttcatgaactgattaaaatagaagaggagcatcctgagtataagactgtagattctccaacagttagagttggcggtgaagcccaagcctctttcaataaagtcaaccatgacacgccaatgttaagtttagggaatgcatttaatgaggatgatttgagaaaattcgaccaacgcatacgtgaacaaattggcaacgttgaatatatgtgcgaattaaaaattgatggcttagcagtatcattgaaatatgttgatggatacttcgttcaaggtttaacacgtggtgatggaacaacaggtgaagatattaccgaaaatttaaaaacaattcatgcgatacctttgaaaatgaaagaaccattaaatgtagaagttcgtggtgaagcatatatgccgagacgttcatttttacgattaaatgaagaaaaagaaaaaaatgatgagcagttatttgcaaatccaagaaacgctgctgcgggatcattaagacagttagattctaaattaacggcaaaacgaaagctaagcgtatttatatatagtgtcaatgatttcactgatttcaatgcgcgttcgcaaagtgaagcattagatgagttagataaattaggttttacaacgaataaaaatagagcgcgtgtaaataatatcgatggtgttttagagtatattgaaaaatggacaagccaaagagagtcattaccttatgatattgatgggattgttattaaggttaatgatttagatcaacaggatgagatgggattcacacaaaaatctcctagatgggccattgcttataaatttccagctgaggaagtagtaactaaattattagatattgaattaagtattggacgtacaggtgtagtcacacctactgctattttagaaccagtaaaagtagctggtacaactgtatcaagagcatctttgcacaatgaagatttaattcatgacagagatattcgaattggtgatagtgttgtagtgaaaaaagcaggtgacatcatacctgaagttgtacttagtattccagaacgtagacctgaagatgctttcacatatcatatgccaacccattgtccaagttgtggacatgaattagtacgtattgaaggcgaagtagcacttcgttgcattaatccaaaatgccaagcacaacttgttgaaggattgattcactttgtatcaagacaagccatgaatattgatggtttaggcactaaaattattcaacagctttatcaaagcgaattaattaaagatgttgctgatattttctatttaacagaagaagatttattacctttagatagaatggggcagaaaaaagttgataatttattagctgccattcaacaagctaaggacaattctttagaaaatttattatttggtctaggtattaggcatttaggtgttaaagcgagccaagtgttagcagaaaaatatgaaacgatagatcgattactaacggtaactgaagcggaattagtagaaattcatgatataggcgataaagtagcacaatctgtagttacttacttagaaaatgaagatattcgtgctttaattcaaaaattaaaagataaacatgttaatatgatttataaaggtatcaaaacatcagatattgaaggacatcctgaatttagtggtaaaacgatagtactaactggtaagctacatcaaatgacacgcaatgaagcatctaaatggcttgcatcacaaggtgctaaagttacaagtagcgttactaaaaatacagatgtcgttattgctggtgaagatgcaggttcaaaattaacaaaagcacaaagtttaggtattgaaatttggacagagcaacaatttgtagataagcaaaatgaattaaatagttag

SEQ ID NO: 8393 - DNA, 303 bp, Staphylococcus aureus
  CDS (1)...(303)
atgacaaaagtaacacgtgaagaagttgagcatatcgcgaatcttgcaagacttcaaatttctcctgaagaaacggaagaaatggccaacacattagaaagcattttagattttgcaaaacaaaatgatagcgctgatacagaaggcgttgaacctacatatcacgttttagatttacaaaacgttttacgtgaagataaagcaattaaaggtattccgcaagaattagctttgaaaaatgccaaagaaacagaagatggacaatttaaagtgcctacaatcatgaatgaggaggacgcgtaa

SEQ ID NO: 8394 - DNA, 1476 bp, Staphylococcus aureus
  CDS (1)...(1476)
atgaggaggacgcgtaagatgagcattcgctacgaatcggttgagaatttattaactttaataaaagacaaaaaaatcaaaccatctgatgttgttaaagatatatatgatgcaattgaagagactgatccaacaattaagtcttttctagcgctggataaagaaaatgcaattaaaaaagcgcaagaattggatgaattacaagcaaaagaccaaatggatggcaaattatttggtattccaatgggtataaaagataacattattacaaacggattagaaacaacatgtgcaagtaaaatgttagaaggttttgtgccaatttacgaatctactgtaatggaaaaactacataatgagaatgccgttttaataggtaaattaaatatggatgagtttgcaatgggtggttcaacagaaacatcttatttcaaaaaaacagttaacccatttgaccataaagcagtaccaggtggttcatcaggtggatctgcagcagcagttgcagctggcttagtaccatttagcttaggttcagacacaggtggttcaattagacaaccggctgcatattgtggcgttgtcggtatgaaaccaacatacggtcgtgtatctcgatttggattagttgcttttgcatcttcattagaccaaattggtccattgactcgaaatgtaaaagataatgcaatcgtattagaagctatttctggtgcagatgttaatgactctacaagtgcacctgttgatgatgtagactttacatctgaaattggtaaagatattaaaggattaaaagttgcattacctaaagaatacttaggtgaaggtgtagctgatgacgtaaaagaagcagttcaaaacgctgtagaaactttaaaatctttaggtgctgtcgttgaggaagtatcattgccaaatactaaatttggtattccatcatattacgtgattgcatcatcagaagcttcgtcaaacctttctcgttttgacggtattcgttatggttatcattctaaagaagctcattcattagaagaattatataaaatgtcaagatctgaaggtttcggaaaagaagtaaaacgtcgtattttcttaggtacatttgcattaagttcaggttactacgatgcttactataaaaaatctcaaaaagttagaacattgattaaaaatgactttgataaagtattcgaaaattatgatgtagtagttggtccaacagcgcctacaactgcgtttaatttaggtgaagaaattgatgatccattaacaatgtatgccaatgatttattaacaacaccagtaaacttagctggattacctggtatttctgttccttgtggacaatcaaatggccgaccaatcggtttacagttcattggtaaaccattcgatgaaaaaacgttatatcgtgtcgcttatcaatatgaaacacaatacaatttacatgacgtttatgaaaaattataa

SEQ ID NO: 8395 - DNA, 1437 bp, Staphylococcus aureus
  CDS (1)...(1437)
gtggaaatcatgcattttgaaacagttataggacttgaagttcacgtagagttaaaaacggactcaaaaatgttttctccatcaccagcgcattttggagcagaacctaactcaaatacaaatgttatcgacttagcatatccaggtgtcttaccagttgttaataagcgtgcagtagactgggcaatgcgtgctgcaatggcactaaatatggaaatcgcaacagaatctaagtttgaccgtaagaactatttctatccagataatccaaaggcatatcaaatttctcaatttgatcaaccaattggtgaaaatggatatatcgatatcgaagtcgacggtgaaacaaaacgaattggtattactcgtcttcacatggaagaagatgctggtaagtcaacacataaaggtgagtattcattagttgacttgaaccgtcaaggtacaccgctaattgaaatcgtatctgaaccagatattcgttcacctaaagaagcatatgcatatttagaaaaattacgttcaattattcaatacactggtgtatcagacgttaagatggaagaaggatctttacgttgtgatgctaacatctctttacgtccatatggtcaagaaaaatttggtactaaagccgaattgaaaaacttaaactcatttaactatgtacgtaaaggtttagaatatgaagaaaaacgccaagaagaagaattgttaaatggtggagaaatcggacaagaaacacgtcgatttgatgaatctacaggtaaaacaattttaatgcgtgttaaagaaggttctgatgattaccgttacttcccagagcctgacattgtgcctttatatattgatgatgcttggaaagagcgtgttcgtcagacaattcctgaattaccagatgagcgtaaagctaagtatgtaaatgaattaggtttacctgcatacgatgcacacgtattaacattgactaaagaaatgtcagatttctttgaatcaacaattgaacacggtgcagatgttaaattaacatctaactggttaatgggtggcgtaaacgaatatttaaataaaaatcaagtagaattattagatactaaattaacaccagaaaatttagcaggtatgattaaacttatcgaagacggaacaatgagcagtaaaattgcgaagaaagtcttcccagagttagcagctaaaggtggtaatgctaaacagattatggaagataatggcttagttcaaatttctgatgaagcaacacttctaaaatttgtaaatgaagcattagacaataatgaacaatcagttgaagattacaaaaatggtaaaggcaaagctatgggcttcttagttggtcaaattatgaaagcgtctaaaggtcaagctaatccacaattagtaaatcaactattaaaacaagaattagataaaagataa

SEQ ID NO: 8396 - DNA, 948 bp, Staphylococcus aureus
  CDS (1)...(948)
atgaggaaacgtgctagaatcatttataacccgacatcaggtaaagagcaatttaaaagagaattacctgatgccttaataaaattagaaaaagcgggatatgaaacgagtgcatatgcaaccgagaaaatcggtgatgccacacttgaagcagaaagagctatgcatgaaaattatgatgtattaatcgctgcaggtggtgacggaacattaaatgaagtagttaatggtatcgcagaaaagcctaatcgtcctaagctaggtgtcattcctatgggtactgttaatgactttggacgtgcattgcatatacctaatgacatcatgggggcacttgatgtcatcattgaaggtcattctactaaagtagatattggtaaaatgaataatcgatactttattaatttagctgcaggcggacaattgacgcaggtctcttatgaaacaccgagtaaattgaaatctattgttggtccatttgcttattacatcaaaggtttcgaaatgttacctcaaatgaaagctgtagatttaagaattgaatatgatggtaatgttttccaaggagaagcattattattctttttaggtttaacaaattcaatggcaggatttgaaaaattagtgccggacgctaagttagatgacggctattttacgttaattatagttgaaaaatcaaaccttgcagaacttggtcatattatgactttagcttcaagaggagaacatactaagcatcctaaagttatttatgaaaaagcaaaggcaattaatatttcatcattcacagacttacaactaaatgtagatggagaatatggtggtaaattaccagcgaatttcttgaatctagaacgtcatatagatgtctttgcacctaatgatattgtaaatgaagagttaataaataatgatcatgttgatgacaatttaatcgaagaataa

SEQ ID NO: 8397 - DNA, 987 bp, Staphylococcus aureus
  CDS (1)...(987)
gtggttcatcattattttacaaatctaattattttgggagtaatagaaagaggtttgattatgacttcatctactaatgttaaagctttaattgaaaaaaataataataaaaaagggaagcataatgacaaaattataccagttattttagccgcaatttcagcgatttccattttaacaacactaggtatattaatcacattgcttttagaaaccatcacttttttcaccagaattccaataactgaatttctattttctactacttggaatcctaccggttcagaccctaagtttggtatctgggcattgataatagggactttaaaaatcacagttattgcgactatatttgcagttccagtcgggcttggtgcagcaatttatttaagtgaatatgcaagtgaccgtgcacgacgcataattaaaccgatattagaaattttagcaggaataccaacaattgtgtttggtttctttgcattaacctttgttacaccagtattaagatctttcataccaggtcttggagagtttaatgctataagtcccggcttagttgtcggtattatgattgtccctctcatcacaagtttgagtgaggatgcaatggcatctgtaccaaataaaattcgagaaggtgcctatggacttggagcaactaaattagaagtagcaactaaagtcgtacttcctgcagcaacatcaggtattgtagcttcaatcgttctcgcgatttcaagagcaattggagaaacgatgattgtatcattagcggcaggtagttcaccaacagcttcattaagtttaacaagttcgattcaaacaatgactggatatattgttgagatagcgacaggtgatgcaacatttggatcaaatatttattacagtatttatgctgtaggattcacattatttatctttaccttaatcatgaatttactttctcaatggatttctaagcgttttagggaggagttttaa

SEQ ID NO: 8398 - DNA, 825 bp, Staphylococcus aureus
  CDS (1)...(825)
atgagacagtggacggcaatccatctagcgaaattggcgcgtaaagcaagtagagcagtaggtaaaagaggaacagatttacctggacaaatcgctagaaaagtggatacagatatattaagaaaattagcagagcaagttgatgatattgtatttatcagtggaacaaatggtaaaacaacgacttcaaacttaattggacatactttaaaagcaaataatattcaaattatacacaataatgaaggtgctaatatggctgcaggtataacttctgcattcatcatgcaatcaacacctaagactaaaattgcggtaatcgaaattgatgaaggttcgattccacgtgtgttaaaagaagttacaccttcaatgatggtatttactaatttctttcgagatcaaatggatcgcttcggtgaaattgatattatggttaacaacattgcagagacaattagtaataaaggcatcaaattattgctaaatgctgatgatccatttgtgagtcgtttgaaaatcgcaagtgatacgattgtgtactatggtatgaaagcacatgcacatgaatttgaacaaagtacgatgaatgaaagtagatattgtccaaactgtggtcgcttattgcaatacgattatattcattataatcaaattggtcattatcactgtcagtgtggtttcaaacgagagcaagcaaaatatgaaatatcaagttttgatgtggcaccgtttttacatttaaatatcaatgatgaaaaatatgatatgaaaattgcaggtgactttaacgcttataacgcgttacagcatatacagttttaa

SEQ ID NO: 8399 - DNA, 420 bp, Staphylococcus aureus
  CDS (1)...(420)
atgcagtactttaaaaaagaacgaaaagaagcgatgattaatttagctaaaaaccctgcaggaatgaatgcaagtttatcagttggtgaacaattagagggcgaaaaagtgtatgttatttcgctaaatgataacgctgcagatggtcgagatacttcatggatttatgatgcagattttgaaaaattatctaagcaacaaattgaagctatcatcgtgacaggtacacgagcagaagaacttcaattgcgattgaagttagcagaggttgaagtaccaattatagttgagcgtgatatttataaagcaacggcaaagactatggattataaagggttcacaagtgcaataccaaactatacatcattagcgcctatgcttgaacaattaaaccgttcgtttgaaggaggtcaatcataa

SEQ ID NO: 8400 - DNA, 1044 bp, Staphylococcus aureus
  CDS (1)...(1044)
atgaaccactacattagaacaattggttcaatgctcatcttagtatatagcatgctagctgcatttctgttcatcgataaagtttttgtaaatatcatctattttcaaggtatgttttatacacaaatattcggaataccagtctttttatttttaaatctcatcatcattttattgtgtattattgttggttcggtactcgcttacaaaatcaatcagcaaaatgattggattaagacgcaaattgagcgttcaatggaaggcgaaacagttggcattaatgatcaaaatatagaaatatatagtgaaacgttagatttataccatacactcgtacctttaaatcaagaattgcataagttgcgacttaaaactcaaaacttaaccaatgaaaattataatattaatgatgtgaaagttaaaaagattattgaagatgaacgtcaaagactagcacgagaacttcacgattctgttagtcagcaactttttgcggcaagtatgatgctatctgctatcaaagaaacgaagttagaaccaccattagaccaacaaattccgattttagagaaaatggttcaagattcgcagttagaaatgcgtgctttgctgttacatttaagaccgcttggtttaaaagacaaatctttaggtgagggtattaaagatttagttattgatttacaaaaaaaagtgccaatgaaagttgtgcatgaaatacaagattttaaagtgcctaaaggtattgaagatcatttgttcagaattacacaggaagcaatttcgaatacattgcgtcattcaaacggtacaaaagtgacagtagaattgtttaataaagacgattatttattgttgagaattcaagacaatggtaaaggttttaatgttgatgaaaaattagaacaaagttatggacttaaaaatatgcgtgaaagagctttggaaattggtgcaacgttccatattgtatcattgccagattcaggtacacgtatcgaggtgaaagcacctttaaataaggaggattcgtatgacgattaa

SEQ ID NO: 8401 - DNA, 216 bp, Staphylococcus aureus
  CDS (1)...(216)
gtgaacattgtggctatgacaaatgaagagaaagtattagctattagagagaagttaaatattgttaatcaaggattattagatcctgaaaaatatacaaatgcaaatgaagaagaattaacagatatatatgattttgttcaatcaagagaaagattatcgccaagtgaagtgacagctattgctgacgctttaggacaattgcgacacgactag

SEQ ID NO: 8402 - DNA, 1257 bp, Staphylococcus aureus
  CDS (1)...(1257)
gtgggaattttgactaattacaaagaaaagttacaacaatacgctgaactattagttaaggttggtatgaatgttcaaccaaaacagccagtatttattagatcatcagtagaaacattagaattaacgcatttaattgtagaagaagcttatcattgtggcgcttcagatgtacgtgttgtatatagcgatccaaccttaaaacgcttgaaattcgaaaatgaatctgtggaacattttgctaatcatgagataaaatcatatgatgttgaagcgagaatggattacgttaaacgtggcgctgctaatctagcacttattagtgaggatcctgatttaatggatggtatagatagccaaaaattacaagcatttcaacaacaaaacgcacgcgcatttaaaggatatatggaaagtgtacaaaaaaatcaatttccatgggtcgtagctgcttttccatctaaagcttgggcgaagagagtatatcctgaactatctgtagaagaagcatatattaagtttattgacgaggtattcgatattgtgcgaattgatggtaacgatccagttgaaaattggcgtcaacacatcgctaatttaagtgtttacgctcaaaagttacagcaaaaaaattaccatgcgttgcattatgtatctgaaggtactgatttaacagtaggtttagcgaaaaatcatatctgggaagatgctacaagttatgttaacggcaaggaacaagcttttattgctaatataccaactgaagaagtatttacagcaccagatcgaaatagagtagatggatatgttactaataaattgcctttaagttataatggaacgattatcgatcaatttaaattgatgtttaaagatggagaaattattgatttttcagctgaaaaaggtgaagcggtattgaaagatttaatcaataccgatgaaggttcaagaagattaggtgaagtagctttagtacctgatgattcaccgatatcaaatcgtaataccattttttacaatactttatttgatgaaaatgcagcatgtcatttagcgattggatctgcttacgcctttaatattcaaggtggaacggaaatgactgttgaggaaaagattgcaagcggattaaatgattcaaacgtacatgtcgacttcatgattggtagtagtgatttgactatttatggcatattcgaagatggttcaaaagaactagtatttgaaaatggaaattgggcatcaacattttaa

SEQ ID NO: 8403 - DNA, 1737 bp, Staphylococcus aureus
  CDS (1)...(1737)
atgattaaacgatatttgcaatttgttaagccatacaaatatcgtatttttgcaacgattattgttgggataattaagtttggtataccaatgcttataccacttttaattaaatatgcaatagatggcgtgattaataaccacgcactaacgactgatgaaaaagttcatcatttaactattgcaattggtatcgcattatttatttttgtaatagtgagaccaccaattgaatttatacgtcaatatttggcgcaatggacaagtaataaaatattgtatgatatacgtaaaaagttatataaccatttacaagctctaagtgcgagattttatgctaataatcaagtaggtcaagtaatatctagagtgattaatgatgttgaacaaacaaaagatttcattttaaccgggttaatgaatatttggttagattgtataacaattattattgcactatccataatgttctttttagatgtgaaattgactttagcagcactgtttatcttcccattttacattttaacggtgtacgttttctttggaagattaagaaaattgacgcgtgaaagatctcaagcattagctgaggttcaaggattcttgcatgaacgtgttcaaggtatttcagtcgttaaaagttttgcgattgaagacaatgaagcgaaaaactttgataaaaagaacactaatttcttaacacgtgcgttgaaacatacaagatggaatgcctattcctttgccgcaattaatacagttacagatattggaccaataattgtcatcggtgttggtgcatatcttgctatttctggatcaatcacagtaggtacacttgcagcatttgttggatacttggagttattgtttgggcctttacgtcgtttagtcgcatcatttacaactttaacgcaaagttttgcttcaatggaccgtgtattccaattaattgacgaagattatgacattaaaaatggtgttggtgctcaacctattgaaattaaacaaggtcgtattgatattgatcatgttagttttcaatataacgataacgaagctccaattttaaaagatattaatttgagtattgaaaaaggagaaacagttgctttcgtaggtatgagtggtggtggtaaatcaacattaattaacttaataccgagattttacgatgtaacttctgggcaaattttaatagatggtcacaacattaaagattttttaacgggaagtttaagaaatcaaataggattggtgcaacaggataatattttattctccgatacagttaaggaaaatattttacttggtcgtccaacagcaacagatgaagaagtagttgaagcggcgaaaatggctaatgcacatgactttattatgaacttgccacagggatatgacactgaagtaggtgaacgaggtgttaaattatcaggtggtcaaaaacaaagattatcgattgctagaatatttttaaataatccgccaattcttatcctggatgaagcaacaagtgcacttgatttagaaagtgaatccattattcaagaagcattagatgtgttgagtaaagatcgaacgacacttatcgtagcgcatcgcttgtctactattacacatgctgacaaaattgtcgtaattgaaaatgggcatattgttgaaacaggtacgcatcgtgaattgattgcaaaacaaggtgcttacgagcatttatatagcattcaaaacttataa

SEQ ID NO: 8404 - DNA, 1290 bp, Staphylococcus aureus
  CDS (1)...(1290)
atgaattttagtgaaagtgaacgtttacaacaactttcaaatgaatatattctaggcggtgtcaattccccttctcgttcttataaagctgtaggaggcggtgcacctgttgttatgaaagaaggacacggtgcatatttatatgatgtcgatggcaataaatttattgattatcttcaagcatacggtccaattattacggggcatgcacatcctcatattactaaagcaattcaagaacaagctgctaaaggtgttttatttggtacgccgactgaactagaaattgaattcagcaaaaaattacgtgatgcaattccatctcttgagaaaattcgctttgtaaattctggaacagaagcagtcatgacaacaattcgtgttgcacgtgcatatactaaaagaaataaaattataaaatttgctggatcttatcatggccattctgatttagtattggttgcagcaggtagcggcccatctcagctcggttctccagattcagctggtgttccagaaagcgtagcacgtgaagtcattactgttcctttcaatgatattaacgcatataaagaagcaattgaattttggggtgatgaaattgccgcagtattagtagaaccaattgttggtaactttggaatggtaatgcctcaacctggatttttagaagaggttaatgaaatttcacataacaacgggacactagtgatttatgatgaagtaattactgcattccgtttccattacggtgccgctcaagacttattaggtgttatccctgatttaactgcatttggtaaaattgttggcggtggtttaccaattggaggctatggtggacgtcaagatattatggaacaagtagcacctctaggacctgcatatcaagctggtacaatggctggtaacccattatctatgaaagcaggtattgcattacttgaagtactagaacaagacggtgtttatgaaaaattagacagcttaggccaacaactagaagaaggtttacttaaattaatcgaaaaacataatatcacagctacaattaatcgtatttacggatctttaacattgtactttacagatgaaaaagtcacacattatgatcaagttgaacattctgatggcgaagcgttcggtaaatttttcaaattaatgttaaatcaaggtatcaatttagcaccttctaagtttgaagcttggttcttaacaactgaacatacagaagaagatattaaacaaactttaaaagctgcagactatgcttttagtaaaatgaaataa

SEQ ID NO: 8405 - DNA, 1515 bp, Staphylococcus aureus
  CDS (1)...(1515)
gtgctttttccgtgtatatttggtaagaatttgtgtttaggaggaaataaaattatgaaaaagaaaatgattacattaggaacagtcgcaattgcaacaagcttattcacatgggataataaagctgatgcaatagtaaatgataattatacaggacagtcacaagttaaagaagatagcaaaaatagtaataaaatatcgaacgacagcctttattggggagtttttggcaatttagaagcgcagtttaaaaacgctttgaatttgttaaaagaatatcagtatagcgaagaagaatataaagaagctaaagataaattaatgacaagaattgtaagtgaaaatcaatacttacttgataaaaagtttaaagaatacgaagcctataaggctgcattcccaaattttaaagctcaaaatccaacactaaaaagattgagctttgataactacgacatacgagatttaagacagggtgagtataacgatatccgcgcgtcattaaaaaatgctgtagaaacattccataaagatgtttcagctgtccagtctaagcaaacagatctaaaaacatttgatcaacaagaaatggatcaagcaaaactaaaaataaatgaattagaaaataaagcgttaatgttagggtttgctttttctaagcaaacagatgctagacaagatttgtacaataaattggacatgattttaggctattcagaaaaagaaagaacagaaaaacaacctaagaataaaagaatgtttgaagaaactgtaaaagacttggaaacaattatggatgaattctttacagatataggtaaacaaagaccatcagaaataccaacgttaacggacaacaatgaaaataataaagctttagcaaagagtttaagagaccttacaaactcaataacaagtaactcttctcagaaaaaaactgtagataaagtggtgaaaaaacctgatacacaaagtacaggaaataaagagttcgtaatcaaagaaccaacaaaaccatcaatcccaacatatacagaagaaattactaaaaagccaatgccgtcaattaaacaagagataaaagagaaaatcatttatagttctccacaacgctttgctggtttatcaggtgaaagagacgactcctctacttcatataacagcttacaaacaagaataactacaaacagtaatcttgtagaatttgaagaggatacaagcgctagaagccaatatggcccaagacctcaatttaacaaaacacctaaatacattaaatataaagatgctagtacaggcattcacgaatacaacgatggtacatttggatatgaagcaagacctaaattcaataaaccagcgtcaacaaacaaatataacgtaacaacaaagcaagatggaacagtatcatacggtgctagaccaacatttaataaatcaagttatacaaatgcatacaatgtgacaacacatgcaaacggtactacaacgtatggtcctagagtgacaaagtaa

SEQ ID NO: 8406 - DNA, 720 bp, Staphylococcus aureus
  CDS (1)...(720)
atggtacaacatttaacagctgaagaaattattcaatatataagtgatgctaaaaagtctacaccaataaaagtatatttaaatggaaattttgaaggcatcacatatccagaaagttttaaagtatttggttcagaacaatctaaagtaatcttttgtgaagcagatgattggaaacctttttacgaagcatatggtagtcaattcgaagatatagaaattgaaatggatcgtcgcaattctgccattccattaaaagacttaacaaatactaatgcacgtattgaaccaggtgcatttattagagaacaagctattattgaagatagtgctgtcgttatgatgggcgcaacaattaatattggcgcagtcgttggcgaaggtacgatgattgatatgaatgctactctcggtggtcgtgctacaactggtaaaaatgtacatgtaggggctggcgcagtattagcaggcgtgattgaaccccctagtgcttcaccagttataatcgaggatgatgtattaatcggtgcaaatgcagttattttagaaggtgtacgtgttggtaaaggtgctattgttgcagctggcgcgattgtgacacaagatgtaccagctggtgcagttgttgctggtacacctgcgaaagtgattaagcaagcttctgaagtacaagatactaaaaaagagattgtagcagcattaagaaaactgaatgactag

SEQ ID NO: 8407 - DNA, 723 bp, Staphylococcus aureus
  CDS (1)...(723)
gtgaaaatattactaattggctatggcgcaatgaatcaacgcgttgctagattagcagaagaaaaaggacatgaaatcgttggggtcattgaaaatacaccgaaagcaacaacgccatatcaacaatatcaacatattgcagatgttaaagatgccgatgttgcaatagatttttcaaatccaaatctgcttttccctttattagatgaagagtttcatttgccattagttgtggcaacaactggcgagaaagaaaaactacttaataagttagatgaattgagtcaaaatatgcctgtatttttcagcgcgaacatgagttatggcgttcatgcactgactaaaattttagcagctgctgttcccctacttgatgatttcgacatcgaattgactgaggcacatcataataaaaaagtagatgcaccaagtggtacgttagaaaaattatatgacgtgattgtatctttgaaagaaaatgtaactcctgtttatgatagacatgaattaaatgaaaaacgccagccacaagatattggtattcattctattcgtggaggtacgattgtcggtgaacatgaagttctatttgccggcactgatgaaacgattcaaatcacgcatcgtgcacaatcaaaagatatttttgcgaatggtgcaatacaagcagcagaacgcttagttaataaaccaaacggcttttatacgtttgacaacctataa

SEQ ID NO: 8408 - DNA, 990 bp, Staphylococcus aureus
  CDS (1)...(990)
atgacaaaattagcagttgtgggtgcaacaggattagtaggaacaaaaatgttagagacattaaatcgtaaaaatattcctttcgatgaattagtattattttcatcagcacgttctgcagggcaagaagttgaatttcaaggaaaaacatatacagttcaagaattaactgatgctcgtgcaagtgaacatttcgattatgtattaatgagtgctggtggcggtacaagcgaacactttgccccactctttgaaaaagctggtgcaatcgttatagacaattcaagtcagtggcgtatggcagaagatattgatttaatcgttccggaagtcaatgaacctacatttacaagaggtatcattgccaatccaaactgctctacgattcaatctgttgtacctctaaaagtattacaagatgcctatggattaaaacgagtggcatatacaacatatcaggcggtatcaggttcagggatgaaaggtaaaaaagatttagctgagggcattaacggtaagacacctgaagcatatccacatccaatttataataatgtattaccgcatattgatgtgtttttagaaaatggatatacaaaagaagagcaaaagatgattgatgaaactagaaagattttaaatgtaccagacttaaaagtaacagcaacatgtgcacgtgttcctgttcaagatagtcatagtgttgaaattgatgtaacgcttgaaaaagaagcgactgcagaagatattaaagcattatttgatcaagatgaccgtgttgttttagtagacaatccagagaacaatgaatatccaatggcaatcaattctactaataaagatgaagtatttgttggccgtatacgtagagatgattcattagaaaatactttccatgtatggtgtacatcagacaatttattaaaaggtgctgcattaaatgctgtacaagtattggaacaagttatgcgtttaaaaggagcgaattaa

SEQ ID NO: 8409 - DNA, 456 bp, Staphylococcus aureus
  CDS (1)...(456)
atgagatatgtatatttacaaaactgtgtatattgtgtatattgtatatatacagaaggtgatagggggacgttgatgaaaataattttaaaaaacaatagtgattttccgatttatgaacagattaagcaacaagtaaaacaaaatattttaaaggggcatgttgctcctggagagcatttgccatcaatgagggaacttgccaaagatcttcaagtaagtttgattactaccaaacgagcttatgaagatttagagaaagacggttttgttacaacaattagaggaaaaggaacctttgttaaggaaaaagatagttctattttaaaagagaaacaattttttaccattgaaaatttggttaaagaattggttaatgaagcgcaagccatcgaaatgtcacttgaggaacttcaagatattttaacgttcatttatgaggaggaatcatcatga

SEQ ID NO: 8410 - DNA, 381 bp, Staphylococcus aureus
  CDS (1)...(381)
atgaatgccatagaattaagtaatgttagttattcaagtgaccagtttaatttaaagaatatctctttcaaagttcctcaaggattcgtcactggttttattggtagaaatggcgctggtaaaaccacaataataaggttaattatggatttgtatcaaccacaaactggtgttattagagtattagaagaggatatggctctcaatccaatagagttaaagaatagaattgggtttgtttacgctgaaaattattttaatgagagatggactacgaagcaacttgaaaaaatgattgcccctttttatcgtacatgggaccatcaagtatttgaattctatcttgcaaagttcgagttaccaatcaatcaatcaatataa

SEQ ID NO: 8411 - DNA, 501 bp, Staphylococcus aureus
  CDS (1)...(501)
atgaaaatgaaattatcactagcagttgcattttcacatcatgctgaattgtatatttttgatgagcctacttcaggtcttgatcccttagctagaaatgagctattggagataattcagcaagaattaattgatgaaaataaaacaatattcatgtcgacacacattatctcagatttagaaaaaatagctgattatatcattcacttaagtgacggtgaagttatcttaaatggttcaaaagaacaactgttacaaagatatcaagttgtgagtggtgcaattgaggaccttgatgatgaattagcatctctacttatttttgaagaacataagcgtacgggatttataggattaacagaacatgcgcaagtatttaaagaaattttaggtcataaagtgaatatcactacaccttctattgagaacctaatggtttatcttgaaaagagaaaatctaaatatcatgaaaacatcaaattgatggaagaaggtttttaa

SEQ ID NO: 8412 - DNA, 1623 bp, Staphylococcus aureus
  CDS (1)...(1623)
atgaaaaaaaggagaaaatgcatgttacaagtaactgatgtgagtttacgttttggagatcgtaaactatttgaagatgtaaatattaaatttacagaaggtaattgttatggattaattggtgcgaatggtgcaggtaaatcaacattcttaaaaatattatctggtgaattagattctcaaacaggacatgtttcattaggtaaaaatgaacgtctagctgttttaaaacaggaccactatgcttatgaagatgaacgcgtgcttgatgttgtaattaaaggtcacgaacgtctttatgaggttatgaaagaaaaagatgaaatctatatgaagccagatttcagtgatgaagatggtatccgtgctgctgaacttgaaggtgaatttgcagaaatgaatggttggaatgctgaagctgatgcagctaaccttttatccggtttaggtatcgatccaactttacacgataaaaaaatggctgaattagaaaacaaccaaaaaattaaagtattattagcgcaaagtttattcggtgaaccagacgtactattactggatgagcctactaacggtctggatattccagcaattagttggttagaagatttcttaattaactttgataatactgttatcgtagtatcacatgaccgtcatttcttaaataatgtatgtactcatatcgctgatttagactttggtaaaattaaagtttatgttggtaactatgatttttggtatcaatctagtcagttagcacaaaagatggctcaagaacaaaacaagaaaaaagaagaaaaaatgaaagagttacaggactttattgctcgtttctcagctaacgcttctaaatctaaacaagcaacaagtcgtaaaaaacaacttgagaaaattgaattagatgatattcaaccatcatcaagaagatatcctttcgttaaattcacgcctgagcgtgagattggtaacgacttattaatcgttcaaaatctctctaaaacaattgacggcgaaaaagtattagataatgtatcattcacaatgaatccaaatgataaagcgattttaattggagatagtgaaattgcaaaaacaacattacttaaaatattagctggcgaaatggaaccagacgaaggttcatttaaatggggtgttactacatcattaagttacttccctaaagataactcagagttctttgagggtgtaaatatgaatctcgttgattggttaagacaatatgctcctgaagatgaacaaacagaaacatttttacgtggtttcttaggtcgtatgttatttagtggtgaagaagttaagaaaaaagctagtgtgctttcaggtggagaaaaagtacgttgtatgctaagtaaaatgatgttatcaagtgcgaatgtacttttacttgacgaacctactaaccacttagacttagaaagtattactgctgtcaatgatggtcttaaatcatttaaaggttctatcatctttacttcttatgacttcgaatttatcaacacgattgcaaaccgtgttatcgatttaaataaacaaggcggcgtttcaaaagaaattccatatgaagaatacttgcaagaaatcggcgttttaaaataa

SEQ ID NO: 8413 - DNA, 2847 bp, Staphylococcus aureus
  CDS (1)...(2847)
atgaaagaaccatccatagtagtaaaaggtgctcgtgcgcataacttgaaagatattgatatcgaactacctaaaaataaattaattgttatgacaggattatctgggtcaggtaaatcgtcattagcattcgatactatatatgctgaaggacaacgacgttatgttgaatcattaagtgcctatgcgcgtcaatttttagggcaaatggacaaaccagatgttgatactattgaaggattatcgccagcaatttcaatagatcaaaaaacaacaagtaaaaatccaaggtcaactgttgcaacagtaacagaaatatatgattatatacgtttgttatatgcacgtgttggtaaaccttactgtccaaatcacaatatagaaattgaatcgcaaacagtacaacaaatggttgaccagattatggaattagaggcacgtacaaagattcaattattagcacctgtcatcgctcatcgtaaaggtagtcatgaaaagctaatcgaagatattggtaaaaaaggttatgtacgtttaagaatcgatggcgaaattgttgatgtaaatgatgtacctacattagataagaacaagaatcatacaatagaagttgttgtagaccgattagttgttaaagatggaattgaaacacgactagctgactctatagaaactgcgttagagctttcagaaggacaattaacagtcgatgtcattgacggggaagaccttaagttttcagaaagccacgcttgtcctatatgtggattttcaatcggagaattagaaccaagaatgtttagctttaacagtccttttggtgcttgtccaacatgtgatggcttaggtcaaaagttaacagtcgatgtagacttggttgttcccgacaaagataagacgctaaacgaaggtgcaatagaaccatggataccgacgagttctgatttttatccaacactgttaaaacgtgtttgtgaagtttataaaatcaatatggataaaccttttaaaaagttaacagaacgtcaacgtgatattttattgtatggttcgggtgacaaagaaattgaatttacatttacacaacgtcaaggtggtactagaaaacgaacaatggtcttcgagggtgtagttcctaatataagtagacgattccatgaatcaccttcagaatatacacgtgaaatgatgagtaaatatatgaccgaactaccttgcgaaacttgtcatggaaagcgattgagtcgtgaagcgttatctgtttatgtaggtggtttaaatattggtgaagtagtcgaatactcaatcagtcaagcgctgaactattataaaaacattaatttgtcagaacaagatcaagcgattgcaaatcaaatattgaaagaaattatttcccgactcacttttttaaataatgtgggacttgaatatttaacgctaaacagagcttcaggtacactttcaggtggtgaagcacaacgtattcgattggcaacgcaaattgggtcacgtttgactggtgtcttatatgtattagatgagccatcaattggactgcatcaaagagataatgatcgattaattaatacacttaaagaaatgagagatttaggaaatactttaattgtagttgaacacgatgatgatacaatgcgtgcggctgattacttagtggatatagggcctggtgctggtgagcatggaggacagattgtttctagtggtacacctcaaaaggtaatgaaagataaaaaatctttaacaggacaatacttgagtggtaagaaacgtattgaagtacctgaatatcgcagaccggcttcagatcgtaaaatttctatacgtggagctagaagtaacaaccttaaaggggttgatgtggacataccactatcaatcatgacggtcgttacaggtgtatcaggttcaggtaaaagctcattagtaaatgaagtattatacaaatcattagctcaaaaaatcaataaatctaaagtaaagccaggattgtacgataagattgaaggtattgatcaacttgataaaattattgatattgatcaatcaccgataggtagaacgccacgctctaatccagcaacgtatactggtgtgtttgatgatatacgtgatgtgtttgcgcaaacaaatgaagctaaaattcgaggatatcaaaaaggccgttttagttttaatgtaaaaggtggacgctgtgaagcttgtaaaggtgacggtattattaaaattgaaatgcattttttacctgatgtttatgttccttgtgaagtgtgtgatggtaaacgatataatcgtgagacactagaggttacttacaaaggtaaaaatattgctgacattttagaaatgactgttgaagaagcaacacaattttttgaaaatattcctaagattaatcgcaagttacaaacactagttgatgttggtcttggatacgtcacattaggtcaacaagctacaacgttatcaggtggtgaggctcaacgtgtgaaacttgcatctgaacttcataaacgttcaactggtaaatctatttatattctagacgaaccgacaacagggttacatgttgacgatattagcagattattaaaagtattaaaccgattagttgaaaatggtgacactgttgtaattattgaacataacctagatgttatcaaaacagcagactatattatagacttaggtcctgaaggtggtagtggcggtggtactattgttgcgactggcacacccgaagatattgctcagacaaagtcatcatatacaggaaagtatttaaaagaagtacttgaacgagataaacaaaatactgaagataaataa

SEQ ID NO: 8414 - DNA, 1167 bp, Staphylococcus aureus
  CDS (1)...(1167)
atgagatggataaaaaggaaaaagaaaaactttctcaacagcaaattcaatttcaacaacggaaaaatcgcaacgtatctatataaggagcgaacagctatgtggaataagaatcgacttactcaaatgttaagtattgaatatccaattatacaagcaggtatggcaggaagtacgacaccgaaattagttgcatcagtaagtaacagtggtggattaggcacaataggcgcaggttactttaatacgcagcaattagaagacgaaatagattatgtacgccaattaacgtcaaattcttttggtgtaaatgtctttgtaccaagtcaacaatcatataccagtagtcaaattgaaaatatgaatgcatggttaaaaccttatcgacgcgcattacatttagaagagccggttgtaaaaattaccgaagaacaacaatttaagtgtcatattgatacgataattaaaaagcaagtgcctgtatgttgttttacttttggaattccaaatgaatctattataaaaagattgaaagaagcaaacattaagctaataggtacagcaacaagtgttgatgaagctattgcgaatgaaaaagcgggtatggatgctatcgttgctcaaggtagtgaagcaggtggacatcgtggttcatttttaaatcctaaaaatcaattacctatggttggaacaatatctttagtgccacaaattgtagatgtcgtttcaattccggtcattgccgctggtggaattatggacggtagaggagttttggcaagtattgttttaggtgcagaaggggtacaaatgggcaccgcatttttaacatcacaagatagtaatgcatcagaactactgcgagacgcaattataaatagtaaagaaacagatacagtcgttacaaaagcgtttagtggaaagcttgcacgcggtatcaacaataggtttatcgaagaaatgtcccaatatgaaggcgacatcccagattatccaatacaaaatgagctaacaagtagcataagaaaagccgcagcaaacatcggcgacaaagagttaacacatatgtggagtggacaaagcccgcgactagcaacaacgcatcccgccaacaccatcatgtccaatataatcaatcaaattaatcaaatcatgcaatataaataa

SEQ ID NO: 8415 - DNA, 933 bp, Staphylococcus aureus
  CDS (1)...(933)
atgttaacgacagaaaaactagttgaaacattaaagttagatttaatcgctggtgaagaaggattatcgaagccaattaaaaatgctgatatatcaagaccgggcttagagatggcaggttatttttcacattatgcgtcagatagaatacaactattaggaacaacggaactatcgttttacaatttattaccagataaggatcgtgcaggtcgtatgcgtaaactatgcagaccagaaacgcctgcaattattgtgacacgtggattgcagccaccagaagaattagttgaagctgcaaaagaattaaatacgccacttatagttgctaaagatgcgactacaagtttaatgagtcgcttaacaacgtttttagagcatgcacttgcaaagacgacatctttacatggtgttttagtagatgtttacggtgttggtgtactaattaccggtgattcaggaataggtaaaagtgagactgcgttggagttagttaaacgtgggcatagattagtagcagatgataatgtagaaatacgtcaaattaataaagatgaactaatagggaaaccaccaaagttaatagaacacctattagaaatacgtggactaggtattatcaatgttatgactttatttggcgcgggttcaatattaactgaaaaacgaattagattaaatattaatttggaaaactggaacaagcaaaagttatatgaccgcgtaggtcttaacgaagagacgttaagtattttagatactgaaatcactaaaaaaacaatacctgtaagacctggtagaaatgttgcggtaattattgaggtcgctgcaatgaactatcgattaaatatcatgggcattaacactgccgaagaatttagtgaaagattaaatgaagaaattatcaagaacagtcataagagtgaggagtag

SEQ ID NO: 8416 - DNA, 972 bp, Staphylococcus aureus
  CDS (1)...(972)
atgaatttcgatataatgtttaaagatacacttaacaggagggtatgtgttgttatggcgacaaaaaacgaggaaatattacgtaaaccggattggttgaaaataaaattaaataccaacgaaaactatacaggacttaagaagatgatgagggaaaaaaatcttaatactgtatgtgaagaagctaaatgtcctaatatacatgaatgttggggtgcacgtcgtacagcgacatttatgattttaggtgccgtatgtacaagagcttgtcgtttttgtgcggttaagacaggtttacctaatgaacttgatttaaatgagcctgaacgtgtagctgaatcagttgaattaatgaacttgaaacacgttgttatcactgctgttgcgcgtgatgatttaagagatgctggttcaaatgtttatgctgagacagtacgtaaagttagagaaagaaatccatttacaacgattgaaattttaccatcagatatgggcggggactatgatgcgttagaaacattaatggcttcaagacctgacattttaaaccataatattgaaactgttcgtcgattaacaccgagagttcgtgcgcgtgcgacttacgacagaacattagagtttttacgtcgttcaaaagaattacaaccggatatcccaactaaatcaagtattatggttggattaggtgaaactatagaagaaatttatgaaacgatggatgatttacgtgcgaatgatgtagatattttaacgattggtcaatatttacaaccttcacgtaaacatttaaaggttcaaaaatattacacgcctttagagtttggtaaattaagaaaagtggcaatggataaagggtttaaacattgccaagctggacctttagtgcgtagttcttatcatgccgatgagcaagtaaatgaagctgctaaagaaaagcaacgccaaggtgaggcacagttaaatagttaa

SEQ ID NO: 8417 - DNA, 1458 bp, Staphylococcus aureus
  CDS (1)...(1458)
atgacagatattattaacaagctgcaagcgtttgcggatgcaaatccacaaagcattgctgttagacacacaactgatgaattaacttatcaacagttaatggatgagtctagtaaattagcacatcgattacaaggtagtaagaaaccgatgattttattcggtcacatgtcaccatatatgattgttgggatgattggtgccattaaagcaggatgtggatatgtacctgtagacacttcaattcctgaagaccgtattaaaatgattattaacaaggttcaaccagagtttgtatttaatacgactgatgaatcatttgaaagtttagaaggcgaagtatttacaatagaagatattaaaacatctcaagacccagtaatttttgatagtcagattaaagataacgacacagtatacacaatctttacatctggttctactggggaacctaaaggtgttcaaattgaatatgcaagtttagttcaatttactgagtggatgttagaacttaataaatcaggaaatgaacaacaatggcttaaccaagcgccattttcatttgatttatctgtaatggctatttatccatgtttagcatcaggcggtacattaaatcttgtagataaaaacatgattaataaacctaaattattaaatgaaatgctaacagcaacaccgattaacatttgggtatcaacaccatcatttatggaaatgtgtttattattaccaacgcttaatgaagaacagtatggtagtcttaacgaattcttcttctgtggtgaaattctacctcacagagcagcaaaagcgttagtaagccgtttcccaagtgcgacgatttacaacacatatggtccaactgaagctacggtagcagttacaagtattcaaattacacaagaaatcttagatcaatatccgacattacctgttggcgttgaaagatcaggcgcaagattatctacgacagatgaaggtgaacttgttatcgaaggtcaaagtgtaagtttaggatacttaaaaaatgaccaaaaaacagctgaagtatttaatttcgatgacggtattcgtacttatcacactggtgataaagcgaagtttgaaaatggtcaatggttcattcaaggtcgtattgatttccaaatcaaattgaatggctacagaatggaattagaagaaattgaaacacaattacgccagtctgagttcgtaaaagaagcgattgttgtacctgtatataaaaatgataaagttatccatttaattggtgcaattgtgccaacgactgaagttacggacaatgcagaattgactaaaaatattaaaaatgacttgaaatcacgcttaccagagtatatgattcctagaaagtttgaatggatggaacaattgccattgacttcaaatggtaaaattgacagaaagaaaattgcagaggtaattaacggatga

SEQ ID NO: 8418 - DNA, 1209 bp, Staphylococcus aureus
  CDS (1)...(1209)
atggctcaagatcgtaaaaaagtacttgtacttggtgctggttatgcaggtttacaaactgtaactaaattgcaaaaagcgatatcaacagaagaagcagaaattacgcttattaataaaaatgaatatcactatgaagcaacatggttacatgaagcatcagcaggtacactaaactatgaagatgtattatatcctgtggaaagtgtcttgaagaaagacaaagtgaactttgttcaagcagaagtaacaaaaattgaccgtgatgctaaaaaggtagaaacaaatcaaggtatttatgactttgatattttagtagtagcattaggtttcgttagtgaaacattcggcatcgaaggtatgaaagatcatgctttccaaattgaaaatgttatcacagcacgtgaattatcacgtcatatcgaagacaaatttgctaactatgcagcatcaaaagaaaaagatgataacgatttatctatcttagttggtggtgctggattcacaggtgttgaattcttaggtgaattaacagacagaattcctgaattatgtagcaaatatggtgtggatcaaaataaagttaaaatcacttgtgttgaagcagcacctaaaatgttaccaatgttctcagaagaattagttaaccacgcagttagctacttagaagactgcggtgttgaatttaaaattgctacaccaatcgttgcttgtaacgaaaaaggtttcgtagttgaagtagatggtgaaaaacaacaattaaatgcaggtacttcagtatgggcagctggtgtacgtggtagtaaattaatggaagaatcatttgaaggcgttaaacgtggacgtatcgttacaaagcaagatttaacaatcaatggttacgacaacatttttgttattggtgactgttcagcgtttatcccagctggagaagaacgtccattaccaactacagcacaaattgcaatgcaacaaggtgaaagtgttgctaaaaacattaaacgcatcttaaacggtgaatcaactgaagaattcgaatacgttgatcgtggaactgtttgttctttaggttcacatgacggtgtaggtatggtatttggtaaacctatcgctggtaaaaaagcagcattcatgaaaaaagtgattgatacacgtgcggtattcaaaatcggtggtatcggtttagcattcaaaaaaggtaaattctag

SEQ ID NO: 8419 - DNA, 1545 bp, Staphylococcus aureus
  CDS (1)...(1545)
gtgtcactgaagggctttattgttgtacaatttgaagggagtaacatatcaaatctaaggaggtacattatgaattttaaattaaataacacactaagcaacgaaataaatacattgattattggtataccagaacatttaaatcagttagagcgcattagttttaatcatatcgatattacagaatcacttgaaagactaaaacatcaacatattattggtagtaaagttgggaagatttatacaactgcatttgatgtacaagatcaaacttatcgtttaattacagttggtttaggaaacttaaaaacacgtagttatcaagatatgttgaaaatatggggacatcttttccaatacataaagtcagaacacattgaagatacgtatttacttatggattcatttatttcaaaatatgatcagttatcagatgtattaatggcatgcggtattcaaagtgagcgtgcaacatatgaattcgatcattataaatcaagtaagaaggcaccgtttaagacgaatttaaaccttattagtgaatcattaattgaattagattttattcatgagggtatcagtattggccaatccattaatttggcaagagactttagtaatatgccaccgaatgtattaacaccacaaacatttgcagaagatattgttaatcattttaaaaatacaaaggtcaaagtagaggttaaagattatgacactttagtttctgaaggattcggacttttacaagcggtaggtaaaggtagtaagcataaaccgagattagtaaccatcacatataatggcaaagacaaagatgaagtaccaattgccttagttggtaaaggtataacgtatgattctggtggttatagtattaaaacgaagaatggcatggctacaatgaaatatgacatgtgtggcgctgcgaatgtcgttggtatcattgaagcggctagtcgtttacaactgcctgtaaatattgtcggagtgcttgcttgtgctgaaaatatgataaatgaagcatcaatgaagccagatgatgtatttacagcattaagtggtgaaactgtagaagtaatgaatacagacgctgaaggcagattagtccttgcagatgctgtgtattatgcaaatcaatatcagcctagtgtgattatggactttgctacattaacgggtgcagcaattgttgcactaggagatgataaagctgctgcatttgaatcgaatagtaaagtgatattaaacgatatattacaaataagttctaaagtcgatgaaatggtatttgaattaccgattactgcaaccgaacgtgcaagtattaaacacagtgatatcgctgatttagttaaccatacgaatggacaaggtaaagcgctatttgcggcaagttttgtaacacattttagtggtcaaacacctcacattcatttcgatattgcaggtccagcaacgactaataaagcttcatataatggtccaaaagggccaacaggatttatgattccgacgatagtacaatggttaaaacaacaataa

SEQ ID NO: 8420 - DNA, 429 bp, Staphylococcus aureus
  CDS (1)...(429)
atgaatagacaacaaaatgatctaattttgcaatttgctgcagttattatctttttcatggtaatggtctttggtttttcacttttcttagcaggacattatacacctggtggcggtttcgtcggcggattattattcgcaagttcacttgtaatcattacgattgcatttgatatagaaacaatgcgtaaaattttcccattagattttaaaatcttgataggtatcggattagttttttgtattgcgacgcctatcgcaagttggtttttaggtaaaaatttctttacgcatgtcacatttgatataccgttatttatattagaacctgttcatatgacaacagcagtattctttgatttcggtgttttatgtgcagtagttggtactgtcatgacaattattatttcgattggagagaacgaatag

SEQ ID NO: 8421 - DNA, 2406 bp, Staphylococcus aureus
  CDS (1)...(2406)
gtgagtttgttacatattgcggtgatattaccgttaatattcgcactcattattcctatcctgtatagattttttaaacgtatacatttaggatggttcgtattacctgtccctatcgtcatatttatttatatgcttacattaattaaaacgacgatgtcaggtaatactgtaatgaaaaccttaaattggatgcctcattttggtatgaactttgatttatatcttgatggcttaggtttactctttagtttgcttatttcaggaatcggcagtttagtagtattatattcaatcggctacttaagtaagtcagaacaactagggaatttttattgttatttattactatttatgggtgcaatgttaggtgtcgtactttcagataatgttattattctatatttattctgggagctaacgtcattttctagttttttacttatttcattctggcgcgaacgacaagcatctatatatggtgctcaaaaatcgctcataatcacagtatttggtggtctatcattattaggtggtatcatcttactcgctataccaacgcaatcatttagcattcagtacatgattcaacatgcttctgaaattcaaaatagcccattcttcatttttgcgatgattttaatcatgattggtgcttttacaaaatctgctcagtttccattttatatttggctaccagatgcaatggaagcacctacaccagtcagtgcttatcttcattcagcaacaatggttaaagcagggttatatttaatcgctcgaatgacaccaatcttcgcagcatcgcaaggttggatatggactgtcacactcgttggtttaattacgttattctgggcttcgctaaacgcaacaaaacaacaagacttgaaaggtatactggcattttcaacagtatcccaattaggtatgattatggcgatgcttggaatcggtgccattagttatcactatcaaggcgatgatagcaaaatatatgctgctgcatttacggctgcaatattccatttaatcaaccatgcaacatttaaaggtgccctatttatgattacaggtgcagtggatcattctactggtacacgtgatgttaagaaattaggtggcttactaacaattatgcctatttcatttacaatcactgttattacagcattaagtatggctggtgtaccaccgttcaatggtttcttatcaaaagaatcatttttagaaacaacatttacagcaagccaagcaaatttattcagtgttgatacattaggctacctattcccaatcattggtatagtgggcagtgtcttcacatttgtatattcaattaaatttataatgcatatatttttcggacaatataaacctgaacaattacctaaaaaagcacacgaagtatcaatattaatgcttttatcaccagctattttagctacattagtaattgtatttggtttattccctggcattttaactaattcgattattgaaccagctacatcttcgattaatcatacggtaattgatgatgttgaattccatatgttccatggattaacgcctgcctttttatcaacattagtgatttatattttaggtattttactaattgtgacatttagttattgggtgaaattgttgcaacgacaacctggtaaactaacattcaattattggtacaacagaagtgcaaatgttattccaaactactctgaaaagatgacgaatagctatgttaccgattattcacgtaataatttagttatcatttttggtgcattaattttattaacatttgtcactgtattctcagtacctttcaacattaattttaaagacgttagtccgattagaattttcgaagtttgtatcgtaattttattattaagtgctgcctttttaattcttttcgctaaatcaagattatttagcatcattatgttaagtgcagttggatatgctgtgtctgtattgtttatattctttaaagcacccgacttagcattgacacagtttgtcgttgaatctatttcaacagcattgttcttattatgcttctaccacttaccaaatttaaatcgttataatgaaaagcgctcattccagcttactaatgctttaattgctggtggtgttggtttgtccgtcattattatcggtttaattgcatacggaaatagacattttgaatcgatatctaagttttatcaagagcacgtttatgatttagctcacggtaaaaacatggtaaacgttatacttgttgatttccgtggtatggatactttattcgagtcatctgtgcttggtatcgcaggattagctgtatatacaatgattaaattacgtaaaaagcgtcaaacgcaaggtaacgaggtgaaaaatcatgaatag

SEQ ID NO: 8422 - DNA, 1332 bp, Staphylococcus aureus
  CDS (1)...(1332)
atgactcatatgcaattagagtttagtataacgttagaatttttcggtgaacacgaattaaaacaacatcaagaaattgttaaatcaattcacaaaacaattcatgaaggtactggtgcaggtagtgacttcttaggctgggttgatttaccagttgattacgacaaagaagaattttcaagaattgttgaagcatcaaaacgcattaaagaaaattctgatgttttagtagtcatcggtattggtggttcttatttaggtgcacgtgcagcaatcgaaatgttaacgtcatcatttagaaacagcaatgaataccctgaaattgtatttgttggtaatcacttatcatcaacatacactaaagagttagttgattatttagcagacaaagatttctctgtaaacgttatttctaaatctggtacaactacagaaccagcagttgcatttagattgttcaaacaattagttgaagaaagatacggtaaagaagaagcacaaaaacgtatatttgcaacaacggataaagaaaaaggtgctttaaaacagttggctacaaacgaaggttatgaaacatttatcgtacctgatgatgtaggtggaagatattctgttttaacagcagtaggattattaccaattgcaacagctggaattaacatcgaagctatgatgattggtgctgcaaaagcacgtgaagaattatcttcagataaattagaagaaaacattgcataccaatatgcgacaattcgaaacattttatatgcaaaaggttatacaacagaaatgttgattaactatgaaccatctatgcaatactttaatgaatggtggaaacaattatttggtgaatcagaaggtaaagacttcaaaggtatctatccttcaagtgccaactacacaactgatttacattctttaggtcaatatgtacaagaaggccgtcgtttcttattcgaaacagttgtaaaagtaaatcatcctaaatatgatattactattgaaaaagatagtgatgatctagacggattaaattatttagctggtaaaacaatcgacgaagttaacacaaaagcattcgaaggtacattattagcgcatactgatggtggtgttcctaacatggtagtgaacattccacaattagatgaagaaactttcggttatgtcgtatacttcttcgaacttgcttgtgcaatgagtggataccaattaggcgtaaatccatttaaccaacctggtgtagaagcatataaacaaaacatgttcgcattattaggtaaacctggttttgaagacttgaaaaaagaattagaagagcgtttataa

SEQ ID NO: 8423 - DNA, 585 bp, Staphylococcus aureus
  CDS (1)...(585)
gtgtcaaaattgaaaaaagaattattggaatggattatttcaattgcagtcgcttttgtcattttatttatagtaggtaaatttattgttacaccatatacaattaaaggtgaatcaatggatccaactttgaaagatggcgagcgagtagctgtaaacattattggatataaaacaggtggtttggaaaaaggtaatgtagttgtcttccatgcaaacaaaaatgatgactatgttaaacgtgtcatcggtgttcctggcgataaagtagaatataaaaatgatacattatatgtcaatggcaaaaaacaagatgaaccatatttaaactacaatttaaaacataaacaaggtgattacattactgggactttccaagttaaagatttaccgaatgcgaaccctaaatcaaatgtcattccaaaaggtaaatatttagttcttggggataatcgtgaagtaagtaaagatagccgtgcgtttggccttattgatgaagatcaaattgttggtaaagtttcatttagattctggccattcagcgaatttaaatataatttcaatcctgaaaatactaaaaattaa

SEQ ID NO: 8424 - DNA, 3477 bp, Staphylococcus aureus
  CDS (1)...(3477)
atgacattacatgcttatttaggtagagcgggaacaggtaagtctacgaaaatgttgaccgaaataaaacaaaaaatgaaagcagatccgcttggagatccaatcattttaattgcgccaactcaaagtacatttcaattagaacaagcctttgtcaatgatccggaattaaatggtagtttaagaacagaaatgttgcactttgaacgattaagtcatcgtattttccaagaagttggtagttatagcgaacaaaagttatctaaagctgcaacggaaatgatgatttataacattgttcaagaacaacaaaagtatttaaaactttatcaatcacaagcaaaatattatgggtttagtgaaaaattaacagaacaaattcaagattttaaaaaatatgcagtaacgcctgaacatttagaaagctttattgctgataaaaatatgcaaactcgaactaaaaataagttagaggatattgctttaatataccgagagttcgaacaacgcattcaaaacgagtttattacgggtgaggatgcattacaatattttattgattgtatgccgaaatcagagtggctaaaatgtgctgatatatatattgatggatttcacaacttttcaacgattgagtatttaataatcaaaggattaattaaatatgcgaagagtgtcacaattatattgacgacagatggtaaccacgatcaattcagtttatttagaaaaccatcggaagtgttacgacatattgaagaaatagcaaatgaactcaatatttctattgaacgtcaatatttcaagcaatcatatcgctttaataatcaagatttaaagcatcttgaacaagaatttgatgcacttcaaatcaatcgagtggcatgtcaaggtcatatcaatattttagaatctgcgactatgagagaggaaataaatgaaattgcacgacgtatcatcgttgatattcgtgataagcaattacgatatcaagatattgctattttatatcgtgacgagtcttatgcttatttatttgattccatattaccgctttataatattccttataacattgatacaaagcgttcgatgacacatcatccggtcatggaaatgattcgttcattgattgaagttattcaatctaattggcaagttaatccaatgctacgcttattgaagactgatgtgttaacgacatcatatctaaaaagtgcatacttagttgatttacttgaaaattttgtacttgaacgtggtatatacggtaaacgttggttagatgatgagctatttaatgtcgaacattttagcaaaatggggcgtaaagcgcataaactgaccgaagatgaacgtaacacatttgaacaagtcgttaagttaaagaaagatgtcattgataaaattttacattttgaaaagcaaatgtcacaagcagcaactgtaaaagactttgcaactgctttttatgaaagtatggaatattttgaactgccaaatcaattgatgacagagcgagatgaacttgatttaaatggtaatcatgaaaaggcggaagaaattgatcaaatatggaatggcttaattcaaatccttgatgacttagttctagtatttggagatgaaccaatgtcgatggaacgtttcttagaagtatttgatattggtttagaacaactagaatttgttatgattccgcaaacattggaccaagttagtattggtacgatggatttggctaaagttgacaataagcaacatgtttacttagttggaatgaatgatggaacgatgccacaaccagtaactgcgtcaagcttgattacagatgaagaaaagaaatactttgaacagcaggctaatgtcgagttaagtccaacatcagatattttacagatggatgaagcatttgtttgttatgttgctatgactagagctaagaggaatgttacattttcttatagtctaatgggatcaagtggtgatgataaggaaatcagcccatttttaaatcaaattcaatcattgttcaaccaattagaaattactaacattcctcaataccatgaagttaacccattgtcactaatgcaacatgctaagcaaaccaaaattacattatttgaagcattgcgtgcttggttagatgatgaaattgtggctgatagttggttagatgcttatcaagtaattagagatagtgatcttttaaatcaaggtttagattatttaatgtcagcattaacgtttgacaatgaaactgtaaaattaggtgaaacgttgtctaaagaattatatggtaaagaaattaatgccagtgtgtctcgctttgagggataccaacaatgcccgtttaaacattatgcgtcacatggtctgaaactaaatgagcgaacgaagtatgaacttcaaaactttgatttaggtgatattttccattccgttttaaaatatatatctgaacgtattaatggcgattttaaacaattagacctgaaaaaaataagacaattaacgaatgaagcattggaagaaattttacctaaagttcagtttaatttattaaattcttcagcttactatcgttatttatcaagacgcattggcgctattgtagaaacaacactaagcgcattaaaatatcaaggcacgtattcaaagtttatgccaaaacattttgagacaacttttagaaggaaaccaagaaccacccccgaattaaatgcacaaacattaacgacaactcaaggtattccaattaatattagagggcaaattgaccgtatcgatacgtatacaaagaatgatacaagttttgttaatattattgactataaatcctctgaaggtagtgcgacacttgatttaacgaaagtgtattatggtatgcaaatgcagatgatgacatacatggatatcgttttacaaaataaacaacgccttggattaacagatattgtgaaaccaggcggattattatacttccatgtacatgaacctagaattaaatttaaatcttgggcagatattgatgaagataaattagaacaagatttaattaaaaagtttaagctgagtggtttagtgaatgcagaccaaactgttattgatgcattggatattcgtttagaacctaaattcacttcagatattgtgccagttggtttgaataaagatggttctttgagtaaacgaggcagccaagttgcagatgaagcaacgatttataaattcatccaacataacaaagaaaattttatagaaacagcttcaaatattatggatggacatactgaagttgcaccattaaagtacaaacaaaaattgccatgtgctttttgtagttatcaatcggtatgtcatgtagatggcatgattgatagtaagcgatatcgaactgtagatgaaacaataaatccaattgaagcaattcaaaatattaacattgatgatgaatttgggggtgagcaatag

SEQ ID NO: 8425 - DNA, 3654 bp, Staphylococcus aureus
  CDS (1)...(3654)
atgacaattccagagaaaccacaaggcgtgatttggactgacgcgcaatggcaaagtatctacgcaactggacaagatgtacttgttgcagccgcggcaggttcaggtaaaacagctgtactagttgagcgtattatccaaaagattttacgtgatggcattgatgtcgatcgacttttagttgtaacttttacaaacttaagtgcacgtgaaatgaagcatcgtgtagaccaacgtattcaagaggcttcgattgctgatcctgcaaatgcacacttgaaaaaccaacgcatcaaaattcatcaagcacaaatatctacacttcatagtttttgcttgaaattaattcaacagcattatgatgtattaaatattgacccgaactttagaacaagcagtgaagctgaaaatattttattattagaacaaacgatagatgaagtcatagagcaacattacgatatccttgatcctgcttttattgaattaacagagcaattgtcttcagatagaagtgatgatcagtttcgaatgattattaaacaattgtatttctttagcgttgcaaatccaaatcctacaaattggttggatcaattggtgacaccatacgaagaagaagcacaacaagcgcaacttattcaactactaacagacttatctaaagtatttatcacagctgcctatgatgctttaaataaggcgtatgatttgtttagtatgatggatggcgtcgataaacatttagctgttatagaagatgaacgacgtttaatggggcgtgttttagaaggtggctttattgatataccttatttaactggtcacgaatttggcgcgcgtttgcctaatgtaacagcgaaaattaaagaagcaaatgaaatgatggttgatgccttagaagatgctaaacttcagtataaaaaatataaatcattaattgataaagtgaaaagtgattacttttcaagagaagctgatgatttgaaagctgatatgcaacaattggcgccacgagtaaagtaccttgcgcgtattgtgaaagatgttatgtcagaattcaatcgaaaaaagcgtagcaaaaatattttggatttttctgattatgaacattttgcattacaaattttaactaatgaggatggttcgccttcagaaattgccgaatcataccgtcaacacttccaagaaatattggtcgatgagtatcaagatacgaaccgagttcaagagaaaatactatcttgcatcaaaacgggtgatgaacataatggtaatttatttatggttggagatgttaagcaatccatttataaatttagacaagctgatccaagtttatttattgaaaagtatcaacggtttactatagatggagatggcactggacgtcgaattgatttgtcacaaaacttccgttcacgtaaagaagtactgtcaacgacaaattatatattcaaacatatgatggatgaacaagtcggtgaagtaaattatgatgaatcagcacaattgtattatggtgcaccatatgatgaatcggaccatccagtaaacttaaaagtgcttgttgaagcggatcaagaacatagtgatttaactggtagtgaacaagaagcgcattttatagtagaacaagttaaagatatcttagaacatcaaaaagtttatgatatgaaaacaggaagctatagaagtgcgacatacaaggatatcgttattctagaacgcagctttggacaagctcgcaatttacaacaagcctttaaaaatgaagatattccattccatgttaatagtcgtgaaggatactttgaacaaacagaagtccgtttagtattatcatttttaagagcgatagataatccattacaagatatttatttagttgggttaatgcgttccgttatttatcagttcaaagaagacgaattagctcaaattagaatattgagtccaaatgatgactacttctatcaatcgattgtaaattacattaatgacgaagcagcagatgctattttagttgataaattaaaaatgtttttatcagatattcaaagttaccaacaatatagtaaagatcatccggtgtatcagttaattgataaattttataatgatcattatgttattcaatactttagtggacttattggtggacgtggacgacgtgcaaatctttatggtttatttaataaagctatcgagtttgagaattcaagttttagaggtttatatcaatttattcgttttatcgatgaattgattgaaagaggcaaagattttggtgaggaaaatgtagttggtccaaacgataatgtcgttagaatgatgacaattcatagtagtaaaggtctagagtttccgtttgttatttattctggattgtcaaaagattttaataaacgtgatttgaaacaaccagttattttaaatcagcaatttggtctcggaatggattattttgatgtggataaagaaatggcatttccatctttagcttcggttgcatatagagctgttgccgaaaaagaacttgtgtcagaagaaatgcgattagtctatgtagcattaacaagagcgaaagaacaactttatttaattggtagagtgaaaaatgataaatcattactagaactagagcaattgtctatttctggtgagcacattgctgtcaatgaacgattaacttcaccaaatccgttccatcttatttatagtattttatctaaacatcaatctgcgtcaattccagatgatttaaaatttgaaaaagatatagcacaagttgaagatagtagtcgtccgaatgtaaatatttcaattatatactttgaagatgtgtctacagaaaccattttagataatgatgaatatcgttcggttaatcaattagaaactatgcaaaatggtaatgaagatgttaaagcacaaattaaacaccaacttgattatcaatatccatatgtaaatgatactaaaaagccctcaaaacaatctgtttctgaattgaaaagacaatatgaaactgaagaaagtggcacaagttacgaacgagtaaggcaatatcgtatcggtttttcaacttatgaacgacctaaatttctaagtgaacaaggtaaacgaaaagcgaatgaaattggtacgttaatgcatacagtgatgcaacatttaccattcaaaaaagaacgcatatctgaagttgagttacatcagtatatcgatggattaatcgataaacatattatcgaagcagatacgaaaaaagatattcgtatggatgaaataatgacatttatcaatagtgagttatattcgattattgctgaagcagagcaagtttatcgtgaattaccgtttgtagttaaccaagcattagttgaccaattgccacaaggagacgaagacgtctcaattattcaaggtatgattgacttaatctttgttaaagatggtgtgcattattttgtagactataaaaccgatgcatttaatcgtcgccgtgggatgacagatgaagaaattggtacacaattaaaaaataaatataagatacagatgaaatattatcaaaatacgcttcaaacgattcttaataaagaagttaaaggttatttatacttcttcaaatttggtacattgcaactatag

SEQ ID NO: 8426 - DNA, 903 bp, Staphylococcus aureus
  CDS (1)...(903)
atgaaattcttatcattcaagtataatgacaaaacttcatatggcgttaaagtaaaacgcgaagatgctgtatgggatttaacacaagtatttgctgactttgcagaaggagatttccatcctaaaacattgttagctggtttacaacaaaatcatactttagattttcaagaacaagtacgtaaagcagttgtagcagcagaagatagcggcaaagctgaagactataaaatttcatttaatgacattgaattcttaccaccagtaacacctccgaataatgtgattgcttttggtagaaattacaaagatcatgcgaacgaattaaatcatgaagtggaaaaattatatgtatttacaaaagcagcgtcatctttaacaggaggtaatgcaacaattccaaatcataaagatattactgatcaattagattatgaaggtgaattaggtattgttattggtaagtctggtgaaaagattccaaaagcattagctttagattatgtttacggctatacaattattaacgatatcactgatcgtaaagcgcaaagtgaacaagatcaagcatttttatcaaaaagtttaactggcggttgcccaatgggtccttatatcgttactaaagacgaactaccattacctgaaaatgtaaatattgttacaaaagttaacaatgaaattagacaagatggtaacactggcgaaatgattcttaaaattgatgaattaatagaagaaatttcaaaatatgttgcactacatccgggagatattattgcaactggtacaccagcaggcgttggtgcaggtatgcaaccacctaaattcttacaaccaggtgatgaagttaaagtgactattgataatattggaacgctgacaacttatatcgctaaataa

SEQ ID NO: 8427 - DNA, 1815 bp, Staphylococcus aureus
  CDS (1)...(1815)
atgaacaaaacaaagggttttacaaaatataagaaaatgagatatatgccagggctcgatggtttgagggcaatcgctgttctaggaattattatttaccacttaaataagcaatggttgacaggtggctttttaggtgtggatacattttttgtgatctctggttatttaattacaagcttattactcaaagagtatgatgacacaggtatcattaaattgaaaagcttttggatacgtcgtttaaaacgtttattaccagcagtcatagttttattaatggttgtagggacagcaaccttattattaaaatcagataatatcattagggttaaacatgatattattgctgcgatattttatgtatcaaattggtggtatatagcaaaagatgttaattattttgagcaattttcatttatgccattaaagcatttatggtctttagcaattgaagaacagttttacatatttttcccagttattttggttacattattgttaacaattaaaaagcgatacaaaataggatttattttttggggagtatctataatttctttagggttaatgatgtttatctacagtattaatggggatcattcacgagtgtattttggaacagatacaagattacagacattgttactgggtgttattttagcttttttatggccaccgtttaaattgaaaaatgatccacctaaagttgtaaaatatgttattgatagcataggtagtttatcatttatagtacttatattattatttttcattattaatgatgagacgaattggatatatgatggaggtttctatttaatatccatattaacgttatttattattgccagtgtcgttcatccatctacatggatagcgaagatattttcaaatccagtgttagtatttatcgggaaaagatcttacagtctatatttatggcattttgcagtaattagtttcgtacatagttactatgtagacggacagatacctgtatatgtgtactttatagatataagtttaacaattatatttgcagagctatcatatcgctttatagaaactccatttagaaaagaaggtattaaagctttaaattggcgaccttcttatataccacaatttataagaatggcaattgtagtaaccttgttaattccatttatgttgattttagtaggtgcattcaataaatatggtaaagacattataggagaaaaagcgaatagctttgataccactattgaagataattatttaatgcggatagcaccaattgataacattcacattgatggcttagtaagtgagaagaaaaaggaatcttccgacgtatataataatattaaacctcttttaatcggtgattcagtaatggttgatatcggtgagtcatttaagtcatcagttcctaagtctagaattgatggaaaagtagggcgtcaattgtatcaaaccttacctttagttaaagcgaattattcacaatataaaaaatcatctgatcaagttgtattagaattaggtacaaatggcgactttactgtcaaacagctcgacgatttacttaatcaatttggaaaagccaagatttatttagttaatacacgtgttccaagaatttatgaggcaaatgtaaatcgattattagctgacgcggcgaaacgaaagtccaatgtcacattaattgattggtataagcgatcacaaggacatagtgaatattttgcaccagacggtgtacatttagagtacaaaggagtcctagctttaaaagatgaaatattaaaagcacttaaaaagaaataa

SEQ ID NO: 8428 - DNA, 2649 bp, Staphylococcus aureus
  CDS (1)...(2649)
gtgcaatttgaccaactctacaaattagaggtgaaattaatggatataaataaaatgacatatgctgttcaaagtgctttacaacaagcagttgaactgagtcagcaacataaattacaaaatatagaaattgaggcaattttaagcgctgccttaaatgaaagtgaaagcttatataaaagtattttagaacgagcaaatattgaggtagatcaattaaacaaagcttatgaagacaaactaaatacgtatgcatctgtagaaggtgacaatatacaatatggtcaatatattagccaacaagcaaaccaattgataactaaggctgaatcatacatgaaagaatatgaagatgaatatatttcaatggagcatattttacgttcggcaatggacattgatcaaacaacaaaacattatataaataataaagtagaagttatcaaagacattattaaaaaagtcagagggggaaatcacgtgacatcacaaaatcctgaagttaattacgaagcattagctaaatatggccgcgacttagtagaagaagttagacaaggtaaaatggatcctgttataggaagagatgaagaaattcgaaatacgattcgtattttaagtcgtaaaactaaaaacaaccctgtgctcattggtgaaccaggtgttggtaaaactgcaattgttgaaggattagcgcagcgtatagttaagaaagatgtgccagaatcattattagataaaactgtttttgagttagatttaagcgcattagtagcgggcgctaaatatcgtggtgaatttgaagagagattaaaagcagtcctaaaagaagttaaagagtctgatggtagaattatattatttattgatgaaatccatatgcttgtaggtgctggtaaaacagatggtgccatggatgcaggcaacatgctaaaaccaatgttagcacgaggagagttacattgtattggtgcaacaactttaaatgaatatagagaatatattgaaaaagattcggcattagagcgtcgtttccaaaaagtagcagttagtgagcctgatgttgaagatacaatttcaattttacgtggtttaaaagaacgatatgaagtgtatcatggtgtgcgtattcaagatagagccttagttgctgccgctgaattgtctgatcgttacatcactgatcgttttttaccagataaagcgattgatttagttgaccaagcatgtgcaacaattcgtacggaaatgggatcaaatccaactgaattggatcaagttaatagacgtgttatgcaattagaaattgaagaaagcgcacttaaaaatgaatctgacaatgcgagcaaacagagattacaagaactacaagaagagcttgccaatgaaaaagagaaacaagcagcacttcaatctcgtgtagaatcagaaaaagaaaaaatagcaaacttacaagaaaaacgtgcgcaactagatgaaagtagacaagcgttggaagatgcacaaacaaataacaatttagaaaaagcagctgaactacaatatggaacaattcctcaattggaaaaagaacttagagaattagaggataatttccaagatgagcaaggtgaagatacagatcgaatgattcgtgaagttgtaacagacgaagaaattggcgatattgtcagccaatggacaggcataccagtttcaaaattagttgaaacagaacgtgaaaaattacttcacttaagtgatatcttgcataaacgtgttgtaggtcaagataaagcggttgacctggtttcagatgcagtagttagagcaagagcaggtattaaagatccaaacagacctattggtagtttcttattcctaggtccaactggggtaggtaaaactgaattagctaaatcattagctgcatcattatttgattctgaaaaacatatgattcgtattgatatgagtgaatatatggaaaaacatgcagtatcaagattgataggggcacctccaggatatattggacatgatgaagggggtcaattaactgaagcggttcgtcgtaatccatactcagttattttattagatgaggttgaaaaagcgcatactgacgtctttaatgtattattgcaaattttagatgaaggccgtttaactgattctaaaggacgtagcgttgattttaaaaatactattattattatgacaagtaatattggatctcaagttttattagaaaacgtaaaagagactggtgaaattacagaatcaacagaaaaagctgttatgacaaatttaaatgcatatttcaaaccagaaattttgaatcgtatggatgacatcgtattatttaaacctttatctattgatgatatgagtatgattgtagacaaaatattaacgcaattaaatataagattactagaacaacgaatctcaattgaagtttctgatgatgctaaagcttggctaggtcaagaggcttatgaacctcaatacggtgcaagaccattaaaacgttttgtacaacgccaaattgaaacaccattagcacgtatgatgattaaagagggattcccagaaggtacaactattaaagttaatttaaattcagacaataacttaacgtttaatgttgaaaaaattcatgaataa

SEQ ID NO: 8429 - DNA, 912 bp, Staphylococcus aureus
  CDS (1)...(912)
atggataataatgaaaaagaaaaaagtaaaagtgaactattagttgtcacaggtttatctggtgcaggtaaatctttggttattcaatgtttagaagacatgggatatttttgtgtagataatctaccaccagtgttattgcctaaatttgtagagttgatggaacaaggaaatccatccttaagaaaagtggcaattgcaattgatttaagaggtaaggaactatttaattcattagttgcagtagtggataaagtcaaaagtgaaagtgacgtcatcattgatgttatgtttttagaagctagtactgaaaaattaatttcaagatataaggaaacgcgtcgtgcacatcctttgatggaacaaggtaaaagatcgttaatcaatgcaattaatgaagagcgagagcatttgtctcaaattagaagtatagctaattttgttatagatactacaaagttatcacctaaagaattaaaagaacgcattcgtcgatactatgaagatgaagagtttgaaacttttacaattaatgtcacaagtttcggttttaaacatgggattcagatggatgcagatttagtatttgatgtacgatttttaccaaatccatattatgtagtagatttaagacctttaacaggattagataaagacgtttataattatgttatgaaatggaaagagacagagattttctttgaaaaattaactgatttgttagattttatgatacccgggtataaaaaagaagggaaatctcaattagtaattgccatcggttgtacgggtggacaacatagatctgtagcattagcagaacgactaggtaattatctaaatgaagtatttgaatataatgtttatgtgcatcatagggacgcacatattgaaagtggcgagaaaaaatga

SEQ ID NO: 8430 - DNA, 942 bp, Staphylococcus aureus
  CDS (1)...(942)
atgaacgtgggtattaaaggttttggtgcatatgcaccagaaaagattattgacaatgcctattttgagcaatttttagatacatctgatgaatggatttctaagatgactggaattaaagaaagacattgggcagatgacgatcaagatacttcagatttagcatatgaagcaagtgtaaaagcaatcgctgacgctggtattcagcccgaagatatagatatgataattgttgccacagcaactggagatatgccatttccaactgtcgcaaatatgttgcaagaacgtttagggacgggcaaagttgcctctatggatcaacttgcagcatgttctggatttatgtattcaatgattacagctaaacaatatgttcaatctggagattatcataatattttagttgtcggtgcagataaattatctaaaataacagatttaactgaccgttctactgcagttctatttggagatggtgcaggtgcggttatcatcggtgaagtttcagaaggcagaggtattataagttatgaaatgggttctgatggcactggtggtaaacatttatatttagataaagatactggtaaactgaaaatgaatggtcgagaagtatttaaatttgctgttagaattatgggtgatgcatcaacacgtgtagttgaaaaagcgaatttaacatcagatgatatagatttatttattcctcatcaagctaatattagaattatggaatcagctagagaacgcttaggtatttcaaaagacaaaatgagtgtttctgtaaataaatatggaaatacttcagctgcgtcaatacctttaagtatcgatcaagaattaaaaaatggtaaactcaaagatgatgatacaattgttcttgtcggattcggtggcggcctaacttggggcgcaatgacaataaaatggggaaaatag

SEQ ID NO: 8431 - DNA, 1245 bp, Staphylococcus aureus
  CDS (1)...(1245)
atgagtcaaaataaaagagtagttattacaggtatgggagccctttctccaatcggtaatgatgtcaaaacaacatgggagaatgctctaaaaggcgtaaatggtatcgataaaattacacgtatcgatactgaaccttatagcgttcacttagcaggagaacttaaaaactttaatattgaagatcatatcgacaaaaaagaagcgcgtcgtatggatagatttactcaatatgcaattgtagcagctagagaggctgttaaagatgcgcaattagatatcaatgaaaatactgcagatcgaatcggtgtatggattggttctggtatcggtggtatggaaacatttgaaattgcacataaacaattaatggataaaggcccaagacgtgtgagtccatttttcgtaccaatgttaattcctgatatggcaactggacaagtatcaattgacttaggtgcaaaaggaccaaatggtgcaacagttacagcatgcgcaactggtacaaactcaatcggagaagcatttaaaattgtgcaacgcggtgatgcagatgcaatgattactggtggtacggaagctccaattactcatatggcaattgcaggtttcagtgcaagtcgagcgctttctacaaatgatgacattgaaacagcatgtcgtccattccaagaaggtagagacggttttgttatgggtgaaggtgctggtattttagtaatcgaatctttagaatcagcacaagctcgaggtgccaatatctatgctgagatagttggctatggtactacaggtgatgcttatcatattacagcgccagctccagaaggtgaaggcggttctagagcaatgcaagcagctatggatgatgctggtattgaacctaaagatgtacaatacttaaatgcccatggtacaagtactcctgttggtgacttaaatgaagttaaagctattaaaaatacatttggtgaagcagctaaacacttaaaagttagctcaacaaaatcaatgactggtcacttacttggtgcaacaggtggaattgaagcaatcttctcagcgctttcaattaaagactctaaagttgcaccgacaattcatgcggtaacaccagacccagaatgtgatttggatattgttccaaatgaagcgcaagaccttgatattacttatgcaatgagtaatagcttaggattcggtggacataacgcagtattagtattcaagaaatttgaagcataa

SEQ ID NO: 8432 - DNA, 996 bp, Staphylococcus aureus
  CDS (1)...(996)
atgagacaaataaaagttgtacttatcggtggtggcactggcttatcagtcatggctaggggattaagagaattcccaattgatattacagcgattgtaacagttgctgataatggtgggagtacagggaaaatcagagatgaaatggatataccagcaccaggagacatcagaaatgtgattgcagctttaagtgattctgagtcagttttaagccaactttttcagtatcgttttgaagaaaatcaaattagcggtcactcattaggtaatttattaatcgcaggtatgactaatattacgaatgatttcggacatgccattaaagcattaagtaaaattttaaatattaaaggtagagtcattccatctacaaatacaagtgtgcaattaaatgctgttatggaagatggagaaattgtttttggagaaacaaatattcctaaaaaacataaaaaaattgatcgtgtgtttttagaacctaacgatgtgcaaccaatggaagaagcaatcgatgctttaagggaagcagatttaatcgttcttggaccagggtcattatatacgagcgttatttctaacttatgtgtcaatggtatttcagatgcgttaattcattctgatgcgcctaagctatatgtatctaatgtgatgacgcaacctggggaaacagatggttatagcgtgaaagatcatatcgacgcgattcatagacaagctggacaatcgtttattgattatgtcatttgtagtacacaaactttcaatgctcaagttttgaaaaaatatgaagaaaaacattctaaaccagttgaagttaataaggctgaacttgaaaaagaaagcataaatgtaaaaacatcttcaaatttagttgaaatttctgaaaatcatttagttagacataatactaaagtgttatcgacaatgatttatgacatagctttagaattaattagtactattcctttcgtaccaagtgataaacgtaaataa

SEQ ID NO: 8433 - DNA, 945 bp, Staphylococcus aureus
  CDS (1)...(945)
atgagctttgcatcagaaatgaaaaatgaattaactagaatagacgtcgatgaaatgaatgcaaaagcagagctcagtgcactgattcgaatgaatggtgcacttagtctttcaaatcaacaatttgttataaatgttcaaacggaaaatgcaacaacggcaagacgtatttattcgttgattaaacgtgtctttaatgtggaagttgaaatattagtccgtaaaaaaatgaaacttaaaaaaaataatatttatatttgtcgtacaaagatgaaagcgaaagaaattcttgatgaattaggaattttaaaagacggcatttttacgcatgaaattgatcattcaatgattcaagatgacgaaatgagacgcagttacttgagaggagcttttctggcaggtggctcagtgaataaccccgaaacatcttcgtaccatttggaaattttttctcaaaatgagagtcatgcagaaggcttaacgaaactaatgaatagttatgagttgaatgccaaacatttagagcgaaaaaaaggaagtattacgtatttaaaagaagcggaaaagatttcggattttcttagtttgataggtggctatcaagcgttattaaaatttgaagacgtacgtattgtaagagatatgcgtaattctgttaaccgactcgttaattgtgaaacggcaaatctaaataaaacagttagtgctgcgatgaaacaagttgagagtattaaattgattgataaagaaattggtattgaaaatttaccagacaggttgagagagattgctagaattcgagtagaacatcaagaaatttcgttgaaagagcttggagaaatggtgtcaactggtccaatttcaaaatcaggtgtaaatcatcgattaagaaaacttaatgatttagccgataagattagaaatggtgaacaaatagaattataa

SEQ ID NO: 8434 - DNA, 990 bp, Staphylococcus aureus
  CDS (1)...(990)
atggagacattattttcaggcatccaacctagtggaattcctactattggaaattatattggcgcactaaaacaatttgttgatgtgcaaaatgactatgattgttatttctgtatcgtagatcaacatgcaattacaatgccacaagatcgcttaaaattacgtaaacaaactagacaattagcagcgatttatttagcttctggtatagatccagacaaagcaacattgttcatacaatctgaagtccctgcacacgtacaagcaggatggatgttaactacgattgcttctgttggagaactagagcgtatgacgcaatacaaagataaagctcagaaagcagttgaaggtataccagctggtctattaacatatccacctttaatggcagctgatattgttctttacaatactaatatcgttccagttggcgatgaccaaaagcagcatatcgaattgactcgtaaccttgtagatagatttaatagccgctataatgatgtgcttgtaaaacctgaaattcgtatgcctaaagttggtggacgtgtcatgagtttacaagacccaacaagaaaaatgagtaagagtgatgataatgctaaaaacttcatttcattattagacgagccgaatgttgcagctaaaaaaattaaaagcgcagtaactgattcagatggtattattaaatttgatcgtgacaacaagccaggtataacgaatttaatttcaatatacgctggattaacagacatgccaattaaagatattgaggcaaaatatgaaggcgaaggttacggtaaattcaaaggcgaccttgctgaaatagttaaagcatttttagtagaattccaagaaaaatacgaaagtttctataactcagataaacttgatgatattttagatcaaggtagagataaagcacacaaagtttcatttaaaactgtcaagaaaatggaaaaagcgatgggtttaggacgtaagagataa

SEQ ID NO: 8435 - DNA, 366 bp, Staphylococcus aureus
  CDS (1)...(366)
atgacaacaacaccatatgacatcattggtaaagaagcgttatacgatatgattgattatttttacacccttgtagaaaaagatgaacgacttaatcacctgtttccaggggattttgcagaaacaagtcgtaaacaaaagcaatttttaacacagtttttgggcggtccaaacatttataccgaagaacacggacatcctatgctaagaaaaagacatatggcgtttactatcactgaatttgaaagagatgcatggttagaaaatatgcagacagcaattaatcgcgctgcgtttccacaaggtgttggagattatttatttgagcgcttaagattaactgctaattatatggtgaattcctaa

SEQ ID NO: 8436 - DNA, 636 bp, Staphylococcus aureus
  CDS (1)...(636)
atgaatcaatgggatcagttcttaacaccttataagcaagcggttgatgagttgaaagtgaaacttaaaggcatgcgcaaacaatatgaagttggtgaacaagcctcgccaatagaatttgttactggtcgtgttaaaccaatcgctagtattatagataaggcaaacaaacgacaaataccatttgataggttaagagaagaaatgtacgatatcgctggtttaagaatgatgtgccaatttgttgaagatattgatgttgtcgtcaatattttaagacaaagaaaagattttaaagtaattgaagaacgagattatattcgtaacactaaagaaagtggttaccgctcgtatcatgtcattattgaatatccaatcgaaacattacaaggccaaaaatttatattggctgagattcagattcgtacattagcaatgaatttctgggcaacgattgaacatactttacgatataaatatgatggtgcttatccggatgaaattcaacatcgtttggaaagagcggcagaagcagcgtatttacttgatgaagagatgtctgaaattaaagatgaaattcaggaagctcaaaaatattacacgcaaaaacgttctaaaaaacatgaaaatgattaa

SEQ ID NO: 8437 - DNA, 771 bp, Staphylococcus aureus
  CDS (1)...(771)
atgttaaatcttgaaaacaaaacatatgtcatcatgggaatcgctaataagcgtagtattgcttttggtgtcgctaaagttttagatcaattaggtgctaaattagtatttacttaccgtaaagaacgtagccgtaaagagcttgaaaaattattagaacaattaaatcaaccagaagcgcacttatatcaaattgatgttcaaagcgatgaagaagttattaatggttttgagcaaattggtaaagatgttggcaatatcgatggtgtatatcattcaatcgcatttgctaatatggaagatttacgcggacgtttttctgaaacttcacgtgaaggtttcttgttagcccaagacattagttcttactcactaactatcgttgctcatgaagctaaaaaattaatgccagaaggtggtagcattgttgcaacaacatatttaggtggcgaattcgcagttcaaaactacaatgtgatgggtgttgctaaagcgagcttagaagcaaatgttaaatatttagcattagacttaggtccagataatattcgcgttaatgcaatttcagctggtccaatccgtacattaagtgcaaaaggtgtgggtggtttcaatacaattcttaaagaaatcgaagagcgtgcacctttaaaacgtaacgttgatcaagtagaagtaggtaaaacagcggcttacttattaagtgacttatcaagtggcgttacaggtgaaaatattcatgtagatagcggattccacgcaattaaataa

SEQ ID NO: 8438 - DNA, 1674 bp, Staphylococcus aureus
  CDS (1)...(1674)
gtgcttaatcgtataatatttttatgtttaaacaatagggggaatcttatgattgaaaaattagtaacctttttaaatgaggttgtttggagtaagccattagtttatggtttgctaattactggtgtgctatttacattgcgtatgcgattttttcaagttagacattttaaagaaatgattcgattaatgtttcaaggagagaagtctcctaatggtatttcaagttttcaagcgatagccatgtctttagcaggcagggttggtacaggtaatattgtcggtgtatctactgcaatatttataggaggacctggtgcagtattttggatgtggattactgcgtttttaggtgcaagtagtgcttttattgaatctacacttggtcaaatattcaagagagttgaaaataatgaataccgtggtggaccagcgtattatattgaatatggtattggtggtaaatttggtaaaatttacggaattatctttgctattgttacgattatctcagtaggtctgttgcttcctggtgtgcaatctaacgctatagcaagttctatgcacaatgcgattcatgttacacaatggttaatgggtggtattgttgtagttattttgggattaattatttttggtggtgtacgtagtattgccaatgttgcaacagccattgtaccatttatggcaattatttacatactaatggctgtcattatcatttgtatcaatatacaagaagtgccagcgttatttgcattaattttcaaatcagcatttggattacaatctgcttttggtggtatcgttggcgcaatgatagagattggtgttaaacgtggattatactcaaatgaggctgatcaaggtacaggtccacacgcagcagcggcagcagaagtatcacatccaagtaaacaaggtctagtacaagcattttcagtttatattgatacattatttgtatgtactgcaactgctctgattatacttatttctggtacatataatgtgactgatggtacgcttaatgcgaatggcacaccgcatttaattaaagatggcgggatttatgttgaaaatgcaacaggcaaagattattcaggaactgcgatgtatgcacaagccggcattgataaagcgttccatggcagtggttatcaatttgatcctactttctctggtgtaggttcgtactttattgcatttgctttattcttctttgcatttactactattttgtcgtactactacattacagaaacaaatgtcgcttatttaacgcgtaatcaaaataatcaagtttcatcggtatttattaatattgcacgtgtgattattttgttcgctacattttacggtgcagttaaaacagctgatgtagcatgggcattcggtgatttaggtgtaggtctaatggcttggttaaatatcattgcgatttggattttacataagcctgccgtaaatgctttaaaagattatgaaattcaaaagaaacgtttaggcaacggttataatgcagtttatcaacctgatccgaataaattacctaatgctgtcttttggttgaagacatatccagaacgtttaaaacaagcacgtgtcaaaaagcaatctacttttgtttatagtatatgtagtgatcatttgataaaaaagaaaaagtattga

SEQ ID NO: 8439 - DNA, 1515 bp, Staphylococcus aureus
  CDS (1)...(1515)
atgatggaaaaaaatgaaaacattaatgtagagattttaactacgtcagatatgcatagtcatttcttaaatggtgattatggttcaaatatttatagagctggtacttatgttaaccaagtaagagcacaaaatcatcgcgtcattttattagatagtggcggaagtttagctggctcgttagcggcctattattatgctattgttgcaccttataaacgacatccaatgataaagttgatgaacagaatgcattatgatgctagcggtgtgagtccaagtgaattcaagtttggtttatcatttttaactcgttcaattgctttggcacgttttccatggttatcagcaaatattgaatacaatgttactaaggagccttatttttcaactccatattgtattaaacattttggtgacttaaaaattgctatcgtaggcgttacagcagatggtttaatggaaaatgagtattctgaaatggagcaagatgtatctattgaaaagacattagtggcctcaaaacgatggattagatatatccatgaagttgaagagccagattttttgattgtaatttatcatggtggattgaataaaattagtaatagcacgaaaaataaaaaggcaagttcgaatgaagctgaaaaattaatggaagaactcggtgttatagatttaatgattacagctcatcagcatcaaacaatagtaggtcaagatcatgaaacgtattatgttcaggctggtcaagatgcaaaagagcttgtacatctttcgattaattttaaaaagagaacaacaacttatgatgttgaaagtattgattctaaagtgattgacttaaatgagtatgaagaggatcaagaattattagatttaacattctatgatagaaaagcagtggcttattggtcacaggaaatcataagtgataaaggtttgatgttatcagtaaatgggttacaagatttagtctgtcaaacacatccattttcgcaattattacatgatgcaattcaccttgcatttgataatgatataacatgtgtccacgtgcctatgaacggagagaaggggttgagtggacagattcgaaatgaagatttgtatcatgcatacccttatccagataagccaatggatatgacaattagtggtcaaaatatcaaagatatattggagtatagttattcacatttagattttgttaacgagcaattaagcttaacaattattgatgaaacattatgtacaatgtggcaaggattcaattatgaaattgatatgaatcaagaacctgggcaaagagtaatgttagatcaaattgatttgactaagagttatagagttacaatgactgactattgttatcgtaactacaagaattatttgaaaaatgctattatacatgaatcatacgatgaaacaatgagtacaataattgcagagaagttaagagatccgaattatcgtatttcatgtagtgataattttgtagttaaaaacaggtaa

SEQ ID NO: 8440 - DNA, 909 bp, Staphylococcus aureus
  CDS (1)...(909)
atgataatgaaacaatacttaattactggtggaactggtatggttggatctcaattagttaatgaaatcaaaaaatcagattcacatatcacgatattaacgcgacacgaccaaatttcaaatgataagaaaatttcatatgtcaactgggctaaatctgggtgggaacacaaagttcctcaaaatatcgatgtggtcatcaacttagcaggtgctacattgaataaacgatggacaccggaatataaacaaacgctaatgctaagtagaattcaatctacgcaagctttatatgaattgtttaagtcacgtaataaagcatctaaagttttatttaatgctagtgccactggttactatcctcctgatttatttatgagttacacagaagtttataaaactttaccatttgatttcttatcagatattgtgtatcaatgggaacgtttcgcacaacaatttgaacaattaggtacgcgagttgtcatcggtcgtttcggtataattttatcgaatgaaggcggtgcgttacaaacaatgaaactaccatacgaatattacattggtggtaaattaggttctggtcaacaatggtattcatggatccatatcaatgatttaattcaagctattttatttttaataaataacgagtcagctagtggtccgtttaatttaactgcacctatacctgagcgtcaaaatttatttggctacactttagcaagagctatgcataagcctcatgaaacttgggcaccaagtcttgcaatgcgtctcatacttggtcaaatgtcaacagtagtattggatactcaaaaagtattacctaataaaattcaagcattgggattccaatttaaatatagtaatttaaaaatggcacttgaagatttaattagtaagtga

SEQ ID NO: 8441 - DNA, 1014 bp, Staphylococcus aureus
  CDS (1)...(1014)
gtgaaagacttattgcaagcacagcaaaagcttataccggatctcatagataaaatgtataaacgtttttctattcttactactatctcaaaaaatcagcctgtcggacgtcgaagtttaagcgaacatatggatatgactgaacgtgtactgcgttctgaaacagatatgcttaagaaacaagatttgataaaagttaagcctaccggaatggaaattacagctgaaggtgagcaactgatttcgcaattgaaaggttactttgatatctatgcagatgacaatcgtctgtcagaaggtattaagaataaatttcaaattaaggaagttcatgttgttcctggtgatgctgataatagccaatctgttaaaacagaattaggtagacaagcaggtcaattacttgaaggcatattacaagaagatgcgatagttgctgtaactggcggatccacgatggcatgtgttagtgaagcaattcatttattaccatataatgtattcttcgtaccagccagaggtggactaggcgaaaatgttgtctttcaggcaaacacaattgcagctagtatggcacaacaagctggcggttattatacgacgatgtatgtacctgataatgtcagcgaaacaacatataacacattgttgttagagccatcagtcataaacactttagacaaaattaaacaagcaaacgttatattacacggcattggtgatgcgctgaagatggcgcatcgacgtcaatcacctgaaaaggtcattgaacaacttcaacatcatcaagctgtcggagaggcatttggttattattttgatacacaaggtcaaattgtccataaggttaaaacaattggacttcaattagaagaccttgaatcaaaagactttatttttgcagttgcaggaggcaaatcgaaaggtgaagcaattaaagcatacttgacgattgcacccaagaatacagtgttaatcactgatgaagccgcagcaaagataatacttgaataa

SEQ ID NO: 8442 - DNA, 1011 bp, Staphylococcus aureus
  CDS (1)...(1011)
atggcagtaaaagtagcaattaatggttttggtagaattggtcgtttagcattcagaagaattcaagaagtagaaggtcttgaagttgtagcagtaaacgacttaacagatgacgacatgttagcgcatttattaaaatatgacactatgcaaggtcgtttcacaggtgaagtagaggtagttgatggtggtttccgcgtaaatggtaaagaagttaaatcattcagtgaaccagatgcaagcaaattaccttggaaagacttaaatatcgatgtagtattagaatgtactggtttctacactgataaagataaagcacaagctcatattgaagcaggcgctaaaaaagtattaatctcagcaccagctactggtgacttaaaaacaatcgtattcaacactaaccaccaagagttagacggttctgaaacagttgtttcaggtgcttcatgtactacaaactcattagcaccagttgctaaagttttaaacgatgactttggtttagttgaaggtttaatgactacaattcacgcttatacaggtgatcaaaatacacaagacgcacctcacagaaaaggtgacaaacgtcgtgctcgtgcagcagcagaaaacatcatccctaactcaacaggtgctgctaaagctatcggtaaagttattcctgaaatcgatggtaaattagatggtggtgcacaacgtgttcctgtagctacaggttcattaactgaattaacagtagtattagaaaaacaagacgtaacagttgaacaagttaacgaagctatgaaaaatgcttcaaacgaatcattcggttacactgaagacgaaatcgtttcttcagacgttgtaggtatgacttacggttcattatttgacgctacacaaactcgtgtaatgtcagttggcgaccgtcaattagttaaagttgcagcttggtatgataacgaaatgtcatatactgcacaattagttcgtacattagcatacttagctgaactttctaaataa

SEQ ID NO: 8443 - DNA, 1191 bp, Staphylococcus aureus
  CDS (1)...(1191)
atggctaaaaaaattgtttctgatttagatcttaaaggtaaaacagtcctagtacgtgctgattttaacgtacctttaaaagacggtgaaattactaatgacaaccgtatcgttcaagctttacctacaattcaatacatcatcgaacaaggtggtaaaatcgtactattttcacatttaggtaaagtaaaagaagaaagtgataaagcaaaattaactttacgtccagttgctgaagacttatctaagaaattagataaagaagttgttttcgtaccagaaacacgcggcgaaaaacttgaagcagctattaaagaccttaaagaaggcgacgtattattagttgaaaatacacgttatgaagatttagacggtaaaaaagaatctaaaaatgatccagaattaggtaaatactgggcatctttaggtgatgtgtttgtaaatgatgcttttggtactgcgcatcgtgagcatgcatctaatgttggtatttctacacacttagaaactgcagctggattcttaatggataaagaaattaagtttattggtggcgtagttaacgatccacataaaccagttgttgctattttaggtggagcaaaagtatctgacaaaattaatgtcatcaaaaacttagttaacatcgctgataaaattatcatcggcggaggtatggcttatactttcttaaaagcgcaaggtaaagaaattggtatttcattattagaagaagataaaatcgacttcgcaaaagatttattagaaaaacatggtgataaaattgtattaccagtagacactaaagttgctaaagaattttctaatgatgccaaaattactgtagtaccatcagattcaattccagcagaccaagaaggtatggatattggaccaaacactgtaaaattatttgcagatgaattagaaggtgcgcacactgttgtatggaatggacctatgggtgtattcgagttcagtaactttgcacaaggtacaattggtgtatgtaaagcaattgcaaaccttaaagatgcaattacgattatcggtggcggtgattcagctgcagcagcaatttctttaggttttgaaaatgacttcactcatatttcaactggtggcggagcgtcattagagtacttagaaggtaaagaattgcctggtatcaaagcaatcaataataaataa

SEQ ID NO: 8444 - DNA, 1305 bp, Staphylococcus aureus
  CDS (1)...(1305)
atgccaattattacagatgtttacgctcgcgaagtcttagactctcgtggtaacccaactgttgaagtagaagtattaactgaaagtggcgcatttggtcgtgcattagtaccatcaggtgcttcaactggtgaacacgaagctgttgaattacgtgatggagacaaatcacgttatttaggtaaaggtgttactaaagcagttgaaaacgttaatgaaatcatcgcaccagaaattattgaaggtgaattttcagtattagatcaagtatctattgataaaatgatgatcgcattagacggtactccaaacaaaggtaaattaggtgccaatgctattttaggtgtatctatcgcagtagcacgtgcagcagctgacttattaggtcaaccgctttacaaatatttaggtggatttaatggtaagcagttaccagtaccaatgatgaacatcgttaatggtggttctcactcagatgctccaattgcattccaagaattcatgattttacctgtaggtgctacaacgttcaaagaatcattacgttggggtactgaaattttccacaacttaaaatcaattttaagcaaacgtggtttagaaactgcagtaggtgacgaaggtggtttcgctcctaaatttgaaggtactgaagatgctgttgaaacaattatccaagcaatcgaagcagctggttacaaaccaggtgaagaagtattcttaggatttgactgtgcatcatcagaattctatgaaaatggtgtatatgactacagtaagttcgaaggcgaacacggtgcaaaacgtacagctgcagaacaagttgactacttagaacaattagtagacaaatatcctatcattacaattgaagacggtatggacgaaaacgactgggatggttggaaacaacttacagaacgtatcggtgaccgtgtacaattagtaggtgacgatttattcgtaacaaacactgaaattttagcaaaaggtattgaaaacggaattggtaactcaatcttaattaaagttaaccaaatcggtacattaactgaaacatttgatgcaatcgaaatggctcaaaaagctggttacacagcagtagtttctcaccgttcaggtgaaacagaagatacaacaattgctgatatcgctgttgctacaaacgctggtcaaattaaaactggttcattatcacgtactgaccgtattgctaaatacaatcaattattacgtatcgaagatgaattatttgaaactgctaaatatgacggtatcaaatcattctataacttagataaataa

SEQ ID NO: 8445 - DNA, 474 bp, Staphylococcus aureus; identical to SEQ ID NO: 4565
  CDS (1)...(474)

SEQ ID NO: 8446 - DNA, 3066 bp, Staphylococcus aureus
  CDS (1)...(3066)
atgaatatgaagaaaaaagaaaaacacgcaattcggaaaaaatcgattggcgtggcttcagtgcttgtaggtacgttaatcggttttggactactcagcagtaaagaagcagatgcaagtgaaaacagtgttacgcaatccgatagcgcaagtaacgaaagcaaaagtagtgattcaagtagcgttaatgctgcacctaaaacagacaacacaaacgtgagtgatactaaaacaacgtcaaacactaataatggcgaaacgagtgtggcgcaaaatccagcacaacaggaaacgacacaatcagcatcaacaaatgcaactacggaagaaacaccggtaactggtgaagctactactacggcaacgaagcaagctaatacaccggcaacaactcaatcaagcaatacaaatgcggaggaattagtgaatcaaacaagtaatgaaacggcttctaatgatactaatacagtatcatctgtaaattcacctcaaaattctacaaatgcggaaaatgtttcaacaacgcaagatacttcaactgaagcaacaccttcaaacaatgaatcagctccacagagtacagatgcaagtaataaagatgtagttaatcaagcggttaatacaagtgcgcctagaatgagagcatttagtttagcggctgtagctgcagatgcaccggctgctggcacagatattacgaatcagttgacagatgtgaaagttactattgactctggtacgactgtgtatccgcaccaagcaggttatgtcaaactgaattatggtttttcagtgcctaattctgctgttaaaggtgacacattcaaaataactgtacctaaagaattaaacttaaatggtgtaacttcaactgctaaagtgccaccaattatggtcggagatcaagtattggcaaatggtgtaatcgatagtgatggtaatgttatttatacatttacagactatgttgatactaaagaaaatgtaacagctaatattactatgccagcttatattgaccctgaaaatgttacaaagacaggtaatgtaacattgacaactggcataggaaccaatactgctagtaagacagtattaatcgactatgagaaatatggacaattccataatttatcaattaaaggtacgattgatcaaatcgataaaacaaataatacgtatcgccaaacaatttatgtcaatccaagcggagataacgttgtgttacctgccttaacaggtaatttaattcctaatacaaagagtaatgcgttaatagatgcaaaaaacactgatattaaagtttatagagtagataatgctaatgatttatctgaaagttattatgtgaatcctagcgattttgaagatgtaactaatcaagttagaatttcatttccaaatgctaatcaatacaaagtagaatttcctacggacgatgatcaaattacaacaccgtatattgtagttgttaatggccatattgatcctgctagcacaggtgatttagcactacgttcgacattttatggttatgattctaattttatatggagatctatgtcatgggacaacgaagtagcatttaataacggatcaggttcaggtgacggtatcgataaacctgttgttcctgaacaacctgatgagcctggtgaaattgaaccaattccagaggattcagattctgacccaggttcagatagtggttcagattctaattcagatagcggttcagattcgggtagtgattctacatcagatagtgattcagattcagcgagtgattcagattcagcgagtgattcagattcagcgagtgattcagattcaacgagtgattcagattcagcaagcgattcagattcagcgagtgattcagattcagcaagcgattcagactcagcaagcgattcagactcagcaagcgattcagactcagacagtgactcagacagtgattcagattccgacagtgactcagactcagatagcgattcagattccgatagcgattccgactcagacagtgactcagacagtgattcagattccgacagcgactcagattccgatagcgattccgactcagatagcgactcagattcagatagcgattccgactcagatagcgactcagactcagacagtgactcggattcagatagcgattcagactcagacagtgactcggattcagatagcgattcagactcagacagtgactcggattcagatagcgattccgattcagatagcgattcagactcagacagtgactcggattcagatagcgattcagattccgatagtgactcagactcagacagcgattccgactcagacagcgactcggattcagatagcgattccgattccgacagcgactcagactcagacagcgattccaattccgacagtgattcagactcagacagcgactcagattcagatagcgattccgactcagacagtgactcggattcagatagcgattctgactcagatagtgactcagattcagatagcgattcagaatcagatagtgattccgattccgacagcgactctgactcagacagtgactcagattcagatagcgattcagactcagatagtgattccgattccgacagcgactcagattcagcgagtgattccgactcaggtagtgactcagattcagcgagtgattccgactcaggtagtgactcagattcagcgagtgattccgactcaggtagtgactcagattcatcaagtgattcagactcagacagtgcctctgattcaacgagtgacacagaatcagacaacgactctgactcagaaagtgattcaaatagcgattccgactcaggttctaacaataatgtagttccgcctaattcacctaaaaatggtactaatgcttctaataaaaatgaggctaaagatagtaaagagccattaccagatacaggttctgaaggtgaagcgaatacgtcactaatttggggattattagcatcattaggttcattactacttttcagaagaaaaaaagaaaataaagataagaaataa

SEQ ID NO: 8447 - DNA, 591 bp, Staphylococcus aureus
  CDS (1)...(591)
gtgttattgttggctaaaacgttatatttaatgcgccacggacaaactttgtttaattttaagggactaattcagggatttggagattcgccgctaacagaacttggaattgctcaagctcaaaaggcacgtagttattatgaaactaaggggataaacttcgatttatatgcatcatcaacgcaagaacgcgcaagtgacacacttgaaaatgttgcacctaaccattcgtatcaacgttttaagggactgaaggaatggcattttggattatttgaaggtgagtcagtctatctatttgataatctatacaagcctgaggacttattcggagatcgaattgttcctttcaaaggagaggcaaggcaacaagttgaagatcgcgttgtgaaaactttacatgacattatgtctcaaacaaagaataatgcattagtcgtgagtcatggaacaataatgggagtatttttaagatattgccttaaactagatgaagcattaaagcataatattggtaattgtaatatcctgaaatttgaatatgacaatggaacatttaaatttgttgagttaattgatccaaatttataa

SEQ ID NO: 8448 - DNA, 540 bp, Staphylococcus aureus
  CDS (1)...(540)
atggaattacaacaagcaatagctaatagaagaagtgtgaaaaaatttaaaagagatatgcacatagatgacgcattgctatatcaagcaattgagaaagctgctgatgctccaaatcacggaatgagggaaccatggagagttgtgcatgttccgaaagacagattaggagatatgagtaaggatatttctaaatttgcatttcctaatgaattagataagcaacaatgtcattatgatgcagtaacgaaactaggtggcatgttattgcttattttaaaaacagatccaagacaacgtcaaaatgatgaaaactactttgcatttggtgcatatgcacaaaatcttatgttgttactttatgaagcgggaataggtacatgttggaaatcgccattatatatctatgatcctaaagtaagaaaaacacttggtataaagaaagatgaagttcttgctggattcttatatttaacggatttagaagaagatatgcctaaagcaccacgtaaaaatagaaacttaattacattatattaa

SEQ ID NO: 8449 - DNA, 696 bp, Staphylococcus aureus
  CDS (1)...(696)
atgggtaaatcatttagtgaaattataaatgaaatgattacaatgcctaatattcagtggccagaagtttggacagcaatagtcgaaacactatacatgacagtcgtctcaactatatttgcatttatactcggtcttattttaggtgtgttattattcttgtctgctaaaggtaagtctattggtgcgaggttattttattctatcgtttctttcattgttaacttatttagagcgataccatttattattttaattttattattaattccatttacaagtttgatacttggaacgataagtggtccgacaggtgcattaccagccttgatcattggcgcagcgccgttttatgcaaggctcgtagaaattgcttttaaagaaattgataaaggtgtcatcgaagcggcctggtcaatgggtgctaatacttggacagtaattcgtaaagtcctcttacctgaagccatgccagcactagtgtctggcattacagttacagcaatcgctttagttggttcaacggcagttgcaggtgtaattggtgccggtggtttaggaaatttagcatacttaacaggtttcactcgaaatcaaaatgatgtcattttagtatcaacagtttttattctaattattgtatttataatccaattcattggggattggcttacaaataaacttgataaacgataa

SEQ ID NO: 8450 - DNA, 822 bp, Staphylococcus aureus
  CDS (1)...(822)
atgaaaaaattatttggtcttattttagtattaacatttgcagttgtattagcagcttgcggtaatggaagcaaaagtggcagtgacgacaagaaaataacagtaggtgcttcaccagcaccacatgctgaaattttagaaaaagcaaaaccattattagagaaaaaaggttatgaactagatattaaaacaattaacgattacactacgcctaataaattactagacaaaggtgaaattgacgctaactatttccaacatacaccatatttaaacacagagaaaaaggataaaggttacaaaattgtaagtgccggtgatgttcacttagaacctatggctgtatactctaaaaagtataaaagtttaaaagaattaccaaaaggtgcaacagtctatgtgtctaataatccagctgaacaaggacgtttcttaaaattcttcgttgatgcaggtttgattaaaatcaaaaaaggcgtaaaaattgaagatgctaagtttagtgatattacagagaataaaaaagatattaagtttaataataaacaatcagcagaattcttacctaaaatttatcaaaatgaagacgcggatgctgttatcattaattcaaactttgcaatcgaacaaaaactaaatcctaaaaaagattctattgctgtagaaagtgcgaaagataatccttatgcaaacttaattgctgttaaagaaggacatcaagatgataagaaaatcaaagcattaattgaagtattacaatctaaagatattcaagacttcattaatgaaaaatacaacggtgcagttattcctgctaaataa

SEQ ID NO: 8451 - DNA, 195 bp, Staphylococcus aureus; identical to SEQ ID NO: 4421
  CDS (1)...(195)

SEQ ID NO: 8452 - DNA, 762 bp, Staphylococcus aureus
  CDS (1)...(762)
atggcatcaacattagaaatcaaagacctacatgtgtctattgaggataaagaaatcttaaaaggtgttaacttgacaattaacactgatgaaatacatgcgattatgggaccaaacgggacaggtaaatcaactttatcatctgcaattatgggacacccaagctatgaagtaactaaaggagaagtacttttagacggtgtaaatattttagaattagaagttgatgaaagagcaaaagcaggattattcttggcaatgcaatatccatcagaaattacaggtgttacaaatgctgatttcatgcgttcagctatcaatgcgaaacgtgaagaaggacaagaaatcaacttaatgcaatttattaagaaattagataaaaatatggattttctagacatagataaagacatggcacaacgttatttaaatgaaggtttctcaggtggagagaagaaacgtaacgaaatcttacaattaatgatgttagaacctaagtttgcaatcttagatgaaatcgattcagggttagacatcgatgcattaaaagttgtatctaaaggtattaaccaaatgcgtggggaaaactttggtgcattaatgatcacacactaccaacgattattaaattacattactcctgataaagtacatgtaatgtatgctggtaaagtcgttaaatctggtggtccagaattagcaaaacgtcttgaagaagaaggatatgaatgggttaaagaagagttcggttcagctgaataa

SEQ ID NO: 8453 - DNA, 465 bp, Staphylococcus aureus
  CDS (1)...(465)
atgaattttaataatctagatcaattatatagatctgtcattatggatcattataaaaatcctagaaataaaggtgtattagataacgggtctatgacagtagatatgaataacccgacatgcggtgaccgtatacgactaacatttgatatagaagacggcattataaaagatgctaagtttgaaggtgaaggttgttcgatttcaatggcaagtgcatcgatgatgacacaagctgttaaaggtcattcacttggagaagcaatgcaaatgagccaagaatttacgaaaatgatgcttggtgaagactatgtgattacagaagaaatgggagatattgaagcattgcaaggtgtatctcaattcccagctcgtattaaatgtgccacattagcttggaaagcattggaaaaaggtactgttgctaaagaaggtaaagcagaaggtacgactgaagaagaatag

SEQ ID NO: 8454 - DNA, 2532 bp, Staphylococcus aureus
  CDS (1)...(2532)
atgggatttttatcaaaaattcttgatggcaataataaagaaattaaacagttaggtaaacttgctgataaagtaatcgctttagaagaaaaaacggcaattttaactgatgaagaaattcgtaataaaacgaaacaattccaaacagaattagctgacattgataatgtcaaaaagcaaaatgattatttagataaaattttaccagaagcatatgcacttgttagagaaggctctaaacgtgtattcaatatgacaccatataaagttcaaattatgggtggtattgcaattcataaaggtgatatcgctgagatgagaacaggtgaaggtaaaacattaacagcgacaatgccaacatacttaaatgcattagctggtagaggtgttcacgttattacagtcaatgaatacttatcaagtgttcaaagtgaagaaatggctgagttatataacttcttaggtttgactgtcggattaaacttaaacagtaagacgacagaagaaaaacgtgaagcatacgcacaagacattacttacagtactaataatgagctaggttttgattacttacgtgataacatggtgaattattctgaagatagagtaatgcgtccattacattttgcaatcattgatgaggttgactcaattttaattgacgaggcacgtacgccattaattatttctggtgaagctgaaaagtcaacgtcactttatacacaagcaaatgtttttgcgaaaatgttaaaacaggacgaagattataaatacgatgaaaaaacgaaagccgtacatttaacagaacaaggtgcggataaagcagaacgtatgttcaaagttgaaaacttatatgatgtacaaaatgttgatgttattagtcatatcaacacagctttacgtgcgcacgttacattacaacgtgacgtagactatatggttgttgatggcgaagtattaattgtcgatcaatttacaggacgtacaatgccaggccgtcgtttctcggaaggtttacaccaagctattgaagcgaaagaaggcgttcaaattcaaaatgaatctaaaactatggcgtctattacattccaaaactatttcagaatgtacaataaacttgcgggtatgacaggtacagctaaaactgaagaagaagaatttagaaatatttataacatgacagtaactcaaattccgacaaataaacctgtgcaacgtaacgataagtctgatttaatttacattagccaaaaaggtaaatttgatgcagtagtagaagatgttgttgaaaaacacaaggcagggcaaccagtgctattaggtactgttgcagttgagacttctgaatatatttcaaatttacttaaaaaacgtggtatccgtcatgatgtgttaaatgcgaaaaatcatgaacgtgaagctgaaattgttgcaggcgctggacaaaaaggtgccgttactattgccactaacatggctggtcgtggtacagatatcaaattaggtgagggcgtagaggaattaggcggtttagcagtaataggtacagaacgacatgaatctcgtcgtattgatgaccagttacgtggtcgttctggacgtcaaggtgataaaggggatagtcgcttctatttatcattacaagatgaattaatgattcgttttggttctgaacgtttacagaaaatgatgagccgactaggtttagatgactctacaccaattgaatctaaaatggtatcaagagctgtagaatcagcacaaaaacgtgtagaaggtaataacttcgacgcgcgtaaacgtatcttagaatacgatgaagtattacgtaaacaacgtgaaattatctataatgaaagaaatagtattattgatgaagaagatagctctcaagttgtagatgcaatgctacgttcaacgttacaacgtagtatcaattactatattaatacagcagatgacgagcctgaatatcaaccattcatcgactacattaatgacattttcttacaagaaggtgacattacagaggatgatatcaaaggtaaagatgctgaagatattttcgaagtcgtttgggctaagattgaagcagcatatcaaagtcaaaaagatatcttagaagaacaaatgaatgagtttgagcgtatgattttacttcgttctattgatagccattggactgatcatatcgacacaatggatcaattacgtcaaggtattcacttacgttcttatgcacaacaaaatccattacgtgactatcaaaatgaaggtcatgaattatttgatatcatgatgcaaaatatcgaagaagatacttgtaaattcattttaaaatctgtagtacaagttgaagataatattgaacgtgaaaaaacaacagagtttggtgaagcgaagcacgtttcagctgaagatggtaaagaaaaagtgaaaccgaaaccaatcgttaaaggcgatcaagttggtcgtaacgatgattgtccatgtggtagtggtaaaaaattcaaaaattgccatggaaaataa

SEQ ID NO: 8455 - DNA, 1767 bp, Staphylococcus aureus
  CDS (1)...(1767)
atgagtaagagaacaacttattgtggattagttactgaagcatttttaggacaagaaattacattaaaaggatgggttaacaatcgtcgtgacctaggtggattgattttcgttgatttaagagatagagaaggaattgtacaagtcgtgtttaatcctgcattttcagaagaggcattgaaaattgctgaaacagtacgttctgaatatgttgtagaagttcaaggtacagttacgaagcgtgaccctgaaacagttaatcctaaaattaaaactggccaagttgaagtacaagttacaaatattaaagtaattaataaatctgagacaccaccattttctataaatgaagaaaatgttaacgttgatgaaaatattcgattaaaataccgttatttagatttacgtcgtcaagagttagcgcaaacatttaaaatgagacatcaaattacacgttctattcgtcaatatttggatgaggaagggttctttgacatcgaaacaccagtactaacgaagtcaacacctgagggtgcacgtgactatttagtaccatctcgtgttcatgatggtgaattttatgcattaccacaatcgccacaattatttaagcaattattgatgattagcggatttgacaaatactaccaaatcgtaaaatgcttccgtgacgaagatttacgtgcagatcgtcaacctgaattcacacaagtcgatattgaaatgagttttgtagatcaagaagatgtgatgcaaatgggtgaagaaatgcttaaaaaagttgttaaagaagttaaaggcgttgaaattaatggcgcgttcccacgcatgacatataaagaagcgatgcgtcgctatggttctgataaaccagatacgcgttttgaaatggaattaattgacgtttctcaattaggacgtgatatggactttaaagtatttaaagatactgttgaaaatgatggtgaaattaaagcaattgtcgctaaaggtgcagctgaacaatatacacgtaaagatatggatgctttaacagaatttgtaaacatctatggtgctaaaggattagcgtgggttaaagttgtggaagatggtttgacaggtccaattggacgtttctttaaaacagaaaatgttgaaacattacttacattaactggtgctgaagctggtgacttagtaatgtttgttgcagacaaaccaaatgtcgttgcacaaagtttaggtgcattacgtgtcaaattagctaaagaattaggtttaatcgatgaaacaaaattaaacttcttatgggtgacagattggccattattagaatatgatgaagatgcgaaacgttacgttgcagcacatcatccatttacatctccaaaagaagctgatattgctaagcttggcactgcgccagaagaagctgaggcaaatgcttatgacatagtattaaatggttatgaattaggtggcggttcaatcagaattcatgatggtgagttacaagaaaaaatgttcgaagttcttggatttactaaagaacaagcacaggaacaattcggcttcttactagatgcatttaaatatggtgcgccacctcatggcggtattgcattaggattagaccgattagtcatgttattgactaatagaacaaacttgagagatacaattgcattccctaaaacagcatctgctacatgtttattaacgaatgcgcctggtgaagtttctgataaacaattagaagaactttctttgcgaattcgtcactaa

SEQ ID NO: 8456 - DNA, 183 bp, Staphylococcus aureus; identical to SEQ ID NO: 4433
  CDS (1)...(183)

SEQ ID NO: 8457 - DNA, 1086 bp, Staphylococcus aureus
  CDS (1)...(1086)
atgtcaggcggtgtagatagttctgtaacagcccacgtcttaaaagaacaaggttatgatgtcattggcatatttatgaaaaactgggatgacactgacgaaaatggcgtatgtactgcaactgaagattacaacgatgttattgaagtgtgtaatcaaattggcattccatattacgctgttaattttgaaaaagaatattgggataaagtctttacgtatttcttagatgaatacaaaaaaggtcgtactccaaatccagacgttatgtgtaataaagaaattaagtttaaagcctttttagatcatgcgatgaatttaggtgcaaattatgtagcaacaggacattacgcacgcatacatcgtcatgaagatggtcatgttgaaatgttacgtggtgtagataataataaagatcaaacatacttcttgaatcaattatctcaacaacaactttcaaaagtgatgttcccaattggtgacatcgaaaagagtgaagtgcgtcgaattgctgaagaacaaggacttgttactgctaagaaaaaagattctacaggcatttgttttatcggcgaaaaaaactttaaaacatttttatcacaatatttacctgcacaaccgggtgatatgataacacttgatggtaagaaaatgggtaaacatagtggtttgatgtattacacaataggacaaagacatggtttaggtataggtggagatggcgatccttggtttgttgtcggtaaaaatctaaaagataatgttttatatgtagaacaaggattccatcacgatgcattatacagtgattacttaattgcttcagactattcatttgtaaatccagaagataatgacttagatcaaggttttgaatgtacagctaaatttagatatcgccaaaaagatacgaaagtttttgtgaaacgtgaaaacgaccatgcactacgtgttacttttgctgagccagtaagagcaatcacacctggacaagcagttgttttttatcaaggtgatgtgtgtcttggtggagcaacaattgacgatgtgttcaaaaatgaaggtcaattaaattatgttgtataa

SEQ ID NO: 8458 - DNA, 2634 bp, Staphylococcus aureus
  CDS (1)...(2634)
atgatgaaaaagttaaaagcgagtgaaattagacaaaaatatctagatttctttgttgaaaaaggacatatggttgaaccttctgcaccattagtgccaattgatgatgatacattattatggattaattcaggtgtagcaacattaaagaaatattttgatggacgtgaaacacctaaaaagccaagaattgtaaactctcaaaaagctattcgtacaaatgatattgaaaatgttggtttcacagcgcgtcaccatacattctttgaaatgttaggtaacttctcaattggtgattactttaaacaagaagcgattgaatttgcttgggaatttttaacgagtgataaatggatgggtatggagccagataaattgtacgttacgattcatccggaagatatggaagcatacaacatttggcataaagatattgggcttgaagaaagtcgtattattcgcattgaaggtaacttctgggatattggtgaagggccttcaggaccgaacactgagattttctatgatcgcggagaagcatatggacaagacgatccggcagaagaaatgtatccaggtggagaaaatgaacgctatcttgaagtatggaacttagtatttagtgaattcaatcataataaagatcatagttacacaccattacctaataaaaacattgataccggcatggggcttgagcgtatggcctcagtttctcaaaatgtacgtactaactatgaaacagatttatttatgcctataatgaatgaaatcgaaaaagtatcaggtaaacaatatttagtaaacaacgaacaagatgtggcatttaaagtaattgctgaccacattcgtacgattgcatttgcaatttctgatggtgcattacctgccaatgaaggtagaggatatgtattacgtcgattgttacgtcgtgccgttcgttttagtcaaacgttaggaatcaatgagccatttatgtacaaacttgttgatattgttgcagacattatggaaccatattatccaaatgttaaggaaaaagcagatttcattaagcgtgttataaagtctgaagaagaacgattccatgaaacattagaagatggtttagcgattttaaatgaattaattaaaaaagctaaagaaacaacaaatgaaattaatgggaaagatgcatttaaattgtatgatacgtacgggttcccaattgaattaactgaagaaatagcagtgcaagcaggattgaaagttgatatgacaacattcgagtcagaaatgcaacaacaacgtgatcgtgcacgtcaagcacgtcaaaattctcaatcaatgcaagttcaaagtgaagtattgaaaaatattacatctgcaagtacttttgttggttatgatactgcgacagctcaaacaacactaacacacttgatatataatggtgaagaagtttcacaagttgaagcgggtgaaacagtatacttcatgttaacggaaacaccattttatgcagtcagtggtggacaagttgcggatacaggtattgtttataatgacaattttgaaattgctgttagtgaagtaaccaaagcaccaaatggtcaaaacttgcataaaggagtagtacaatttggccaagtaaatgttggcgctacagtgtctgctgaagtgaaccaaaatgatcgacgtgacattcaaaagaaccatagtgcaacacatttattacatgcagcgttgaaatcagtactgggtgatcatgttaaccaagctggttcactagtagaagcagatcgtttacgttttgatttctctcattttggtccaatgactaatgatgaaattgatcaagttgaacgcttagtaaatgaagaaatttggaaaggtattgacgttaacattcaagaaatggatattgcttcagctaaagaaatgggcgcaatggcattattcggtgaaaaatatggtgatgttgtgcgtgtagtaaatatggcaccattttcaattgaattatgtggtggtattcatgtccgcaatacttctgaaattggtttattcaaaatagtaagtgagtcaggtacaggagctggtgtgcgtcgtattgaagcattaacaggtaaagcagctttcttatatttagaagatattcaagagaaatttaatacgatgaaatcacagctgaaagtgaaatctgatgatcaagtagtcgataagttaacacaattgcaagatgaagaaaaagcattattaaaacaattagagcaacgtgacaaagaaatcacatcacttaaaatgggtaatattgaagatcaagttgaagaaatcaatggctataaagtattggttactgaagtggatgtaccaaatgcgaaagcaattcgctcgacaatggacgattttaaatctaaactacaagatacaattatcattcttgcaagtaatgttgatgataaagtatcgatggttgcaactgtccctaaatctttaacaaataatgttaaagccggtgatcttatcaaacaaatggcaccaatcgttggtggtaaaggtggcggtcgtccagatatggctcaaggtggcggtacacaacctgaaaatatctcaaaatcattaagctttattaaagattacattaaaaatctataa

SEQ ID NO: 8459 - DNA, 270 bp, Staphylococcus aureus
  CDS (1)...(270)
gtgtcgcaaatggaaaactttgataaaacaatgaaattcgactatgaagaacttccaacacaagatgtaagagatgttttaaataatgtttatcgaacattagatgaacgaggatataatgccgtaaaccaaattgtaggttatttattatcaggtgaccctgcgtatattccacgccaaaatgaagcaagaaatcaaattcgtcatattgatagagatgttattatggaagagcttgtttcttactatttaaaagagcaaaataaataa

SEQ ID NO: 8460 - DNA, 429 bp, Staphylococcus aureus
  CDS (1)...(429)
atgttacaacataaaattttaggactcgatgtcggtagtagaacggtaggaattgcaattagtgatataatgggttggacggcacaaggattagacacactccgaatcaatgaagaaaataatgaattaggtattgaccaattagtagacattattaaaaaacataatgtgggtacagtcgtaataggactacctaaaaacatgaataattcaataggatttcgaggcgaagcttcgttaacatataaagaaaaattattagaagcttatccttctattgagattgtgatgtgggatgaaagattaagcacaatggctgctgaacgatcattattagaagcagatgtttcaagacaaaaaagaaaacaagtgattgataaaatggcagcggtatttattttacaaggctatttagattcactacattaa

SEQ ID NO: 8461 - DNA, 309 bp, Staphylococcus aureus; identical to SEQ ID NO: 4362
  CDS (1)...(309)

SEQ ID NO: 8462 - DNA, 1269 bp, Staphylococcus aureus
  CDS (1)...(1269)
atgaagacaatagaagagattaaatcaactcctaaaacagttatgaagaaaccagaattattagcacctgctggaaacttagaaaagttaaaaatagcagtacattatggcgctgatgccgtatttttaggtggtcaagaatatggattacgttcaaatgctgataatttcacgatggaagaaatagctgaaggtgttgaatttgcgaaccgttacggtgccaaaatttatgttacgacaaatattattgcacatgatgagaatattgaaggtctagaatcatatttgcgtaatttggaaaagacaggtgcgacaggtatcattgttgcagatcctttaattatcgaaacatgtaaagaagttgcgccaaaacttgaaattcatttatcaactcaacaatcactttctaattacaaagctgtagaatattggaaagaagaaggattggatcgtgttgtattagcacgtgagaccggcgcgatggaaatgcgtgaaatgaaggaaaaagtagatattgaaatcgaagcatttattcatggtgctatgtgtatcgcctattcaggtagatgtacattaagtaatcatatgactgcaagggattccaacagaggcggttgctgtcaaagttgtcgttgggattatgaattattagaagttgatgataatggtgaacttgatgtattttataatcaaggtgaagttacaccgtttgcgatgagtcctaaagatttaaaattaatcgaatctattcctcaaatgatggatattggtgtggactcattaaaaattgaaggacgtatgaagtcaattcattatattgcaacagttgtctcagtatatcgtaaagtcattgatgcgtatgcggcagatcctgacaactttaagattaatccggaatggttaattgagttagataaatgtgcaaatagagacactgcaccagcattctttgagggtacacctggttatgaagaacagatgtttggtcaacaacaatctaaaaaatcaccatttgatttttgcggtttggtattagattataatgaagatacaaaaattgcgactattcaacaacgaaataactttaaaccaggtcaagaaatagaattctttggtccagaaattgaaacatttacacaagtagtagaagcaatttatgatgaagaaggtaacagcttagacgcggcgcgccatccattacaaatcgttcaaattaaagtggatcgcccgatatatccaaacaacatgatgagaaaggaaattggctaa

SEQ ID NO: 8463 - DNA, 618 bp, Staphylococcus aureus
  CDS (1)...(618)
atgtattcagtgattagtaagattttgaatttcattttagttaaaatgtcaaaatcattatacgtaatcggtaaagataatattcctaaggatagtaaatatgtcgtaacttgtacgcatgaaagttataacgaagtcattatgctaggtatggcattatatcctaatcaaattcattatatggctaaaaaagaattattcaaaaataaatggattggtaaatttttaacgtctttaaatgcatttcctgtagatcgtgaaaatccaggacctagtactttaaaacgcccaatcaatttgttgaaagataataagacagttggtatcttcccaacaggttctcgcacatcgcaagaaggtgcacctttgaaacgtggtgcttcaacaattgcaatgttaagtaagtcaccaatattacctgttgcttatgttggtcctactaagattcatggtcttttaacaggacaagcatacataaatattggtaaaccaatcgatattaacgatttacctaaagatttaaaacgaaacgagcgtatcgattacattacaaaagagattgaaacacgaacagcaaagttacaacaagaattgcatgaaattgtaaaaagtttataa

SEQ ID NO: 8464 - DNA, 1362 bp, Staphylococcus aureus
  CDS (1)...(1362)
atgcttcgttgtttaattgcgaacagaggtgaaattgctgtaaggattataagagcttgcagagaatatgggattgaaactgtagcagtttatgcaaaaggggacgagcaaagcttgcatgtacatttagcagatcaagctatatgtattggggaagctaatgctttagatagttatttaaatattgaccgcatcatatctgctgcacaaatcactggtgctaatgcaattcacccaggttatggctttttatcagaatcaacaaaatttgctcaaaccgttgaggaacaaggcatagcgtttatagggcctactaaaaatacgatggaaatgatgggggataaaataacagcaagacaaacagttcatcatgcaggtgttcctgtgattccaggatcaaatggtgctgtgaatcatgtgtctgaaattgagaagcttgccaaagacatcggttatccagttgttatcaaagctgccagtggcggtggtggtaaaggtatacgtattgtaaagaaagctgaagatttagaaaaggcatttaaagaagctaaaagtgaaggaaaaaaatactttgatgatgatcgtgtttatgttgaggcttttatacctgttgcaaaacatgttgaagttcaagttatgggggatgggcaggataattatgtacatttaggggaacgtgattgttctgtacaacgtaaaaatcaaaaattaatcgaagaatctccttgtgcagcattaactgaagaaagacgacaacaaatatgtaacgatgctgttaaagttgcacgtgcagcaaattatagaagtgcaggtacgattgaatttttagtaactgataccgcacattactttattgaaatgaatgctcgaattcaagttgaacatactgttacagagatgcgagcagaacgtgatttggttgcagcacaattgtatttattggaacataatcatttacctttttcacaaagcgatattcaatttaatggtcatgtgatagaagcgagaataaatgccgaaaatcctgaaaagaaatttcaaccaacacctggtaaagtgacagcgttacatttaccacaaggctttaatgtgcgagtcgattctttactatatcacggttatcaagtttcaccatattatgattctttagtagctaaagtaattgtaaaatctcatgatagagcttcagcaattgataaattgaaagccaccttagatgaaatggtgatagatggattttctacaactgccgattttttatatgcagttttaaattatccactatatcgtgatggagatgcaaaagatgttgatattaaatttttagaaaaacatcaaattgttaaaggggtggaattataa

SEQ ID NO: 8465 - DNA, 753 bp, Staphylococcus aureus
  CDS (1)...(753)
atgcgagttgatttgaattgtgatttaggagaagcatttggaaattattcctttggtggtgatcatcaaattattccgttaattacaagtgcgaatgttgcttgtggttttcacgctggtgatgaaaatgtaatgaatgaaacggtaaaacttgccaaagcacataatgttgcagtaggtgcacatcctggttttcctgatttgaaaggctttggcaggcgaaatatagatatctcaaacgacgagatttataatttgatgatttatcaattaggtgcattacaagggttttgtcgcattcatcaagttaaaattaatcatgttaaaccgcatggtgcattgtatcagatgggtgcaaaagacagagaaatagcaagcgttatagcacaagctgtttatgactttgatccatcactagtgctagtaggattagcaaattcatatctaatttcagaagcaaagaatgtcggattgattacagcttctgaagtgtttgctgatagacgatacgaagatgatgggcagctcgttagtagaaaagaaagtgatgctgtgattactgatactgacgaagcacttaagcaggttttgaagatggtgaaggaaaataaagttatttcaaaaaacaataaggaagtaacgttacaagcagatacaatttgtgtgcatggtgatggagaacatgcattattatttgtttcgaaaattagagaaattttaatgaaagaaggcattgatattcaatccttatag

SEQ ID NO: 8466 - DNA, 1467 bp, Staphylococcus aureus
  CDS (1)...(1467)
atgtataaatttttccaaaatttagggcgttcgttaatgttaccagttgccattttaccggctgcagcaattattgccggaattggtaatacgttaaatgcacttcatgcggcgccgaaaatcgcaatgttctttactacggtaggtactacgattttagagcaattaggtattttatttgcaattggtgtagctataggaatggcaaagaaaaatgatggtgcagtcgcgcttgcagctgcgttaggatattttttagttacagttgtattatcaccaatgaaattagcgcctttattaggaatgaaagcttctgaaataaattcagcttttgaaaaaatgaataatggtaatgtctttgttggtattgtaataggtttaatagcagcctatgcatacaataagtttagtgaaacagaattaccattagcattatcattttttagtggtaaacgtctagttccaattatgactgcattttactgtacatttttagttgtcatattgttattcttatggccactactttattcatggattgtaaaatttggtgaatctatagttggtttaggatcatttggtgctttcgtatatggtgttgccaacagattattaattcctacaggattacatcatgcactgaatagtgtgttctggtttgatacgattggtattaatgatattggtaaattccaaagtggcaaagatgctataaaaggtattacaggacgctatcaagcgggattcttcccaatcatgatgttcggtattccagcggctgcgttagcaatgtatcatacagctaaaactactcagaaaaaacaagtttacggttggttcctagcgagttcagttgcagcatttttcgttggtgttacagagccgattgagtttgcatttatgtttgttgcgccaatcttatatgttgttcatgcgttattaacaggattatctttatttatcgcagctacattccattggacagctggattttcatttagtgcaggtttgatagattatgtgttatcactaattaatccagtatcaaatcatccattgatgttgcttgttcaaggtgttgtattcttcatcttatactatgtgattttccgtgtagtaatccaagtatttaacttaaatacgattggtagaggtgaaaatgaattagttgatccaacagttgtaaaagataatattgctcctggtgaaaatgatattaaacaaagtaaatatcataatcatgctatacaaatattagaaggtttaggtggtcaagagaatattgttaatttaaccaattgtgcaacaaggttgcgtctagagttaaaagacacatctattattgatcaacagaagattaaaaacgccggtgcagttggtgttactgttaatggcaaacattcaactcaagttattgtcggtacacacgtacagcaggttgctgatgaaattgaaaaacatttataa

SEQ ID NO: 8467 - DNA, 1014 bp, Staphylococcus aureus
  CDS (1)...(1014)
atgtttcgtgatgacgtgatttgcagacgttgtttccgcttgaaaaattataacgaagttcaagatgtaggattagaaagtgaagactttttaaaattattatcaggacttgcggataaaaagggtattgtcgtcaatgttgtggatgtatttgactttgaaggatcatttattaatgcagttaaacgtattgtcggaaacaaaaaaatcattttagcagcaaataaattggatttattgccgaagcaaattaataaacgtcgagttaaagaatggttaaaacgaacagcaagaaaatatggtttggaagctgacgatgtcgtattaatttcagctgaaaaaggctggggcatagacgacttattatcatcaattgcgaatattcgagaaaatgaagatgtgtatattgtagggacaacgaatgttgggaaatctacattgattaataaactgattgaagctagtgttggtgaaaaggatgtagtaacaacttcaagattccctggaacaactttagatatgatagatattcctttagatgaaacatcatttatgtatgatacaccaggtattattcaagatcatcaaatgacgcatttagttagtgaaaaagaattgaaaattattatgcctaagaaagaaataaaacaacgcgtatatcaattaaacgaggcgcaaacattattcttcggcggtctagcgcgcatagattatgtatcaggtggtaaacgtccgttagtttgtttcttttctaatgacttgaatatacatcgtactaaaacggagaaggccaatgatttatggcgtaatcaacttggcgatttattaacgccacctggaaatccacaaaattttgatcttagtgaggtaaaggctgttagacttgaaacaggcaaagagaaacgtgatgttatgatctctggtctaggctttataactataggaccaggagctaaagtaatcgttcgtgttcctaaaaatgttgatgttgtattaagaaattctattttataa

SEQ ID NO: 8468 - DNA, 807 bp, Staphylococcus aureus
  CDS (1)...(807)
atgaaatttgcagttatcggaaatcctatttcacattccttgtcgcccgttatgcatagagcaaattttaattctttaggattagatgatacttatgaagctttaaatattccaattgaagattttcatttaattaaagaaattatttcgaaaaaagaattagacggttttaatatcacaattcctcataaagaacgtatcataccgtatttagatcatattgatgaacaagcgattaatgcaggtgcagttaacactgttttgataaaagatggcaagtggatagggtataatacagatggtgttggttatgttaaaggattgcacagcgtttatccagatttagaaaatgcatatattttaattttgggcgcaggtggtgcaagtaaaggtattgcttatgaattagcaaaatttgtaaagcccaaattaactgttgcgaatagaacgatggctcgttttgaatcttggaatttaaatataaaccaaatttcattggcagatgctgaaaagtatttagctgaattcgatatcgttattaatacaacaccagcgggtatggctggaaataacgaaagtattattaatttaaagcatctttctcccaatactttaatgagtgacattatttatataccgtataaaacacctattttagaggaagcagagcgcaagggaaaccatatttataatggcttagatatgtttgtttaccaaggtgcggaaagctttaaaatttggactaataaagatgctgatattaattctatgaaaacagcagttttacaacaattaaaaggagaataa

SEQ ID NO: 8469 - DNA, 1857 bp, Staphylococcus aureus
  CDS (1)...(1857)
atgattaaatggaggaattttattatgagtaaaattattggtatagacttaggtacaacaaattcatgtgtaacagtattagaaggcgatgagccaaaagtaattcaaaatcctgaaggttcacgtacaacaccatctgttgtagctttcaaaaatggagaaactcaagttggtgaagtagctaaacgtcaagctattacaaacccaaatactgttcaatctattaaacgtcatatgggtactgattataaagtagatattgaaggtaaatcatacacaccacaagaaatctcagctatgattttacaaaacttaaaaaatacagctgaaagctatttaggtgagaaagttgacaaagctgtaattacagtacctgcatactttaacgacgctgaacgtcaagcaactaaagatgctggtaaaattgctggtttagaagttgagcgtatcattaatgaaccaacagctgcagcattagcatatggtttagacaaaactgataaagatgaaaaagttcttgtttttgacttaggtggcggtacatttgatgtatctatcctagaattaggtgacggtgtattcgaagtactatcaacagccggtgacaacaaacttggcggcgatgattttgaccaagtaattattgactacctagttgcagaattcaaaaaagaaaatggcgtagacttatctcaagataaaatggcattacaacgtttgaaagatgctgctgaaaaagctaaaaaagacttatcaggtgtatcacaaactcaaatctcattaccatttatctcagctggtgaaaacggtccgttacacttagaagtaaacttaactcgttctaaatttgaggaattatcagattcattaattagaagaacaatggaacctacacgccaagcaatgaaagacgctggcttaacaaactcagatatcgatgaagttatcttagttggtggatcaactcgtattccagcggtacaagaagctgtcaaaaaagaaatcggtaaagaacctaacaaaggtgtaaacccggacgaagtagtggcaatgggagctgcaatccaaggtggcgttatcacaggtgacgttaaagacgtagtattattagacgtaacaccactatctttaggtattgaaattttaggtggacgtatgaatacgttaattgaacgtaacactacgattcctacatctaaatctcaaatctattcaactgcagttgataatcaaccatcagtagatgtacacgtattacaaggtgaacgtccaatggctgcggataataaaacacttggtagattccaattgactgatattccaccagctgaacgtggtaaacctcaaattgaagtaacgtttgatatcgataaaaacggtattgtaaatgtaactgcaaaagacttaggtacaaataaagaacaaagaattacaattcaatcaagttcttcattatcagacgaagaaatcgaccgtatggtaaaagatgctgaagttaacgctgaagcagataaaaaacgtcgtgaagaagtagacttaagaaacgaagctgacagcctagtattccaagttgaaaaaactttaactgatttaggcgaaaatatcggtgaagaagataaaaaatctgctgaagagaaaaaagacgctcttaaaactgctttagaaggtcaagatatagaagatattaaatctaaaaaagaagaacttgaaaaagtgattcaagaattatcagcaaaagtatatgagcaagcggctcaacagcaacaacaagcacaaggtgctaatgctggtcaaaacaacgatagtactgtagaagatgctgaatttaaagaagtaaaagacgacgacaaaaaataa

SEQ ID NO: 8470 - DNA, 177 bp, Staphylococcus aureus
  CDS (1)...(177)
atgtctaaaacagtagtacgtaaaaatgaatcacttgaagatgcgttacgtagatttaaacgttcagtttctaaaagtggaacaatccaagaagtacgtaaacgtgaattttacgaaaaaccaagcgtaaaacgtaaaaagaaatcagaagctgcacgtaaacgtaaattcaaataa

SEQ ID NO: 8471 - DNA, 699 bp, Staphylococcus aureus; identical to SEQ ID NO: 4505
  CDS (1)...(699)

SEQ ID NO: 8472 - DNA, 1161 bp, Staphylococcus aureus
  CDS (1)...(1161)
atgtattatcatcaaccgttgttattaacacctggcccaacccctgtacctgatgccattatgagagaaattcaagcacctatggttggtcatcgttctaaagattttgaagacatcgcacaacaagcatttcaaggtctgaagccaatatttgggagtcaaaatgatgtacttattttaacatctagcggtacaagcgtcttagaagctagtatgttgaacattgtaaaccctgaagatcacttcgttgtcattgtttcaggtgcctttggtaaccgatttaaacaaattgcacaaacttattacaaaaatgtgcatatttatgacgtaacatggggagaagctgtagatgtcaaagatttcatcaattacctttcaactttaaatgttgaagttaaagcagtatttagtcaatattgcgaaacatctacgacagtgctacaccctattcacgagttaggaaatgccatcaatcaatttaatagtaatatttattttgtagttgacggcgtaagttgcattggtgctgttgatgttgacattaacaaagataaaattgatgtacttgtttctggtagtcaaaaagcaattatgttacctccaggattagcttttgtagcttatagccaccgtgcaaaagaacgtttcaaagaagtaactacaccaaaattttatctagacttaaataaatacatttcgtcacaagctgacaattctacaccgttcacaccaaatgtgtctttatttagaggtgtaaatgcatacgttgaaaccgtaaaagcagaaggtttcaatcacgtaatagcacgacactacgcaattagaaatgcattaagaagcgccttaaaagcattagatttaactttattagtcaatgataaagatgcatctccaacggttacggcattcaaacctaacacaaatgatgaagtgaaaataatcaaagatgaacttaaaaatcgctttaaaataacaattgctggtggtcaaggccatcttaaaggtcaaattttaagaattggtcatatggggaaaattagtcctttcgatattttatcggtggtatctgctttagaaattattttaactgaacaccgtaaagttaactatatcggtaaaggtatatcaaaatatatggaggttattcatgaagcaatttaa

SEQ ID NO: 8473 - DNA, 900 bp, Staphylococcus aureus
  CDS (1)...(900)
atgacagaacataaatcaggatttgtttcaattataggtagaccaaatgtagggaagtcaacatttgttaatagagtgattggccataaaatagcaatcatgtccgataaagctcaaacaactagaaataaaattcaaggtgtaatgacaagagatgatgcacaaattatattcattgatacgccaggtattcataaacctaaacacaaattaggtgactatatgatgaaagtcgctaaaaatacattatctgagatagatgcaatcatgtttatggttaatgccaatgaggaaattggacgaggcgatgaatatattatagaaatgttgaaaaatgttaagacaccagtatttttagtattaaataaaatagatttagtgcatccagatgaattaatgccaaagattgaagaatatcaaagttatatggactttacagagattgtacctatttcagcattagaagggctaaatgtagatcattttattgatgtattaaagacgtatttacccgaaggacctaaatattatccagatgatcaaatttcagaccatcctgaacaatttgtagtgggtgaaatcattcgtgaaaaaatccttcatcttacaagtgaagaaatccctcatgcgattggtgttaatgtggaccgtatggttaaagaaagcgaagatcgtgttcatatcgaagcaactatatatgttgaaagagattcgcaaaaaggaattgtcattggaaaaggcggtaaaaagttaaaagaagtaggaaaacgtgcgagacgtgatatagaaatgcttctaggttctaaagtttacttagaattatgggtcaaagttcaaagagactggcgaaacaaagttaactttattcgccaaattggttatgttgaagaccaagattaa

SEQ ID NO: 8474 - DNA, 1392 bp, Staphylococcus aureus
  CDS (1)...(1392)
atggcaaaagatatggatacaattgtttcattagcaaaacacagaggttttgtgttccctggtagtgatatttacggtggtttatcaaacacatgggattatggtcctttaggtgttgaattaaagaataatgttaaaaaagcttggtggcaaaaattcattacacaatcaccgtttaacgttggtatcgatgctgcaatcttaatgaatccaaaagtatgggaagcttcaggacacttaaacaacttcaacgacccaatgattgataataaagatagtaaaattcgatatcgcgctgataaattaattgaagattatatgcaagatgttaaaggtgatgaaaacttcattgccgatggtttaagttttgaacaaatgaaaaaaattattgacgatgaaggtattgtttgtcctgtaagtaaaactgctaactggactgaaattcgccaattcaatttaatgtttaaaacattccaaggtgtaactgaagattctacaaatgaaattttcttacgtcctgaaacagcacaaggtatttttgtaaactataaaaacgtgcaacgttcaatgcgtaaaaaattaccatttggtatcggtcaaattggtaaatcattccgtaatgaaatcacaccaggtaacttcattttcagaacaagagaatttgaacaaatggaacttgaattcttctgtaaacctggtgaagaaatcgaatggcaaaattattggaaaacttttgcaagtgactggttaacaagcttaaatatgagcagtgaaaatatgcgtttacgtgatcatgatgaagatgaattatctcattactcaaatgcaacaactgatattgaatataaattcccatttggttggggtgagttatggggtatcgcaagtcgtacagacttcgacttacgtaaacatgctgaacactctggtgaagatttcagataccatgatccagaaacgaacgaaaaatatattccatattgtatcgagccatcacttggtgcagatcgtgtaacattagctttcttatgtgatgcatatgatgaagaaggcgttgaaggtagtaaagatgcacgtacagttttacacttccatcctgcattagcaccatataaagcagcgattttacctttaagtaagaaattatctggcgaagcgattaagatttttgagcaattaagttctaaattctcaatcgatttcgatgaatcacaatctatcggtaagagataccgtcgtcaagatgaaatcggtacaccttattgtgtaacattcgactttgattcattagaagataatcaagttacagtacgtgacagagattcaatggaacaagttcgtatgccaatctcagagttagaagctttcttaactgaaaaaacaaaattctaa

SEQ ID NO: 8475 - DNA, 303 bp, Staphylococcus aureus
  CDS (1)...(303)
atgttagtatcagccgcttcatcatgttatatcatctcattagcagctactcttgaacgtgcaaagttcacagatatttcaattgaacaacaatcgattggaacagcttgtttaaataatggaaaattcagtatgtcaaaaattgtgcaccatcctcacattgaaattccaagtgatcaaatagcacaattagaaaagcgattaccaaaattgataacaattgcagataataattgcatgatttcaaatgctgtaagaaataatgtggacataaaaatctatcccatcattcaggccaaataa

SEQ ID NO: 8476 - DNA, 1347 bp, Staphylococcus aureus
  CDS (1)...(1347)
atggcaaaacatccattcgaacaatttaatctagaatctagtttaattgacgctgtgaaagaccttaattttgaaaaaccaactgaaattcagaatcgaattattccaagaatactaaagagaacaaatttaattggtcaatctcaaacgggtacagggaaatctcatgcatttttattaccattaatgcagttaattgatagtgaaataaaagaaccacaagcaatcgtagttgcaccaacaagagaacttgcacaacaactatacgatgcagcgaaccatttaagccaatttaaagctggtgtttcagttaaagtttttattggtggtacagatatagagaaagatagacaacgttgtaatgcacaaccacaattgattataggtacccctactagaattaatgacttagctaaaacgggacatttacatgtgcacttagcatcatatttagttattgatgaagcggatcttatgattgacttaggattaattgaagatgtagattacattgctgcaagattggaagataatgcaaatattgcggtgtttagtgctacaattccacaacagttacaaccatttttaaataaatatttaagtcatccagaatatgtagctgtcgacagtaaaaaacaaaataaaaagaacatcgaattctttttaatacctactaaaggtgcagctaaagttgaaaagactttaaatttaattgatatactaaatccatacttatgtattattttctgtaatagtagagataatgcaaatgatttagcacgttcactaaatgaagctggcattaaagttggtatgattcatggtggtttaacgccacgtgaacgtaaacaacaaatgaaacgtatacgtaatttagaattccaatacgttattgccagcgatttagcatctcgtggtattgatattgaaggtgttagtcatgtcatcaattttgatgtgccaaatgatattgacttctttacacatagagtcggccgaactggccgtgggaattataaaggtgtagcaattacgctttatagtcctgatgaagaacacaatatttcattaatagaagatcgtggttttgttttcaatactgttgatattaaagatggtgagttaaaagaagttaaagcgcacaatcagcgtcaagcaagaatgcgcaaagatgaccatttaactaatcaagtgaagaacaaagttcgaagtaaaattaaaaacaaagttaaaccaggttataagaagaaatttaaacaagaagttgaaaaaatgaaacgtcaagagcgtaaacaatttagtaagcagcaaaatagacaaaaacgtaagcaaaacaaaaaaggttag

SEQ ID NO: 8477 - DNA, 900 bp, Staphylococcus aureus
  CDS (1)...(900)
gtgtgttttatgttattaggatcacatgtttcaatgagtggtaaaaagatgttagaaggttctgctatagaagcgcatgaatatggtgaaacaacatttatgatttatactggtgcacctcaaaacacgcgccgtaaaagtattgaagatttaaatataactaaaggtcatgaagtgatggaaaaatatggcttatctaatattgttgttcatgcaccatacatcattaatattgcaaatacaaccaaaccagaaacgtttaatcttggtgtagatttcttgcaacaagaaattgaaagaacgcaagctataggcgctaaagatattgtattacatccaggtgcgcatgttggagctggtgttgatgccggaattaataagattattgaaggattaaatgaagttttaacgaatgacaataatgttcgtattgcgcttgaaacgatggcaggtaaaggtacagagattggtcgctcgtttgaagagttagcacgtattattgatggagttcataataacgaacgtttatcagtatgttttgatacatgtcatacgcatgatgctggatataatgtgaaagaggactttgatggcgtattaaatgaatttgataaaatcattggagtcgacagaattaaagttgttcatgtcaatgattctaaaaatgaccgtggcgctcaaaaagaccgacatgaaaatattggcttcggttacattggttttgatgcattaaattacattgtgcatcataatagttttaaagatattccgaaaatcttagaaacaccttatgttggtgaagataagaaaaataaaaaaccgccatataaacttgaaattgaaatgttaaaacaacagcaatttgacccagaattaaaaaataaggttatgcaacaataa

SEQ ID NO: 8478 - DNA, 411 bp, Staphylococcus aureus
  CDS (1)...(411)
atgaatacaaatgatgctattaaaattttaaaagagaacggtttaaaatatacagataaacgtaaagatatgttagatatttttgtcgaagaagataagtatataaacgcaaagtatatacaacaagttatggatgaaaattatcctggaatttcattcgacacaatatatagaaatctgcacttatttaaagatttagggattattgaaaatacagaacttgatggtgaaatgaagtttagaatcgcttgtacaaaccatcatcatcatcattttatctgtgaaaagtgtggagatacaaaggtaatagattattgtccaatagatcagataaaattatcactacctggtgttaatattcacaaacacaaacttgaagtttatggtgtatgtgagtcttgccaagattaa

SEQ ID NO: 8479 - DNA, 1995 bp, Staphylococcus aureus
  CDS (1)...(1995)
gtgattgtatttatttttgcagtactagtactacgtttaggttatttacaaatcgcacaaggctcacattataaacaaattataaaaaatgatgaaaacattacagtgaatgagtctgtgccaagaggtcgtattttagacagaaatgggaaagttttagttgataatgcttctaaaatggctattacatatactaggggtcgaaaaacaacacaatcggaaatgttggatacggctgaaaagttatcgaagctaatcaagatggatactaagaagattacagaacgtgataagaaagatttctggattcagttgcatcctaaaaaagcaaaagcaatgatgacaaaagaacaagctatgttagcagatggaagtattaaacaagatcaatatgataaacaactgttatcgaaaatcggaaaatcacaattagatgaattgtcttctaaagatttacaagttttagccatttttcgagagatgaatgcaggaacagttttagatccacaaatgataaaaaatgaagatgtcagtgaaaaagagtatgcagcagtttctcagcaactttccaaattaccaggtgttaacacgtctatggattgggatagaaaatatccatatggcgacactttaagaggtatattcggagatgtatcgacacctgctgaaggtattccaaaagaattgacagaacattacttatccaaaggatattcacgcaatgatcgtgttggaaaatcttacctagaatatcaatatgaagatgtattgcgtggtaagaagaaagaaatgaaatacacaacggacaaatctggtaaagttacatcttcagaagtgttaaatcctggcgctcgcggtcaagatttgaaattaacgatcgatatagatcttcaaaaagaagtagaagcattattagataaacaaattaagaagcttcgcagccaaggtgcaaaagatatggataatgctatgatggttgtacaaaatcctaaaaatggagacattcttgcgcttgccggaaagcagattaataagagtggtaaaatgactgattatgacattggtacgtttacttctcaatttgcggttggatcttctgtaaaaggtggaacattattagctggttatcagaataaagctatcaaagttggagaaacaatggtcgatgaaccattacatttccaaggtggtttgacaaaacgatcatactttaataaaaacgggcatgtatctattaatgataagcaagctttgatgcattcatcaaacgtatatatgtttaaaacagcattaaaattagcgggagacccttattattctggcatggctttaccttcagacataagttcacctgcccaaaagctaagaagaggattaaatcaagtaggcttaggtgtgaaaacaggtatagatttaccaaatgaaacaagaggtcaaatcgaaccattaacaaataatccaggtaattatctagatttatcaattggtcaatatgatacctatacaccattacaattatcacaatatgtttcaactatagcgaatgatggttatagaatacagccacacattggattaacgattcatgaatcaactaataaagatgaggttggtccactcaagaagaaaattaatggcaccgtcttgaacaaggttaataatactgaaaaagaaatcaaacaaattcaagaaggattcaaaatggcatttaatgataaagatggtactggatatgttagttttaaagatacagtagtacctactgctggtaaaacgggtactgctgaagtgttccaaaacggagagccaagagttaactctacttatataggatacgcgccaattgatgatccaaaattagcgttttcaattgtatatacaaatcagcctgtaccaccaccatggttaacaggtggagacttaggtagagatgtaattaactactactttaagcagttaggtaaagatgataaaaataaagacaaagacaaataa

SEQ ID NO: 8480 - DNA, 603 bp, Staphylococcus aureus
  CDS (1)...(603)
atggctcgattcagaggttcaaactggaaaaaatctcgtcgtttaggtatctctttaagcggtactggtaaagaattagaaaaacgtccttatgcaccaggacaacatggtccaaaccaacgtaaaaaattatcagaatatggtttacaattacgtgaaaaacaaaaattacgttacttatatggaatgactgaaagacaattccgtaacacatttgacatcgctggtaaaaaattcggtgtacacggtgaaaacttcatgatcttattagcaagtcgtttagacgctgttgtttattcattaggtttagctcgtactcgtcgtcaagcacgtcaattagttaaccacggtcatatcttagtagatggtaaacgtgttgatattccatcttattctgttaaacctggtcaaacaatttcagttcgtgaaaaatctcaaaaattaaacatcatcgttgaatcagttgaaatcaacaatttcgtacctgagtacttaaactttgatgctgacagcttaactggtactttcgtacgtttaccagaacgtagcgaattacctgctgaaattaacgaacaattaatcgttgagtactactcaagataa

SEQ ID NO: 8481 - DNA, 1092 bp, Staphylococcus aureus
  CDS (1)...(1092)
atgtcaagtgatttaaaacaaacacctttatatcaaaattatgttgatagaggtgcaaaaattgtggaattcggaggatgggcgatgcctgttcaattttcaagtattaaagaggagcataatgctgttcgatacgaaattggcctgtttgatgttagtcatatgggtgaaattgaagtaacaggtaaagatgctagtcagtttgtgcaatatttattatcaaatgatactgataatttaactacttcaaaagcattatatactgctttatgtaatgaagaaggcggtattattgatgatttagtaatatataaattagctgacgacaattatttattagtcgtaaatgctgctaatactgaaaaagattttaattggattttaaaacacaaagagaaatatgatgttgaagtacaaaatgtatcaaaccaatatggtcaattagcaatacaaggaccaaaagctagagatttaattaatcaattagttgatgaagatgtaactgaaatgaaaatgtttgaatttaaacagggtgtcaaattatttggagcaaacgtcattttatctcaatcaggttacacaggtgaagatgggtttgaaatttattgtaatatcgatgatactgaaaaaatttgggatggtttattagagtataatgttatgccatgtgggttaggcgctcgtgatacattaagattagaggccggattgccattacatggacaagatttaactgaatcaattacaccatatgaaggtggtatcgcttttgcaagtaaaccattaattgatgctgattttattggtaaatctgtattaaaagatcaaaaagaaaatggtgcaccaagaagaacagtgggattagaattacttgaaaaaggaattgcaagaactggttatgaagttatggatttagatggaaatattattggagaagtaacttcaggaacacagtctccatcatcaggaaaatcaattgcacttgcaatgataaaaagagatgagtttgaaatgggtagagagttgcttgttcaagttcgtaagcgtcaattaaaagcgaaaattgttaagaaaaatcaaattgataaataa

SEQ ID NO: 8482 - DNA, 1062 bp, Staphylococcus aureus
  CDS (1)...(1062)
atgagcagaataacacaagtgcatcgtattttagaacaaaaacatttagatgcgattatcattctttcggattacaatagaagatatttatcaggttttactggtaccagtggagcacttatcatatctaaagataaacaatatttgataacagactttagatatattgatcaagcaactaagcaggcgccaaattatgaaattattaatcgtaaatctactattattggtgagattaaagaattactacaccaagagaattttgaaaatgtaggctttgaggggcaccatgtaagttatgatacataccttgaattaaataaaagtcgtatatcattaataagcatttctaatactgtagataaaattagagacgtcaaagatgctgacgaaattgctttaattcaaaaagcagctaatattgttgatgaaacatatgaatatattttaactgttgtaaaagcaggtatgactgaaaaagaattaaaggcaatattagaaagtaaaatgctagaattaggagcagatggaccatcattcgatacgattgtagcatctggtcatagaggtgcattaccacatggtgttgcaagtgacaaaattattgaaaaaggcgacatgattacattagattttggcgcatattataacggctattgttcagatattactagaacatttgctattggagaaccagatcctaaactgaaagaaatatatcaaatagtacttgaatctcaaatgaaagcaattaatgagattagacctggcatgactggtgcagaagctgatgctatttcaagaaactatttagagtcaaaagggtatggaaaagaatttggacattcactaggacatggtattggtttagaaatccatgaagggccaatgctggctcgtacgatacaagataaacttcaagttaacaactgtgttacagtagaacctggtgtttatatagaaggtttgggcggtataagaatagaagatgatattttaattacagaaaatggttgtcaagtctttactaaatgcacaaaagaccttatagttttaacataa

SEQ ID NO: 8483 - DNA, 465 bp, Staphylococcus aureus
  CDS (1)...(465)
atgaactttaaagaaatcaaagaattaattgaaattctggataaatcaactttaacggaaatcaatattgaagatacaaaaggcaaagtgacgcttaagaaggaaaaagaaactgagattatcacgccacaaatctcacaaatgccagttgaagctgcggcaatgcctatgcctcaagtacaatcaactgatagcaataaaactgaagctccaaagccaacttcagataatcacaaaacaattaatgcacctatggtaggtacattttacaaatcgccatctccagacgaagaagcgtatgtgcaagttggggacactgtttcaaatgaaacaacagtgtgtattttagaagcaatgaaactatttaatgaaattcaagcagaaatttcaggtgaaattgttgaaatcttagtagaagacggacaaatggtagagtatggccaaccgttatttaaggtgaaataa

SEQ ID NO: 8484 - DNA, 1338 bp, Staphylococcus aureus
  CDS (1)...(1338)
atgtcagattatttaagtgtttcagctttaacgaaatatattaaatataaatttgatcaagatccacatctccaatctgtattgattaaaggtgagctttcaaatttcaaaaagcattcaagtggtcatttatactttaatgtgaaagataaagaaagcgttataagtgccatgatgttcaaaggtagtgcttctaaattaaacttcgaacctaaagaaggagatgaagtcttattagaagcacgtgtttctgtttttgaacgtcgtggaaactatcaaatttatgtaaataaaatgcaattagatggtatagggaacttatatcaaaaattagaagcattaaagaaaaaattaactgaagaaggttgttttgataaagcgaataagaaatcaatacctaagtttcctaaaaaaattgcagttttaacagcgagtacaggtgccgcaattcgagatatccattcaacgataaatagtcgttttccattagctgaacaaatacaaattagtactttggttcaaggtgaaaaagcaaaagacgacattattgaaaaaattgaatatgcagatagtttaggtgtagataccattattgtaggtcgaggcggtggatccatagaagatttatggaatttcaacgaagaagctgtcgtccgtgcaatatataattgtaagacaccgattatatcagcagtaggtcatgaaacagactttacattaagtgattttgctgcagacatcagagctgcgactccaactcaagctgctgttattgcaacaccagaccaatatgaattgctgcaacaaatacagcaatatcagtttacattgactcgtttcatcaaaaaacatttagaacaacaacgtaaacatgttgaacatttgtcatcgtattacaagtttaaacaaccaactttattgtatgatcaacagatacaacgtcgagatgatttagaaaagagactgaaacaacaaattcaggtaacttttgaacaacagagacatcgattaatactgttgcaacaacgctataatttaaaagcgttactaagtagtgttaatcaagaacaacaaaataatcttcaattgacaaaccaacttgttaaattattgaattctaagatattaagttataaaaatgatttgaaaaataaagtagaaaacttaaacaatttaagtccaactaatacaatgttgcgtggatatgcaattgttaataaaaaagacgaagtcattacgagtactaaagatttaacagaaaatgatcaattgacgttaacaatgaaagatggcttagtagatgcaaaagttacgaaagtaaggtgtaataatgactaa

SEQ ID NO: 8485 - DNA, 882 bp, Staphylococcus aureus
  CDS (1)...(882)
atgacgaatctaccgatgaataaattaatagatgaagtcaataatgaattatcggttgcgataaataaatcagtaatggatactcagctagaagaaagtatgttgtattcattaaatgctggaggtaaacgcatccgaccagttctgttattactcactttagattcactaaataccgagtatgagttaggtatgaagagcgcaattgcactagaaatgattcatacatattcacttattcatgatgacctaccagcgatggataatgatgattatcgacgagggaaattaacaaatcataaagtatatggtgagtggactgcgatattagcaggtgatgctttattaactaaagcatttgaacttatttcaagtgatgatagattaactgatgaagtaaaaataaaagttctacaacggctgtcaatagcaagtggtcatgttggaatggtcggcggtcaaatgttagatatgcaaagcgaaggccaaccaattgatcttgaaactttggaaatgatacacaaaacaaaaacaggagcactattaacatttgcggttatgagtgcagcagatatcgctaatgtcgatgatgcaactaaagaacatttagaaagttatagttatcatttaggtatgatgtttcagattaaagatgatttattagactgctatggtgatgaagcgaagttaggtaaaaaagtgggcagcgatcttgaaaataataaaagtacatacgtgagtttattaggaaaagatggcgcagaagataaattgacttatcatagagacgcagcagtggatgaactaatgcaaattgatgaacaattcaatacaaaacacttattagaaatcgttgatttattttatagcagggatcactaa

SEQ ID NO: 8486 - DNA, 1422 bp, Staphylococcus aureus
  CDS (1)...(1422)
atgtcagagaaacaatatgatttagtcgttctcggtggaggtactgcaggatatgttgctgcgatacgtgcgtctcaattaggtaagaaagtggcaatagtagaacgacaactattaggaggtacttgtctccataaaggttgtattcctactaaatcgctgcttaaatctgctgaagtatttcaaacagtaaaacaggcagcaatgtttggcgttgatgtcaaagatgctaatgttaattttgaaaatatgttggcacgaaaagaagacattattaatcaaatgtatcaaggtgtaaagcatttaatgcaacacaatcacattgacatttataacggcacgggacgtattctaggtacatctatattttcacctcaaagtggcacaatttctgtcgaatatgaagatggtgaatcagacttattacccaaccaatttgtattaattgcaactggttcttcgcctgcagagttgccattcttatcatttgatcatgataaaattttatctagcgatgatatattatcattaaagacgttaccatcaagtgttggtattattggtggtggtgttatcggaatggaatttgcatcattgatgatagatttaggtgttgacgtaacagttatagaagctggtgaaagaattttaccaactgaaagtaaacaagcttcacaactattaaaaaaatcattgtcagcacgtggtgttaaattctatgagggaataaaactttctgaaaatgatataaatgttaacgaagatggtgttacatttgaaatttcctcagacataattaaagtagataaagtgttgctatcgattggtagaaaacctaacacatcagatattggtttaaacaacactaaaataaaactttcaacatcaggacatattttaacgaacgaatttcaacaaactgaagataaacatatttatgcagctggtgattgtattggaaaattacaattggcacatgttggatcaaaagaaggtgttgtggctgtcgatcatatgtttgaagggaacccaatcccagtaaactataacatgatgcctaagtgtatttattcacaacctgaaattgcttctatcggtttaaacattgagcaagcaaaggcagagggaatgaaagttaaaagttttaaagtaccatttaaagcaattggtaaagcagtgattgatagccatgacgcaaacgaagggtatagcgaaatggtgattgatcaatcaactgaagaaattgtgggtattaatatgattggtccacatgtaacagaattgattaatgaggcatcactgttacagttcatgaatggctcggcattagaattaggactaacaacacacgcacatccttccatctctgaagtgttgatggaattaggattgaaagcagaaagtagagctattcacgtataa

SEQ ID NO: 8487 - DNA, 993 bp, Staphylococcus aureus
  CDS (1)...(993)
atgattgattataaatcattaggccttagcgaagaagacctaaaagtaatatataaatggatggatttaggtagaaaaatagatgaaagactgtggttattgaaccgtgcaggtaaaattccatttgttgtaagtggtcaaggacaagaagcaactcagattgggatggcatacgcattagaagaaggtgatattactgcgccttattatagagatctagctttcgttacttatatgggtatctcagcgtatgatacgtttttatcagcgtttggaaagaaagacgatgttaactctggtggaaaacaaatgccatcacactttagtagtagagctaagaatattttgtcacaaagttcaccggtagcaactcaaataccccatgctgttggtgctgctttagctttaaaaatggatggtaagaagaaaattgcaacagcaactgttggtgaaggtagctcaaaccaaggtgacttccatgaaggtttaaacttcgcgggtgtacacaaacttccttttgtatgtgtcattataaataataaatatgcaatttcagtacctgattcattacaatacgcagctgaaaaattatcggatagagcacttggttacggtatacatggtgaacaagtagatggtaataatccattagcaatgtataaagcgatgaaagaagcaagagaacgagctatttctggtcaaggttcaactttgattgaagcagtaacttctcgtatgacagctcattcatcggatgacgacgaccaatatcgtacgaaagaagagcgtgaagcgcttaaaaaagcagactgcaacgaaaagttcaaaaaagagttgctttcagctggcattatcgatgatgcttggttggcagaaatagaagcagaacataaagacattatcaataaagtaactaaggctgctgaagacgcgccatatccaagtgtcgaagaagcctatgcatttgtgtacgaagaagggagtcttaactaa

SEQ ID NO: 8488 - DNA, 984 bp, Staphylococcus aureus
  CDS (1)...(984)
atggctaaattatcttatttagaggcgattcgccaggcacaagacttagcattacaacaaaataaagatgtatttattcttggtgaagatgttggtaaaaaaggtggcgtatttggtactactcaaggactgcaacaacaatatggtgaggacagagttatcgatacaccattagctgagtcaaatattgtcggaacagccattggcgcagctatggttggtaaaagaccaattgctgagattcagtttgcagattttatcttacctgcaacaaatcaaattattagtgaagccgcgaaaatgcgttatcgttcaaataatgaatggcaatgcccattaacgattcgtgcaccatttggtggcggtgttcatggtggactttatcattcacaaagtattgaaagtatatttgcttcatcaccaggtttaacaattgttataccttcaacaccgtatgatgctaaaggtctattattatcttcaattgaatcaaatgatcctgttttatactttgaacataaaaaggcttatagattcttaaaggaagaagtgccagaagaatattacactgtacctttaggaaaagcagatgttaaacgtgaaggtgaagatttaacagtattttgttatggattaatggtcaattattgtttacaagcagcggatattttagcagcagacggtatcaatgttgaagtcgtagatttacgaactgtttatccattagataaagaaacaattattgatcgtgctaaacatacaggtaaagttttacttgtaactgaagataatttagaaggtagtattatgtctgaggtgtcagcgattattgcagaacattgtctgttcgaactagatgcaccaatcatgcgtttagctgctccagatgtaccatctatgccattttctcctgtattagaaaatgaaattatgatgaatccagaaaaaatcttaaataaaatgcgtgaattagcagaattctag

SEQ ID NO: 8489 - DNA, 1275 bp, Staphylococcus aureus
  CDS (1)...(1275)
atggaaataacaatgcctaagttaggtgagagtgttcatgaaggtaccattgaacaatggttagtttctgttggtgatcatattgatgaatatgaaccattatgtgaagttattacagataaagtgacggctgaagtcccttccacgatatcaggaacaattacagaaattttagttgaagcggggcagacggtagctattgatacaattatctgtaaaattgaaactgctgatgaaaagacaaatgaaacaactgaagagatacaagcaaaagtggatgagcatactcagaaatctactaaaaaagctagtgcaacagtggaacagacatctactgctaaacaaaatcaaccacgaaataatggtcgcttttcacctgttgtatttaaactcgcttcagagcatgacattgatttatcacaagttgtaggtagtggatttgaaggtcgtgtaactaagaaggatttaatgtcagttattgaaaatggtggtaccacagctcaatctgacaaacaagttcaaacacaatcaacttcagtagctacatcaagtaaccaatcatctgaagacaatagtgaaaatagcacaataccagtaaatggtgtgcgtaaagcaattgcacaaaacatggttaatagtgtaacggagattccacatgcatggatgatgattgaggttgatgctacaaaccttgtgaatacgagaaaccattataaaaacaactttaaaaataaagaaggatataatttaactttctttgctttctttgtaaaagctgtagcagatgctttaaaagcatatccattattaaatagtagctggcaaggaaatgaaattgtcttacatacagacattaatatttcaattgctgttgctgatgaaaataaattatacgtacctgtgattaagcatgcagacgaaaagtcaatcaaaggtatagctagagaaattaatactttagcaacaaaagcgcgtaataagcaattgacaactgaagatatgcaaggtggaacatttacagttaataatactggtacatttggttcagtatcatcaatggggattataaatcatcctcaagcagcgattttacaagtagaatccatcgttaaaaagccagtagtaattgatgatatgatagcaattcgaagtatggtaaatttatgtatttcaatagatcatcgcattttagatggtttacaaactggtaaatttatgaatcatattaaacagcgtatcgaacagtatactttagaaaatacaaatatatattag

SEQ ID NO: 8490 - DNA, 450 bp, Staphylococcus aureus
  CDS (1)...(450)
gtgattgaacttatggacatgaatttcgatttatacatgaacggtgttgtagaacaagcaaggaatgaaattgaatctgcgggatatgagcaattaactactgcagaagatgttgacaaagttcttaaacaagatggtacaacactagttatgatcaattctgtatgtggttgtgcaggtggtatcgcaagaccagcagcatcacatgctttacattatgacgtattacctgatcgtctagtgacagtatttgctggacaagataaagaagcgacacaaagagcgcgtgagtacttcgaaggttatgcgccttcaagtccgtcatttgcattagtaaaagatggaaagattacagaaatgattgaaagacatcaaatcgaaggtcatgatgtgatgaacgtaattaatcaattacaaacattattcaataaatattgtgaagaaagataa

SEQ ID NO: 8491 - DNA, 981 bp, Staphylococcus aureus
  CDS (1)...(981)
atgttaaagttaaatccttacaagattggatttagaacaataaaaacagcagtgggtatgactttaggtgtaattattagtaagctgttaggtttagataattatgcttcaagcgccatattagtcgtattatgtattaaacatacaaaagtacattcgctacaagcgattatttcaagattagtatcatgttttttagtattgtttttaggttcagcaatatttagtttattaggtcagagtccaattgtactcggtattatcgtattgttatttataccattaactgtcgtattaaaagtacaagaaggtgtcattacgagttgcgttatattacttcatgtttttaatgcaaaatcaattgatgtacatttaattgttaatgaaacattattactgttaattggactaagcattgcatttacaatgaatttaatgatgccaagtttagacaaacaactagacgaatacaaatgtaaaattgagcaacaaattgctgatatttttagtaaatatagttatatttgtgaaaaatatgaagataccattgcgattgaatttgaagcgttacttttaaatattaaaaaggcgaagtctatcgcgttccgagatgttaaaaatcattttgttagaaacgaaaattcatactatcattattttgatatgcgagaagagcaagtggaattgttaatgagaatgaaaccgctcatcgaaagtatctgtcataaagatccacttttaaatgatgttgcgtcactgctgaaagaaattggtctaaatgtgaatagtaatgactatacagcaatgcgtttacacaatttgtatgagacacgtttgaaattggatgaactgccattgccaacaacacacaaagcgcttaactcgagagcaagtattattcaaatattaaatgaattagaagaatatttacaaatcaaatcgcaatttggttcattgaaaatgcatagtgaagtagcttaa

SEQ ID NO: 8492 - DNA, 1407 bp, Staphylococcus aureus
  CDS (1)...(1407)
atgacacaacaaattggagttattggtttagccgttatgggtaaaaacctagcttggaatattgaatcacgcggatatagtgtatctgtatttaaccgctcaagtgaaaaaactgatttaatggttgaagaatcaaaaggaaaaaatattcatccaacgtactcattggaagaatttgttaattctttagaaaaaccacgtaaaattttattaatggttcaagcaggtaaagctacggatgcaacgattgatagtttgttacctttattagatgatggagatattttaattgatggtggtaatacaaactatcaagatactatcagacgtaataaagcattagcacaaagtgcaatcaactttattggtatgggcgtttctggtggtgaaattggagcgttaactggtccgtcattaatgccgggtggtcaagaagaagcttataacaaagttgcagatatacttgatgcaattgctgcaaaggcaaaagacggtgcttcatgtgttacttatattggacctaatggtgctggacactatgtgaaaatggtacacaatggtatcgaatatgctgacatgcaattaattgcagaaagttatgctatgatgaaagaattattaggcatgtctcatgaagacattgctcaaacgttcaaagactggaatgctggtgaattagaaagttatttaattgaaatcactggtgatattttcatgaaattagatgaaaataaagaagcattagttgaaaaaattcttgatactgcaggtcaaaaaggtacaggaaaatggacttcaattaatgcattagaattaggtattccattaacaatcattactgaatctgtatttgcacgttttatctcttcaatcaaagaagagcgcgtaaatgcttctaaagaattaaatggtccaaaagcatcatttgatggtgacaagaaagactttttagaaaaaattcgtaaagcattatatatgagtaaaatttgttcttatgcacaaggtttcgcgcaaatgcgtaaagcaagtgaagataatgaatggaatttaaaacttggtgatttagctatgatttggagagaaggttgcattatccgtgcacaattcttacaaaagatcaaagatgcttacgataataatccaggattacaaaacttattgctagatccttactttaaaaacatcgttactgaatatcaagatgcgttacgtgatgttgtcgcaactggtgttcaaaatggtgtaccaacacctggtttctcatcaagtattaattactatgatagttaccgtgcagctgatttacctgcaaacttaattcaagcacaacgtgactacttcggtgctcacacgtacgaaagaaaagataaagaaggcgtattccatacacaatggattgaagaataa

SEQ ID NO: 8493 - DNA, 1020 bp, Staphylococcus aureus
  CDS (1)...(1020)
atggttacgattaaagatgttgcactaaaagccggtgtttctccttcgacagtttcaagagttataaaaggaaatcaacgtattagtgaagcgacaatttcaaaagtgaagaaagttatggaagaattgaattattttcctaataccgctgctagaactttaattactaaccaaacatataaaattggtttagtgttaaaagggtctgaggagcctattcgactgaatccattctacatcaatgtattgctaggaatttctgaaacgtgtaaccagcatggctatggtacacaaacgacagtctcaaataatatgaatgatttaatggatgaagtttataaaatgattaaacaacgaatggttgatgcgtttatactgctctattcaaaagaaaatgatccgattaaacaaatgttaattgatgaaagtatgccatttattgtgattggtaagcctacatcggatatagatcatcaatttacacatatagataatgataatatattagcttctgaaaatttgacacgacatgttattgaacaaggtgtagatgaattaatatttattacagaaaaaggaaattttgaagtttcgaaagacaggattcaaggatttgaaacgatagcttctcaaaataaaattaattatcaaattattgagactagtaatgaaagagaagttatttttaattacatgcaaaatctacatacgcgtttgaaggacccaaatattaaacaggcaatcatttcgttagatgctatgttacatttagcgattttaagtgtcctatatgaacttaatattgaaattccgaaagatgtaatgacagcaacgttcaatgattcttatttaaccgaaattgcgtcaccacctcaaaccagtattgacatcaagcctcgaatgttagggcaacaagccgggtctgctattttaaatatattaaaaaacaaagcacaggatgttattgaactggtcattatagatacagaattaaaaataagaaaatcaacacagcgatag

SEQ ID NO: 8494 - DNA, 1650 bp, Staphylococcus aureus
  CDS (1)...(1650)
atgaataagcaatggtggaaagaagcagtagcatatcaagtatatccaagaagttttaatgatagtaatcacgatggtattggggatttacctggaatgattgataaattggactacttaaaagatttaggtatcgatgtcatttggctcagtccaatgtttaaatcacctaatgatgataatggttatgatattagtgactaccaagagattatggatgaatttggaacgatggaagactttgatcgtttattaaaaggtgttcatgatagaggtatgaagcttattttagatttagttgtgaatcatacatctgatgaacatccttggtttatagaatccaaatctagtaaagacaatcccaaacgtgattggtacatttggcaagatccaaagccagatggctctgaacctaacaactgggaaagtatatttaatggatctacatgggaatatgatgctaatactgagcaatattatttccatttattcagtaaaaaacaacctgatttgaattggggtaatccggaagttagagatgctgtattcgaaatgatgaactggtggtttgataaaggcattgatggatttagagtagatgcaattacgcatattaagaagacgtttgaagcgggtgacttacctgtacctgagggtaaaacatatgccccagcatttgatgtagatatgaatcagccaggtatacaaacttggttacaagagatgaaagatcgctcattaagtaagtatgacattatgactgttggtgaagcgaatggtgtaagccctgatgatgctgatgactgggtcggggaagaaaatggtaaatttaatatgatattccaatttgaacatttgggactgtggaatagtggtgattctcattttgatgtaaattcgtataaatctgtattaaatagatggcaaaaacaacttgaaaataaaggttggaatgcgttgtttattgaaaatcatgaccaaccacgacgtgtatcgacgtggggtgacgatgacaagtattggtatgaatcagcaacaagtcatgcagctgtttatttcttgcaacaaggtacgccattcatttatcaaggtcaagaaattggtatgacgaattatccatttgaaagtattgaaacatttaacgatgttgctgttaaaaatgactatcaaattgtgaaagctcaaggtggagatgtagacgctttacttgcgaaatataaagatgagaaccgagataattctcgcacaccaatgcaatgggatgatacgttaaatggaggatttacaaatggtgaaccgtggttcccagtgaatccgaattataaaactatcaatgttgcactacaattagaagatgagcattcagtattacaattttataaagatttaattcaattaagaaaatctaatgatgtatacgtatatggtcaatttgatttagtagatgctgaaaattcacaagtttttgcatacatgagaacattaaatgaaaagcaagttcttatagtaggtaatcttactaaccacgaagcagaattaactgtaccatttgatgtaagtcatggagaagtgaagctatttaattatgatgccaaagttaatttaaaacagttgcgtccatatgaagcatgtgttatcgaattaaattaa

SEQ ID NO: 8495 - DNA, 1248 bp, Staphylococcus aureus
  CDS (1)...(1248)
atggaacatgtcttctatcatagacatgatgttagtaatgaagaaagctatcaagaattattagattttagtaatgaattagatagccaatttgaattaaaaggtaatcgactattctatttagcaatggcaccacaattctttggcgttatttctgattatctaaaatcttctggtcttactgatacaaaaggatttaaacgccttgttatcgaaaaaccattcggtagtgatttaaaatcagccgaagcattaaacaatcaaattcgtaaatcatttaaagaagaagaaatttatcgtattgaccactatttaggaaaagacatggttcaaaatatcgaggtattacgttttgcgaatgcgatgtttgaaccattatggaataacaaatatatttcaaacatccaagttacatcttctgaaatactaggtgttgaagatcgtggtggttattatgaatcaagtggtgcgctaaaagatatggtgcaaaaccacatgttacaaatggttgcattattagctatggaagcacctattagtttaaatagtgaagatatccgtgctgagaaagtaaaagtacttaaatcactgcgtcatttccaatctgaagatgttaaaaagaactttgttcgtggtcaatatggcgaaggctatatcgatggtaaacaagttaaagcataccgtgatgaagatcgcgttgcagatgactctaacacacctacctttgtttcaggtaaattaacaattgataactttagatgggctggcgtaccattctatattcgtactggtaaacgtatgaaatctaaaacaattcaagttgtcgttgaatttaaagaagtaccaatgaacttatactatgaaactgataaactgttagattcaaacctattagtaatcaatattcaacctaatgaaggtgtatctttacatctaaatgctaagaaaaatacacaaggtatcgaaactgaacctgttcaattgtcttattcaatgagcgctcaagataaaatgaatactgtagatgcatatgaaaatctattattcgattgtcttaaaggtgatgccactaactttacgcactgggaagaattaaaatcaacatggaaatttgttgatgcaattcaagatgaatggaatatggttgatccagaattccctaactatgaatcaggtactaatggtccattagaaagtgatttattacttgctcgtgatggtaaccattggtgggacgatattcaataa

SEQ ID NO: 8496 - DNA, 909 bp, Staphylococcus aureus
  CDS (1)...(909)
atgcaaaaaaatatattaaaaagtggtattgcattatctgaattaggtctaggttgcatgagtttaggtacagatttaaaaaaagccgaacaaattatagattgtgctgttgaaaatggtatcacttattttgatacagcagacatgtacgataaaggtataaatgaatcagttgttggtaaggcacttcttaaatatcaacaacgcgatgatattgtcattggtactaaagtaggcaatcgtttaacaaatgatggcagtacaacatgggatccgagtaaatcctatattaaagaggcggttaaaggttcactaaagcgtttaggtattgatcatatcgatttatatcaacttcatggcggaaccattgatgacccattagacgaaacaataagcgcatttgatgaattgaaacaagaaggaattatacgtgcttacggtatttcttctattcgcccaaatgtaattgattattatttaaaacatagtcaaatcgaaacgattatgtctcaattcaatttgattgataatcgtccagaatcattattagatgcaatccacaacaatgatgttaaagtattggcaagaggacctgtgtctaaaggattattaacttcaaacagtgttaatgtgctcgacaataaatttaaagatggtatttttgattattctcatgatgaattgggtgaaacaatagcctctattaaagaaattgaaagtaatttatctgcattgacatttagttatttaacatcacatgacgtgcttggttccatcattgtgggtgcaagtagcgtcgaccaattaaaagaaaatattgaaaactatcatactaaagttagtttagatcagattaaaacagcaagagctcgtgtaaaggatttggaatataccaatcatttagtgtag

SEQ ID NO: 8497 - DNA, 894 bp, Staphylococcus aureus
  CDS (1)...(894)
gtggttatggaaacaattattgaagaatatttgcgttttatacaaattgaaaaaggactaagttctaacacaattggtgcttatagacgtgatttgaaaaagtatcaagattatatgactgaacatcatatctcgcatattgattttatagatcgacaattaattcaagagtgtttggggcatttaatagaccaagggcaatctgctaaatctattgcgcgatttatttcaacaatccgtagttttcatcaatttgctataagagaaaaatatgcagcgaaagatccaacggtattattagattcaccaaaatatgacaaaaaattgcctgacgttttaaatgttgacgaagtgttggctttattagaaacgccggatttaaataaaattaatggttatcgtgatcgtacgatgttagaacttctgtacgcaacgggaatgcgtgtatctgaattgatacatttagagttagagcacgtgaacttaataatggggtttgtacgcgtatttggtaaaggcgataaagaaagaattgtaccattaggcgacacagtcattgaatacttaactacttatattgaaacgattagaccgcaacttttaaaaaagactgttaccgaaggcttatttttaaatatgcatggtaaacctttatcacgacaagcaatatggaaaatgattaaacaaaatggtgtaaaggcaaacattaaaaagacgttaacgccacatacgttacgccactcttttgcgacacatttattggaaaatggcgcagatttaagagcagtgcaagagatgttaggtcactctgacatatctactacccaactctatacacatgtttcaaaatctcaaattagaaaaatgtataaccaatttcatcctagagcataa

SEQ ID NO: 8498 - DNA, 738 bp, Staphylococcus aureus
  CDS (1)...(738)
atgactaaagaattagaacgattacaaaaacgtatagcaaatagcggttatacttcaagacgtaaagcagaaactttaatttctgaaggaaaagtgaaagtgaatggtacaactgtcactgaattaggaacaaaagtgaagccttcagatacgattgaagttgaaggtattaaaatagaactagaagacaaaatttatattttattccataaaccaactcaagtgataacaagtgtatctgatgatagaggacgtacagtggttacagattactttaaagatatagaagcacgtatttatcctgttggtcgtttagactatgatacttctggattgttattacttacaaatgatggtgaatttactaatttaatgacacatccaagatatcaaattaagaagaaatatgtcgcaaaattaaaaggttatttaatgagagaagaagtgaaagcgctagaaaaaggtattgaattagaagatggtatgacgcaaccggctgaagtgaaagttaagaaacaagataaagataaaaacacaacattggttgaaattacaattacagaagggcgtaatcgtcaagtcagaagaatgttcgaacattttggtcatcaagtgacgaaactgtctcgtattgaatatgggcctttaaatgttgtcggtttgaatgctggtgaaggacgtgtattgacgcctcatgaagtaaaagtgatgcgtcatttagcagaacatgggaaataa

SEQ ID NO: 8499 - DNA, 1752 bp, Staphylococcus aureus
  CDS (1)...(1752)
atgatgagccggctaaatagtgtcgtaattaaactgtggttaactattattttaatagtgacgacagttttaattttattaagtattgctttaattacctttatgcaatactatttcacacaagaaaccgaaaatgccataagagaagatgctagacgtataagttcactggtcgaacaatcacataataaagaagaagcaataaaatatagtcaaacattaattgaaaatcctggtgggttgatgattataaataataaacatcgtcaatcaacggcttcactttctaatattaaaaagcaaatgttgaatgaagtagtcaacaacgaccattttgacgatgtgtttgataaaggtaaatctgttactcgaaatgtaacgattaaagaaaagggctcatctcaaacatatattttgttaggctatccaacaaaagcacagaagaatagtcatagcaaatatagtggagtctttatatataaagacttgaaatcaatcgaagatacaaataatgctattacgattatcactataattacggctgttattttcttaacaattacaacagtctttgcgtttttcttatcgtcaagaattacaaaacctttaagacgtttaagagaccaagctacacgtgtatctgaaggggattactcttataaaccttctgtcacaacgaaagatgaaattggtcaattatcgcaggcatttaatcagatgagtacagaaatcgaagagcatgtcgacgcattatccacatctaaaaatattagagacagcttaattaactctatggtagaaggtgtcctaggtattaatgagagtcgacaaattatcttatctaataagatggcgaatgatattatggacaatattgatgaggatgctaaagctttcttattaagacaaattgaagatacttttaaatcaaaacaaacagaaatgcgtgatttagaaatgaatacacgattctttgttgtgaccacaagctatatcgataagattgaacaggggggtaaaagtggtgttgttgtgacagttcgtgatatgactaatgagcacaatctagatcaaatgaagaaagatttcattgctaatgtatcacatgaattacgtacaccgatatcattacttcaaggttatactgaatcaattgtagatggtattgttacagaaccggatgaaataaaagaatcgcttgccattgtccttgacgaatcgaaacgtttaaatcgtttagttaatgaattgttaaatgtcgctcgcatggatgctgaagggttatccgtaaataaagaagttcagcctattgcagcgttactagataagatgaaaattaagtatcgtcaacaagctgataatttaggtctaaatatgacttttaattattgtaagaagcgtgtttggagttatgatatggatcgaatggaccaagtactaacgaacttaattgataatgcatcacgttatacgaaacctggtgatgaaattgcaattacttgtgatgaaaatgaaagtgaagatattttatacattaaagatacaggtacaggcattgcaccagaacatttacaacaagtatttgatcgtttttataaagttgatgcagcgagaacgcgaggtaaacaaggtaccggtttaggtttgttcatttgtaaaatgattatcgaagagcatggtggttccatagatgttaaaagcgaattagggaaaggcacaacatttattattaaactaccaaaaccagaataa

SEQ ID NO: 8500 - DNA, 225 bp, Staphylococcus aureus
  CDS (1)...(225)
atggatacttgtattgcatgtggtgcatgcggtgcagcagcgccagatatatatgattacgacgacgaaggtattgctttcgtaatccttgacgataaccaaggtactgcagaagtacctgaggaattatatgaagatatggaagatgcaattgatggatgccctacagattctattaaaattgcagacgaaacatttgatggggacgctttaaaatttgaataa

SEQ ID NO: 8501 - DNA, 1197 bp, Staphylococcus aureus
  CDS (1)...(1197)
gtgtataaggaggcaaacaagatgactgaagaattcaatgaatcaatgattaacgatattaaagaaggtgacaaagtcactggcgaggtacaacaagttgaagacaagcaagttgttgttcatatcaacggtggtaaatttaatgggattattcctattagtcaactatctacgcatcatattgatagcccaagtgaagttgtaaaagagggcgacgaagttgaagcatatgtcactaaagttgagtttgatgaagaaaatgaaactggagcttacatcttatctagaagacaacttgaaactgagaagtcttatagttatttacaagaaaaattagataataatgaaatcatcgaagcgaaagtaacagaagtagttaaaggtggtttggttgttgatgtaggacaaagaggttttgttccggcttcactaatttcaacagacttcattgaggatttctctgtgtttgatggacaaacaattcgtattaaagttgaagaattggatcctgaaaataatagagtcattttaagccgtaaagcagttgaacaagaagaaaacgatgctaaaaaagatcaattattacaatctttaaatgaaggcgatgttattgatggtaaagtagcgcgtttaactcaatttggtgcatttatagacattggcggtgttgatggtttagtgcatgtatctgaactttctcacgaacatgttcaaacaccagaagaagttgtttcaattggtcaagatgttaaagttaaaattaaatctattgatagagatacagaacgtatttcattatcaatcaaagatacgttaccaacacctttcgaaaatattaaaggtcaattccacgaaaatgatgtcattgaaggtgtcgtagtaagattggcaaactttggtgcatttgttgaaattgcaccaggtgtacaaggacttgtacatatttctgaaattgcacacaaacacattggtacgccaggtgaagtgttagaacctggtcaacaagtaaatgttaaaatattaggtattgatgaagagaatgaaagagtatcactatctattaaagcaacattaccaaacgaagatgttgttgaaagtgatccttctacgactaaggcgtacttagaaagcgaagaagaagataatccaacaattggcgatatgattggtgataaacttaaaaatcttaaactataa

SEQ ID NO: 8502 - DNA, 1311 bp, Staphylococcus aureus
  CDS (1)...(1311)
atgactaaacctatagtagctattgtaggtaggcctaatgtaggtaaatctacaatttttaatagaatagttggagaacgtgtttcgattgttgaagatacgccaggtgtaacacgagatcgtatttattcttcaggtgagtggttaacacatgatttcaatattattgatacaggtggtattgaaattggtgatgcaccattccaaacacaaattagagcgcaggcagaaatcgccatagatgaagcggatgttattatttttatggttaacgtgcgtgaaggattgacacaaagcgatgaaatggtcgctcaaattttatacaaatctaaaaaaccggtcgtattagcggttaacaaagtagataatatggaaatgcgtacagacgtgtatgatttctattcattaggatttggtgaaccgtatccaatatcagggtcacatggtttaggtcttggtgacttgttagatgcagttgtttctcattttggtgaagaggaagaagatccttatgatgaagatacaattcgactatccattattggacgaccaaacgtaggtaaatcaagtttagtaaatgctattttaggtgaagatcgcgttatcgtttctaatgttgcagggacaacgagagacgctattgatacagagtatagttatgatggacaagattatgttttaatcgatactgctggtatgcgtaaaaaaggaaaagtatatgaatcaactgagaaatattcagtattaagagctttaaaagcgattgaacgttcaaatgttgttttagtggttattgatgcagaacaaggcattattgaacaagataaacgtgttgcaggatatgcacatgaacaaggtaaagcagtcgtgattgtcgtaaataaatgggatactgtggaaaaagatagtaaaacgatgaagaaatttgaagatgaagtacgtaaagaattccaatttttagattatgcacaaattgcttttgtgtctgctaaagaacgcacaagattacgtacattattcccttacattaatgaagcaagtgaaaaccataaaaaacgtgttcaaagttcaactttaaatgaagtcgttactgatgcaatttccatgaaccctacaccaacagacaaaggtagacgtttgaatgtcttttatgcaacacaagttgctatagaaccaccgacatttgttgtatttgttaatgatgtagaattaatgcatttttcttataaacgctatttagagaatcaaatccgtgccgcttttggttttgaaggtacaccaattcatattatagctcgaaagagaaattaa

SEQ ID NO: 8503 - DNA, 273 bp, Staphylococcus aureus
  CDS (1)...(273)
atgaacaaaacagatttaatcaatgcagttgcagagcaagctgatttaactaaaaaagaagctggttcagcagtagatgctgtattcgaatcaatccaaaactcacttgctaaaggtgaaaaagtacaattaattggtttcggtaactttgaggtacgtgaacgtgctgcacgtaaaggtcgtaaccctcaaactggtaaagaaattgatatcccagcaagtaaagttccagcattcaaagctggtaaagcattaaaagatgctgtaaaataa

SEQ ID NO: 8504 - DNA, 726 bp, Staphylococcus aureus
  CDS (1)...(726)
atggctgacaataaagcaaataaagagcaagtacatcgcgtttttcaaaatatttcaaaaaaatatgacagattaaataatattattagttttgagcagcataaagtatggagaaaacgtgtcatgaaagacatgggtgttagacaaggtacgaaagcattagatgtttgttgtggtactggtgattggacaatcgcattaagcaaagctgtaggaccaataggagaagttactggtattgactttagtgagaatatgttagaagtaggaaaagaaaaaactgcttcaatggaaaatgttaaacttgttcatggtgatgcaatggaattgccgtttgaagacaattcttttgattatgtaacaattgggtttggattaaggaatgtgccagactatttagtcgcgttaaaagaaatgaatagagtacttaaaccaggtggtatggtggtatgtcttgaaacgagccaaccaactttgccagtctttaaacaaatgtatgcattatactttaaatttgttatgcctatttttggaaaattatttgcaaaatcaaaagaagaatatgaatggttacagcaatctacgtttaattttcctggaaaagaagagttgaagcgcatgtttgaagaagcgggtttcataaatgtaagagtacgtagttttacagggggcgttgctgcaatgcaccttggctataaagaaaaagataataccaaaggtgattaa

SEQ ID NO: 8505 - DNA, 969 bp, Staphylococcus aureus
  CDS (1)...(969)
gtgattaacgtggcaaagttaaacatgaacaatgaaattaagaaagtggaacaacgacttgaaaaggcaataaaaagtaaagattctgtattagaacaggcatcattacacttattgtcttctggtggtaaaagagtacgcccggcatttgtaattctgagtagccaatttggcaaagatgaacaaacgtctgaacaaacgtatcaagttgcagtcgcattagagttaattcatatggcaacacttgttcatgatgacgttattgataaaagcgacaagcgtcgaggcaagttaaccatatcaaagaaatgggatcagacaactgctattttaactgggaattttttattggcattaggacttgaacacttaatggccgttaaagataatcgtgtacatcaattaatatctgaatctatcgttgatgtttgtagaggggaacttttccaatttcaagaccaatttaacagtcaacagacaattatcaattatttacgacgtatcaatcgtaaaacagcactgttaattcaattatcaactgaagttggtgcaattacatctcaatctgataaagagactgtacgaaaattgaaaatgattggtcattatataggcatgagcttccaaatcattgatgatgtattagacttcacaagtactgaaaagaaattaggtaagccggtcggaagtgatttgcttaatggtcatattacgttaccgattttattagaaatgcgtaaaaatccagacttcaaattgaaaatcgaacaattacgtcgtgatagtgaacgcaaagaatttgaagaatgtatccaaatcattagaaaatctgacagcatcgatgaagctaaggcagtaagttcgaagtatctaagtaaagctttggatttgatttctgagttgccagatggacatccaaaatcactacttttaagtttgacgaaaaaaatggggtcaagaaacacatag

SEQ ID NO: 8506 - DNA, 1173 bp, Staphylococcus aureus
  CDS (1)...(1173)
gtgtgtatgagatacctaacatcaggagaatcacatggacctcaattaacagttattgttgaaggtgtacctgcaaatttagaagttaaggttgaggatattaataaagaaatgtttaagcgtcaaggcggttacggacgtggacgtcgtatgcaaattgaaaaagatacagtggagattgtttcgggtgtaagaaatggttatacattaggtagccctattacaatggttgttactaatgatgattttacacattggcgaaaaattatgggcgctgcgccaataagcgacgaagaacgagaaaatatgaaacgtacaattacgaagccaagaccgggacatgcagatttagttggcggtatgaaatataatcatcgtgacttacgaaatgtattagaacgttcatctgccagagaaacagcagcacgtgtagcggtcggtgcactatgcaaagttttattagaacaattagatatcgaaatatacagtcgtgttgttgagataggtggcattaaagataaagatttttatgattcagaaacatttaaagcaaaccttgatcgaaatgacgtccgtgtaattgatgatggcatcgcacaagcaatgcgcgataaaattgatgaagcgaaaaacgatggtgattcaatagggggcgtagttcaagttgtagttgaaaatatgcctgttggtgtaggtagttatgtacattatgatcgtaaattagatggaagaatagcacagggtgtcgttagtattaatgcatttaaaggtgtaagttttggagaaggatttaaagcagctgaaaagcctggtagcgaaattcaagacgaaattctctacaatactgaattgggctattatcgtgggtcaaatcacttaggtggtttagaaggcggtatgtcaaatggaatgccaattatcgttaatggtgtaatgaaaccaattccaacgttatataaaccattaaattcagtagacattaatactaaagaagactttaaagcaacaattgaacgttctgatagttgtgctgttcctgcagcaagtatcgtctgtgaacatgtcgtagcatttgaaattgcaaaagcattattggaagaattccaatcaaatcatattgagcaacttaaacaacaaattattgagcgcagacaattaaatattgagttttaa

SEQ ID NO: 8507 - DNA, 1155 bp, Staphylococcus aureus
  CDS (1)...(1155)
atgggcaagcgaatgaagataggtataacatgttacccgtccatgggtggttctggaattattgccacagaattaggaattaaattagcagagcgaggtcacgaagtacattttatcacttcaaatatcccgtttagaataagaaaaccattaccgaatatgatttttcatcaagttgaagtgaatcaatatgcagtatttcaatatccaccgtatgatattacgttaagtactaaaatcgctgaagttattaaagaatatgatcttgatttgttgcatatgcactatgctgtacctcatgcaatttgtgggattttagctcgtgagatgtcaggtaaagatataaaaattatgacaacgttacacggtactgatattactgttttgggctatgatcattcactccaaggtgcaattaaatttggcattgaaaaaagtgatattgtgacaagtgtgagtaaatctttagcgcaagaaacacatgaaattatcgaaactaacaaagaaattatcccgatttataattttgtacgtgaaaatgagtttccaactaaacataacacagcattaaaagcacaatttggtatagcaccagatgaaaaagtgttaatacatgtatcgaattttagacaagtaaaacgcatagatactattatagaaacatttgcaaaagtacgtgaaaagatacctagtaaattaattttacttggtgatggccctgaattagtgccaatgcgtcaaaagacgaaagagttaaacgtagaagaggatgttttatttttagggaaacaagattgcgtaagtgaattttaccaattatctgacttagtattattattaagtgaaaaagaaagctttggactaactttacttgaggctatgaaaacaggcgtcgttccaattggttcaaatgccggtggaattaaagaggttattaaacatggtgaaactggatttgtcgtagatgtgggtgattgtgattcagcgagtgactatgctatccgattacttgaagataaggtgttatacaacaaacttcagaaaaacatgctagcagatattgctgaacgttttggatcagaactcattacagatcaatatgagtattattatcaaaaaatgctaaatgagcataacaaaagtaaaggcgagtaa

SEQ ID NO: 8508 - DNA, 1236 bp, Staphylococcus aureus
  CDS (1)...(1236)
atgagcataacaaaagtaaaggcgagtaataatatgaataaatcattatttgaacaggcaaggcctatattagaacaaattcaagacaatggttttgaagcatattatgtaggtggctctgtaagagattatgtcatgggaagaaatattcatgatatagatatcacaacaagtgcaacgccagatgaaatagaatctatctttagtcatacgatacctgtaggtaaagaacatggcaccataaatgtagtttttaatgatgaaaattatgaagtgacaacattccgggctgaagaagattatgtcgatcaccgtagaccaagtggtgttacatttgttcgtgatttatacgaagatttgcaacgaagagatttcacgatgaatgcgatagcaatggatacatcatacaaattgtatgattattttgatggtcaacaagatattaataatcgaataataagaactgtaggtatagctgaggaacgattccaagaagatgctttacgtatgattcgatgtttaagattccagtcacaattatcatttgaaattgcaacggaaacatttgaagcgatgcgtacacaaatggcagatattaaatttttatcaattgagcgtatagtgattgaactaactaaattaatgcgaggtattaatgttgaaaagagttttaatcatttaaaatcgctgaaagcatataattatatgccatatttcgaacatcttgatatgaatcaaattaatgtgactgaaccaattgatttagaattgttgattgctatagtatcagttaaatttgatattaattactcattgaagcctttaaaactaagtaaccgacaagtaaaagatatcaatcaatatattcaaattatgaatgcattaccaagtattattacaaaagaacaattaaaaatgtttgtttatgattatgatacgaatctcattaaaaatgtaatggttgcagtagacgtgttaaaggcaaatgatattcaaggacatgaaccattaatcgttaaccttcaaacgattgatgaaacattacatcacttaactatgcataatagaaaagacatgatggttaatggcggtgtacttatggcacatttaaatgccaaaagtggtccgtggttaaaagatgtgctaagacaaattgagatagcgattgtaacaggtaaagtaagcaacgaagaaactgaaattttgaaatgggtggataatcatgtcaaaatatag

SEQ ID NO: 8509 - DNA, 393 bp, Staphylococcus aureus
  CDS (1)...(393)
atgacttacagtggtctgaagatcaaagtttctaatgaggtggaaaaaatgtcagatgtttcattgaaattatcagcaaaagatatttatgaaaaagattttgaaaaaacaatggctcgtggctatagaagagaagaagtagatgcatttttagatgacattattgctgattatcaaaaaatggccgatatgaataatgaagttgtaaaattatcagaagagaatcacaaacttaaaaaagaattagaagaattaagactacgtgtagcaacatctagacctcaggacaataaaagtttttcttcgaataatacaacaacaaatacatcttcaaataatgtagatattttaaaacgtatttcaaacttagaaaaagctgtatttggtaaataa

SEQ ID NO: 8510 - DNA, 978 bp, Staphylococcus aureus
  CDS (1)...(978)
atgggcactttttattggagagggacgaatatggcagaacaacaaacaattatggaacgcttgtttcatacattagatgaaaaagctaaaacattaaataatgaaaatggccaaagttttattgaaaatcttggactagcaatggaacaagtatataccaatgaaagaggattgttagaacaatcgacgttacaagatcgacgtaaagcattccaatttgcatatttaagtttaatgcaggaagaaaagatacaagcaaatcatcaaattacaccagattcaattggcttgatactaggatttttagttgagcgttttatgaacaaccaagaagaattacatattgttgatattgcaagtggtgctggtcatttaagtgctactgtaaaagaagtgttacctgaaattgcggttatgcatcatttaattgaagttgatccagttttatcacgtgttagtgtacatttagcaaacttcttagaaattcctttcgatgtgtatcctcaagatgccattatgccactaccgttagaagaagcagatatcgttattggtgattttccagtaggctattatccaattgatgaaagaagtaaggagtttaagctaggtttcgaagaaggacatagttattcacattatttattaatagaacaagcaataaatgcattaaaagatgctggatatgcctttctagtggtaccaagtaatatttttacaggcgagcatgtaaaacagcttgaaaaatatattgcaacagagacagagatgcaagcatttttaaatttaccaccaactttatttaaaaatgaaaaagcgcgaaaatctatattaattttacaaaagaaaaaatcgggtgaaacaaagccagttgaagtattattggcaaatattcctgatttcaaaaatccttcacaatttcaaggatttatgacagagttaaatcagtggatggacacaaatcgtcctaaaaaataa

SEQ ID NO: 8511 - DNA, 1155 bp, Staphylococcus aureus
  CDS (1)...(1155)
gtgaaattattcacaaacgaaagaggagtgttgcaaatgttagttgcagtagtcaaagaattaaaacaaggtgaaggacgtgtagcttgcacacccgaaaatgtgcgtaagttaacggctgcaggacataaagtaattgtagaaaaaaatgctggcattggttcaggattttctaacgatatgtatgaaaaagaaggcgctaagatcgtaactcacgaacaagcatgggaagcagatcttgttatcaaagtaaaagaacctcatgaaagcgaatatcaatatttcaaaaagaatcaaattatatggggatttttacatttagcatcttcaaaagaaatagtagaaaaaatgcaagaagttggtgtaactgcgattagtggtgaaaccattataaaaaatggaaaagcagaattattagcgccaatgagtgctatagcaggtcaacgctcagcaattatgggagcttactactctgaagcacaacatggtggtcaaggtactttagtgactggtgtacatgaaaatgtggatatacctggtagtacatatgtgattttcggtggtggagtagcagcaacaaatgcagcaaatgttgccttgggactaaatgctaaagtaatcattatcgagttaaacgatgaccgcattaaatatcttgaagatatgtatgcagaaaaagatgtcacagtagtcaaatcaacaccagaaaatttagcagaacaaattaaaaaagcagatgtatttatttctacaattttaattcctggtgcgaaaccgccaaaattggttactcgtgagatggttaaatcaatgaaaaaaggttcagtattaatcgatatagctattgaccaaggtggaactattgaaacaattagaccaactacaatttctgatccggtgtatgaagaagaaggtgtgattcattatggtgtaccaaatcaaccaggagcagtcccaagaacttcaacaatggcattagcacaaggaaatattgattatatattagaaatttgtgacaaaggcctagaacaaacaattaaagataatgaagccttaagtactggagtaaacatttaccaaggacaagtgacaaaccaaggattagctacatcacatgacctagattataaagaaatattaaatgttatcgaatag

SEQ ID NO: 8512 - DNA, 17388 bp, Staphylococcus aureus
  CDS (1)...(17388)
gtgaattatcgtgataaaattcaaaagtttagtattcgtaaatatacagttggtacattttcaactgtcattgcgacattggtatttttaggattcaatacatcacaagcacatgctgctgaaacaaatcaaccagcaagcgtggttaaacagaaacaacaaagtaataatgaacagactgagaatcgagaatctcaagcacaaaattctcaaaattcacaaaatggtcaatcattatctgctactcgtgaaaatgagcaaccaaatattagtcaagctaatttagtagatcaaaaagtagcgcaatcatctactactaatgatgaacaaccagcatctcaaaatgtaaatacaaagaaagattcggcaacggctgcgacaacacaaccagataaagaagaaattaagcataaacaaaacgaaagtcaatctgctaataaaaatggaaacgacagtagagcggctcatgtagaaaatcatgaagcaaatgtagtaacagcttcagattcatctgataatggtaacgtacaacatgaccgaaatgaattacaagcattttttgatgcaaattatcatgattatcgctttattgaccgtgaaaatgcagattctggcacatttaactatgtaaaaggcatttttgacaagattaatacgttattaggtagtaatgatccaattaacaataaagacttgcaacttgcatacaaagaattggaacaagctgttgctttaattcgtacaatgcctcaacgtcaacaaactagccgtcgatcaaatagaattcaaacgcgttcggttgagtcaagagctgcagagcctagatcagtatcagactatcaaaatgcaaactcatcatattatgttgaaaatgctaatgatggttcgggctatcctgttggtacatatatcaatgcttctagtaaaggggcgccatataatttaccaactacaccatggaatacattgaaggcctctgactcaaaggaaattgctcttatgacagcgaaacaaactggagatggctaccaatgggttattaagtttaataaaggacatgctccacatcaaaatatgattttctggtttgcattaccagcagaccaagtgccagtaggaagaactgactttgtaacagttaattcagatggaacaaatgtacaatggagtcatggagcaggagctggtgcaaataaaccacttcaacaaatgtgggaatatggagtaaatgatcctgatcgttcacatgactttaaaataagaaatagaagtggccaagtaatatatgactggccaactgtccatatttattctttagaagatttatctagagcgagtgattattttagtgaagctggagcgacacctgctactaaagcttttggtagacaaaattttgaatatattaatggtcaaaaacctgctgaatcaccgggtgttcctaaagtttatactttcatcggtcaaggtgatgcaagttatacaatttcatttaaaacacaaggtccaactgttaataaattgtattatgcagcaggtgggcgtgctttagagtacaatcaattatttatgtacagtcaactatacgtcgaatcaacgcaagaccatcaacaacgtcttaatggtttaagacaagtggttaatcgtacttatcgcattggtacaactaaacgagtagaagtgagtcaaggaaatgtacaaacaaaaaaggtattagaaagtacgaacctaaatatagatgattttgttgatgatccattaagttatgttaagacgccgagtaataaagtgttaggattttattcgactaatgcaaacactaatgcttttagaccgggtggagcccaacaattaaatgaatatcaattaagtcaattatttactgatcaaaaattacaagaagcagcaagaactagaaacccaataagattaatgattggtttcgactatcctgatgcttatggtaacagtgaaactttagttcctgttaacttaacggtattacctgaaatccaacataatattaaattctttaaaaatgacgatactcaaaatattgctgaaaaaccattttcaaaacaagctgggcatccagttttctatgtatatgcaggtaaccaagggaatgcttccgtgaatttaggtggtagcgtaacatctattcaaccattacgtattaatttaacaagtaatgagaattttacagataaagattggcaaattacaggtattccgcgtacattacacattgaaaactcgacaaatagaactaataatgctagagaacgtaatattgaacttgttggtaatttattaccaggggattactttggcacgatacgttttggacgtaaagaacaattattcgaaattcgtgttaaaccacatacaccaacaattacaacgacagctgagcaattaagaggtacagcattacaaaaagtacctgttaatatttctggaataccgttggatccatcagcattggtttatttagttgcgccaacaaatcaaactacgaatggtggtagtgaggcagatcaaataccatctggttatacgatacttgcgactggtacacctgatggggtccataacacaattactatacaaccaaaagattacgtagtatttataccaccagtaggtaaacaaattagagcagtagtttattataataaagtagttgcatctaatatgagtaatgctgttactattttgccagatgacattccaccaacaatcaataatcctgttggaataaatgccaaatactatcgaggcgacgaagtcaactttacaatgggtgtctctgatagacattctggattaaaaagtacaactattacgacattgccaagtggttggacatcaaatttaactaaatccgacaacaaaaacggctcattagctattactggtagagtgagtatgaatcaggcatttaacagtgatattacatttaaagtgtcagcgacagataatgtcaataatacgacaaatgatagtcaatctaaacatgtgtcaattcatgtaggtaaaattagtgaagatgctcatccgattgtattaggaaatactgagaaagttgtagtagtcaatccgactgctgtatctaatgatgaaaagcaaagaataattactgcctttatgaataaaaaccaaaatataagaggatatttagcatcaactgatccagtaacagtcgataataatggtaatgtcacattacattaccgtgatggctcatcaacaacgcttgatgctacaaatgtgatgacatacgaaccagttgtgaaatctgaatatcaaactgccaatgctgctaaaacagcaacggtaacgattgctaaaggacaatcatttaatattggtgatattaaacaatattttactttaagtaatggacaagctattccaagtggaacatttacaaatattacatctgatagaactattccaactgcacaagaagttagtcaaatgaatgcaggtacacagctatatcatatagttgcttcaaatgcatatcataaagacactgaagatttctatattagtttaaaaatcgttgatgtgaaacaacctgaaggcgatcaacgtgtatatcgtacgtcaacatatgatttaactactgatgaaatctcaaaagtaaaacaagcttttattaatgcaaatagagatgtaattactcttgccgaaggtgatatttcagttacaaatacacctaatggtgctaatgtaagtactattacagtaaatattaataaaggtcgattaacgaaatcattcgcgtctaacctagctaatatgaatttcttgcgttgggttaatttcccacaagattatacagtgacatggacgaatgtaaaaattgcaaacagaccaacagatggtggtttatcatggtccgatgaccataaatctttaatttatcgttatgatgctacattaggcacacaaattacaactaatgatattttaacgatgctaaaagcgactactacagtgcctggtttgcgtaataatattactggtaatgaaaaagcacaagcagaagcaggtggaagaccaaactatagaacaactggttattcacaagcaaatgcatcatctgatggccaaagacaatatacgttgaatggtcaagtgattcaaatattagacatcatcaacccttcaaacggttatggtgggcaacctgttacaaattcaaatactcgtgcaaaccatagtaacgcaactgttgttaacgtaaacgaaccggcagctaatggtgctggcgcatttacaattgaccacgttgtaaaaagtaattctacacataatgcaagtgatgcagtttataaagcacagttatacttaacgccatatgggccaaaacaatatgttgaacatttaaatcaaaatacgggaaatactactgatgctattaacatttattttgtaccaagtgatttagtgaatccaacaatttcagtaggtaattacactaatcatcaagtgttctcaggtgaaacatttacaaacactattacagcgaatgataactttggtgtgcaatcggtaactgtaccaactacatcacaaattacaggtactgttgataataaccatcaacatgtttcagcaacagcaccaaatgtgacatcagcaactagtaagacaatcaatttattagcaactgatacaagtggtaatacagctacaacttcattcaatgtaacagtgaaacctttgcgtgataaatatcgagttggtacttcatcaacggctgctaatcctgtgagaattgccaatatttcgaatgatgcgacagtatcacaagctgatcaaacagcaattattaattcattgatgtttactgaaacagtaccaaatagaaactatgcaacagcaagcgcaaatgaaattactagtaaaacagttagtaatgtcagtcgtactggaaataatgccaatgtcacagtaactgttacttatcaagacggaacaacatcaacagtgactgtaccagtaaagcatgtcattccagaaatcgttgcacattcgcattacactgtacaaggtcaagacttcccagcaggtaatggttctagtgcagcagattactttaaattatctaatggtagtgccattccagatgcaactattacatgggtaagtggacaagcgccaaataaagataatacgcgtattggtgaagatattaatgtaacagcaaatatcttaattgatggcgaaacaacgccgattacgaaaacagcaacatataaagtagtaagttcagtaccgaagcatgtctttgagacgaatagaggcgctgtgttcccaggtgtatctgatgtgtatgatgcgaaacaatatgttaaaccagttaatgattcttggacacaaaatgcgcaacgtatgaatttccaatttacaaattcatatggaccaagtaaagatgtggttggtatttcaacaagggatattcgagttacttatgataatcaccaaacgcaaattatcaagattttagcaaaagttaaaccagatccaccgcgaattgatggcaattctgtgacttataaagcaggtcttactaaccaacaaattaaaattaataatgtgttaagtagttcatctattaaattatttaaagcagataatacgccattaacgattacaaacacgacttatggtagtggtaatactgctgttgtaacggtaagtgatgcgttaccaaatggtgtgattaaggcaaggtcttctatcacaatgaataatgtgacgtacactactcaagatgaacatggtcgagcgatagatgtaacaagaaatgaatctgttgattcaaatgacagtgcaacagtaacagtgacaccacaattacaagcaactactgaaggcgctgtatttattaaaggtggcgacggttttgatttcggacacgtagaaagatttattcaaaacccaccacatggagcaacggttgcatggcatgataatccagatacatggaagaatacagtcggcaacactcataaaactgcggttgtaacattacctagtggtcaaggtacgcgtaatgttgaagttccagtaaaagtttatccagttgctaatgctaaggcgccatcacgtgatgtgaaaggtcaaaatttgactaatggaacggatgcgataaactacattacatttgatccaaatacaaacacaaatggtatcactgcagcatgggcaaatagacaacaaccaaataaccaacaagcaggtgttcaacatttaaatgtcgatgtgacatatccaggtattacagctgcaaaacgtgtacctgttactgttaatgtatatcaatttgaattccctcaaacttcttatacaacaacagttggtggcactttagcaaatggtacgcaagcatcaggatatgcacatatgcaaaacgctaatggtttaccaacagatggatttacgtataaatggaataatgcagcaacgggtacaaacgatgcaaactgggcagcaatgaataaaccgaatgcggctaaagtcgttaatgcaaaatatgatgtcatctataatggacatacatttgcaacatctctaccagcgaagtttgtagtaaaagacgtgcaaccagcgaaaccaactgttacagaaacggcagcaggagcgataacgattacacctggggcaaaccaaacagtgaatacacatgccggtaacgtaacgacgtatgctgataaattagtaattaaacgtaatggtaatgttgtgacgatatttacgcgtcgcaataatacaagtccatgggtgaaagaagcatctgcagcaactgtagcaggtattgctggaactaataatggtattactgttacagctggtactttcaatcctgctgatacaattcaagttgttgcaacacaaggtagtggtgaaacaatcagtgatgagcaacgtagtgatgatttcacagttgtcgcaccacaaccgaaccatgcgaatactaagatatggcaaaatggtcatattgatatcacgcctaataatccatcagggcatttaattaatccaactcaagcaatggatattgcttatactgaaaaaatgggtaatggtgcagaacatagtaagacaattaatgttgttcgtggtcaaaataaccaatggacaatcgccaataaacctgactatgtaacgttagatgcacatacaggtaaagtgacgttcaatgccaatactgtcaagccgaattcagcaattaccattacaccgaaagcaggtacaggtcactcagcaagtagtaatccaagtacattaactgcaccggcaactcatactgtcaacacaactgaaattgtaaaagattatggttctaatgtaacagcagctgaaattaacaatgcagttcaagttgctaataaacgtactgcaacgattaaaaatggcacagcaatgcctactaatttagctggtggtagcacaacgacgattcctgtgacagtaacttacaatgatggcagtactgaagaagtacaagagtctattttcacaaaagcggataaacgtgagttaatcacagctaaaaatcatttagatgatccagtgagtacagatggtaaaaagccaggtacaattacgcagtacaataatgcaattcataatgcgcaacaacaaatcaatactgcgaaaacagaagcgcaacaagttattaataatgagcgtgcaacaccacaacaagtttctgacgctttaactaaagttcgtgctgcacaaactaagataaatgaagctaaagcattacttcaaaataaagaagataatagccaattagtaacatctaaaaataacttacaaagttctgtgaaccaagtaccatcaactactggtatgacgcaacaaagtattgataactataatgcgaagaaacgcgaagcagaaactgaaataactgcagctcaacgtgttattgacaatggtgatgcaactgcacaacaaatttcagatgaaaacactacagcacaacgcaatgatttaacaaatcaaatttcacaagctacaaacttagctgctgttgaatctgttaagcaaagtgcgaatagtttagatggtgcaatgggtaacttacaaacggctatcaacgataaatctggaacattagcgagccaaaacttcctagatgctgatgagcaaaaacgtaatgcttacaatcaagctgtatcaaatgccgaaacaattttaaataaacaaactggaccgaatacagcgaaaactgcagtcgaacaagcacttaataatgttaatagtgcgaaacatgcattaaatggtacgcaaaacttaaataatgcgaaacaagcagcgattacagcaatcaatggcgcatctgatttaaatcaaaaacaaaaagatgcattaaaagcacaagctaatggtgctcaacgcgtatctaatgcacaagatgtacaacgtaatgcgactgaactgaacacggcaatgggcacattaaaacatgccatcgcagataagacgaatacgttagcaagcagtaaatatgttaacgccgatagcactaaacaaaatgcttacacaactaaagttaccaatgctgaacatattattagcggtacgccaacggttgttacaacaccttcagaagtaacagctgcagctaatcaagtaaacagcgcgaaacaagaattaaatggtgacgaaagattacgtgttgcaaaacaaaacgccaatactgctattgatgcattaacgcaattaaatacacctcaaaaagctaaattaaaagaacaagtgggacaagccaatagattagaagacatacaaactgttcaaacaaatggacaagcattgaacaatgcaatgaaaggcttaagagatagtattgctaacgaaacaacagtcaaagcaagtcaaaactatacagacgcaagtccgaataaccaatcaacatataatagcgctgtgtcaaatgcgaaaggtatcattaatcaaactaacaatccgactatggatactagtgcgattacccaagctacaacacaagtgaataatgctaaaaatggtttaaacggtgctgaaaacttaagaaatgcacaaaatactgctaagcaaaacttaaatacgttatcacacttaacaaataaccaaaaatctgcaatctcatcacaaattgatcgtgcaggtcatgtgagtgaggtaacagctgctaaaaatgcagcaactgagttaaacacgcaaatgggcaacttggaacaagctatccatgatcaaaacacagttaaacaaggtgttaacttcactgatgcagataaagccaaacgtgatgcgtatacaaatgctgtaagcagagcagaaacaattctgaacaaaacgcaaggtgcaaatacgtctaaacaagatgttgaagcagctattcaaaatgttacaagtgctaaaaatgcattgaatggtgatcaaaacgttacaaatgcgaagaatacagctaaacatgcattaaataacttaacgtcaattaataatgctcaaaaacgtgacttaacaactaaaattgatcaagcaacaacagtagctggtgttgaagcggtatctaatacaggtacacaattgaatacagcgatggctaacttgcaaaatggtattaatgataaagcgaatactttagcgagcgaaaactatcatgatgctgattcagataagaaaactgcttatactcaagccgttacgaacgcagaaaatattttaaataaaaatagtggatcaaatttagacaaagctgccgttgaaaacgcgttgtcacaagtgacaaatgcgaaaggtgccctaaatggtaaccataatttagagcaagctaaatcaaatgcaaacactactataaacggacttcaacatttaacaactgcacaaaaagataaattgaaacaacaagtgcaacaagcacaaaatgttgcaggtgtagatactgttaaatcaagtgccaacacattaaatggtgctatgggtacgttaagaaatagcattcaagataacacagctacgaataatggccaaaactatcttgatgctacagaaagtaacaaaacaaactataacaatgctgttgatagtgctaatggtgtcattaatgcaacaagcaatccaaatatggatgctaatgcaattaaccaaatcgctacacaagtgacatcaacgaaaaatgcattagatggtacacataatttaacgcaagcgaaacaaacagcaacaaatgccatcgatggtgctactaacttaaataaagcacaaaaagatgcgttaaaagcacaagttacaagtgcgcaacgtgttgcaaatgtaacaagtatccaacaaactgcaaatgaacttaatacagctatgggtcaattacaacatggtattgatgatgaaaacgcaacaaaacaaactcaaaaatatcgtgacgctgaacaaagtaagaaaactgcttatgatcaagctgtagctgctgcgaaagcaattttaaataaacaaactggttcaaattcagataaagcagcagttgaccgtgcattacaacaagtaacaagtacgaaagatgcattgaatggtgatgcgaaactagcagaagcgaaagcggcagctaaacaaaacttaggtactttaaaccatattacaaatgcacaacgtactgcgttagaaggtcaaatcaatcaagcgacgactgttgatggcgttaatactgtgaaaacaaatgccaatacattagacggcgcaatgaatagcttgcaaggttcaatcaatgataaagatgcgacattaagaaatcaaaattatcttgatgcagatgaatcaaaacgtaacgcatatactcaagctgtcacagcagctgaaggcattttaaataaacaaactggtggtaacacatctaaagcagacgttgataatgcattaaatacagttacaagagcgaaagcggctttaaatggtgctgaaaacttaagaaatacgaaaacttcagcaacaaatacgattaatgggttaccaaacttaacacaattacaaaaagataacttgaagcatcaagttgaacaagcgcaaaatgtagcaggtgtaaatggtgttaaagataaaggtaatacgttaaatactgccatgggtgcattacgtacaagtatccaaaatgataatacgacgaaaacaagtcaaaattatcttgatgcatctgatagcaacaaaaataattacaacactgctgtaaataatgcaaatggtgtaattaatgttacgaataatccaaatatggatgctaatgcgattaatggcatggcaaatcaagtcaatacaacaaaagcagcgttaaatggtgcgcaaaacttagctcaagctaagacaactgcgaaaaacaacttgaataacttaacatcaattaacaatgcacaaaaagatgcgttaacgcgtagcattgatggtgcaacaacagtagctggtgtaaatcaagaaactgccaaagcaacagaattaaataacgcaatgcacagtttacaaaatggtatcaatgatgagacacaaacaaaacaaactcagaaatacctagatgcagggccaagtaagaaatcagcttatgatcaagctgtaaatgcagcaaaagcaattttaacaaaagctagtggtcaaaatgtagacaaagcagcagttgaacaagcattacaaaatgtgaacagtacgaagacggcgttgaacggtgatgcaaaattaaatgaagctaaagccgctgcgaaacaaacgttaggtacattaacacacattaataatgcacaacgtacagcgttagataatgaaattacacaagcaacaaatgttgaaggtgttaatacagttaaagccaaagcgcaacaattagatggtgctatgggtcaattagaaacatcaattcgtgataaagacacgacgttacaaagtcaaaattatcaagatgctgatgatgctaaacgaactgcttattctcaagcagtaaatgcagcagcaactattttaaataaaacagctggcggtaatacacctaaagcagatgttgaaagagcaatgcaagctgttacacaagcaaatactgcattaaacggtattcaaaacttagaacgtgcgaaacaagctgctaacacagcgatcacaaatgcttcggacttaaatacaaaacaaaaagaagcattaaaagcacaagtaacaagtgcaggacgtgtatctgcagcaaatggtgttgaacatactgcgactgaattaaatactgcgatgacagctttaaaacatgccattgctgataaagctgagacaaaagctagtggtaactatgtcaatgctgatgcgaataaacgtcaagcatatgatgaaaaagtgacagctgccgaaaatatcgttagtggcacaccaacaccaacgttaacaccatcagatgttacaaatgcagcaacgcaagtaacgaatgcgaagacgcagttaaacggtaatcataatttagaagtagcgaaacaaaatgcgaacacagcaattgatggtttaacttctttaaatggtccgcaaaaagcaaaacttaaagaacaagtgggtcaagcgacgacgttgccaaatgttcaaactgttcgtgataatgcacaaacattaaacactgcaatgaaaggtctacgagatagcattgcgaatgaagcaacgattaaagcagatcaaaactacacggatgcaagtcaaaacaaacaaactgactacaacaatgcagtcactgcagcaaaagcaatcattggtcaaacaactagtccaacaatgaatgcgcaagaaatcaatcaagcgaaagaccaagtgacagctaaacaacaagcgttaaacggtcaagaaaacttaagaactgcacaaacaaatgcgaagcaacatttaaatggcttaagtgacttaactaatgcacaaaaagatgcagcgaaacgtcaaatcgagggtgcaacgcatgttaatgaagtaacacaagcacaaaataatgcggacgtattaaatacagctatgacgaacttgaaaaatggtattcaagatcaaaatacgattaagcaaggtgttaacttcactgatgcagatgaagcgaaacgtaatgcatatacaaatgcagtgacgcaagctgaacaaattttaaataaagcacaaggtccaaatactgcaaaagacaatgtcgaaactgcgttacaaaatgtacaacgtgctaaaagcgaattgaacggtaatcaaaatgttgcgaatgctaagacaactgcgaaaaatacattgaataaccttacatcaattaataatgcacaaaaagcagcattgaaatcacaaattgaaggtgcgacaacagttgcaggtgtaaatcaagtgtctgccaaagcaactgaattaaatactgcaatgagcaacttgcaaagtggtattaatgatgaagcagctactaaagcagctcagaaatatactgatgcagatagagaaaaacaaactgcatacaatgatgctgtaacagcagctaaaacgttattagataaaacagctggttcaaatgacaataaagcagctgttgaacaagcattacaacgtgtgaatactgctaaaacagcattaaatggtgacgcgcgattaaatgaagcgaagaacacagctaaacaacaattagcgacaatgtcacatttaactaatgctcaaaaagcaaacttaacatcgcaaatcgaacgcggtacgactgttgctggtgttcaaggtattcaagctaatgccggtactttagatcaagcaatgaatcaattaagacaaagtattgcttctaaagatgcgactaaatcaagtgaagattatcaagacgcgaatgcagatttacaaaatgcatacaaccatgcagtatctgatgctgagggtattattagtgcaacgaataatcctgaaatgaatcctgatacaattaaccaaaaagcgagccaagtgaacagtgcgaagtctgcattgaacggtgatgaaaaattagcagcagcaaaacaatctgcgaaaacagatatcggtcatttatcagacttaaacaatgcacaacaaacttccgcaactgctgaagtagataatgcaccaaaccttgcggcggttacatcggctaaaaataaagcaacatcgttaaatacagcgatgggtaatttgaaacatgcacttgctgaaaaggataatacgaaacgtagtgtcaattacacagatgcggatcaaccaaaacaacaagcgtatgatactgcggttacacaagcagaagcaattactaatgctaatggcagcaacgcgaatgaaacacaagttcaagcagcgcttaaccaattgaatcaagctaaaaatgacttgaatggtgataataaagttgctcaagctaaagaagcagcgaaacgtgcattagcttcatatagtaacttgaataatgcgcaatcaaccgcagcaactagtcaaattgacaatgcaacgacagtagcaggcgtaacggctgcacaaaatactgctaatgagttaaatacagcaatgggtcaacttcaaaatggtattaatgaccaaaacactgttaaacaacaagtgaactttacagatgctgaccaaggtaagaaagatgcttacacaaatgctgttacgaatgctcaaggtattttagataaagcacacggtcaaaatatgacaaaagcacaagttgaagcagcactaaatcaagtaacaactgctaagaatgctttaaacggtgacgcaaatgtaagacaagcaaaatcagatgcgaaagcaaacttaggtactttaacacacttaaataatgcacaaaaacaagatttaacatcacaaatcgaaggcgcaacaacagtcaacggtgtaaatggtgttaaaacgaaagcacaagatttagatggtgcaatgcaacgattagagtcagcaatcgcaaataaagatcaaactaaagcgagcgaaaactacatcgacgcatatccaactaagaaaacagcatttgataatgccatcacacaagctgaatcttacttaaataaagatcatggtgcgaataaagataagcaagctgttgaacaagcaattcaaagtgtaacgactgctaagaatgctttaaacggtgacgcgaacttacaacgcgctaaaactgaagctacacaagctatcgataacttgacacatttgaatacaccacaaaaaacagcattaaaacaacaagtgaatgctgcgcaacgtgtatcaggtgtaactgatctgaaaaatagtgctacatcacttaataatgcgatggatcaattaaaacaagcaattgctgatcatgacacaattgtagctggtggtaattacactaacgcgagtcctgataagcaaggtgcttatactgatgcatataatgctgcgaaaaacattgtaaatggttcacctaatgtgattacaaatgcagcagatgttacagcagcaacacaacgtgtcaataatgctgaaacaggtttaaacggtgatacaaacttagcaactgcgaagcaacaagctaaagatgcattacgtcaaatgacacatttatctgatgcacaaaaacaaagtattactggtcaaattgatagcgcgacacaagtaactggcgtccaaagtgtgaaagataatgcaacaaatcttgacaatgcaatgaatcaacttcgaaatagtattgcgaataaagatgaagttaaagcaagtcaaccatatgttgatgcagatacggataaacaaaatgcatacaacacagctgttacaagtgctgaaaatatcattaatgcaacgagtcagccgacacttgatccatctgcagtaacacaagcagctaatcaagtgaacactaacaaaacagcgcttaatggtgcacaaaacttagcgaataaaaagcaagaaacgactgctaacatcaaccaattaagtcatttaaataatgctcaaaatcaagatttaaatacgcaagtgacaaatgcaccaaatattagcacagtaaatcaagtgaaaactaaagctgaacaattagatcaagcaatggaacgtttaatcaacggaatccaagacaaagatcaagtgaaacaaagtgttaactttacagatgcagatccagaaaaacaaacagcatacaacaatgcggtaacggctgctgaaaatattattaatcaagcaaatggtacaaatgcgaaccaatcacaagttgaagcagcactttcaactgtaacaactacgaaacaagcgttgaatggtgatagaaaagtaacagatgctaaaaacaatgcaaaccaaacattatctacgttagataacttaaacaatgcacaaaaaggtgctgttactgaaaacatcaatcaagcgcacactgtagctgaagtaacgcaagccattcaaacagctcaggaactgaatacagcgatgggtaacttgaaaaatagcttgaatgataaagacactacacttggcagtcaaaactttgcagatgctgatccagagaagaaaaatgcatacaatgaagcggttcgaaatgctgaaaatattttaaataaatctacaggtacaaacgtgcctaaagatcaagttgaagcagctatgaatcaagtgaatactacaaaagcagcgcttaatggtactcaaaaccttgaaaaagctaaacaacacgcaaatacagcaattgacggtttaagccatttaacaaatgcacaaaaagatgcattaaaacaattggtacaacaatcgactactgttgcagaagcacaaggtaatgaacaaaaagcaaacaatgttgatgcagcaatggacaaattacgtcaaagtattgcagataatgcgacaacaaaacaaaaccaaaattatactgatgctagtccgaataaaaaggatgcgtacaataatgctgtcacaactgcacaaggtattattgatcaaactacaagtccaactttagatccgaatgttatcaatcaagctgctggacaagtaaacacaactaaaaatgcattaaatggtaatgaaaacctagaggcagcgaaacaacaagcgacacaatcattaggttcattagacaacttaaataatgcgcaaaaacaagctgttactaatcaaattaatggcgcgcatactgttgatgaagcaaatcaaattaaacaaaatgcgcaaaacttaaatacagcgatgggtaacttgaaacaagcgatagctgacaaagatgctacgaaagcaacagttaacttcactgatgcagatcaagcaaaacaacaagcatataacactgctgttacaaatgctgaaaatatcatttcaaaagctaatggtggcaatgcaacacaatcagaagttgaacaagcaatccaacaagttaatgcaacaaagcacagaaagatgcattaa

SEQ ID NO: 8513 - DNA, 9477 bp, Staphylococcus aureus
  CDS (1)...(9477)
atgacacaattaaaacaaggcattgcagataaagaacaaacaaaagctgatggtaactttgtcaatgcagatcctgacaaacaaaatgcatataatcaagcagtagcaaaagctgaagcattaattactggtacgcctgatgtagtcgttacacctagcgaaattactgcagctttaaataaagttacgcaagctaaaaatgatttaaatggtaatacgaacttagcaacggcgaaacaaaatgttcaacatgctattgatcaattgccaaacttgaatcaagcgcaacgtgatgaatacagcaaacaaatcacgcaagcaacacttgtaccaaacgtcaatgctattcaacaagcggcaactacgcttaatgatgcgatgacacaattgaaacaaggtattgcgaataaagcacaaattaaaggtagcgagaactatcacgatgctgatactgacaagcaaacagcatatgacaatgcagtaactaaagcagaagaattgttaaaacaaacaacaaatccaacaatggatccaaatacaattcaacaagcattaacaaaagtgaatgatacaaatcaagcacttaatggtaatcaaaaattagctgatgccaaacaagctgctaagacaaatcttggcacattagatcatttaaatgatgcgcaaaaacaagcgttaacaacacaagttgaacaagcaccagatattgcaacagttaataatgttaagcaaaatgctcaaaatctgaataatgctatgactaacttaaacaatgcattacacgataaaactgagacattaaatagcattaactttactgatgcagatcaagctaagaaagatgcttatactaatgcggttgcacatgcagaaggcattttatctaaagcaaatggcagcaatgcaagtcaaactgaagtggaacaagcgatgcaacgtgtgaacgaagcgaaacaagcattgaatggtaatgacaatgtacaacgtgcaaaagatgcagcgaaacaagtaattacaaatgcaaatgatttaaatcaagcgcaaaaagatgcattaaaacaacaagtcgatgctgcgcaaactgttgcaaatgtgaacacgattaagcaaacagcacaagatttaaatcaagcaatgacacaattgaaacaaggtattgcagataaagaccaaactaaagcaaatggtaactttgtcaacgcagatactgataagcaaaatgcttacaacaatgcggtagcacatgctgaacaaatcattagtggtacaccaaatgcaaacgtggatccacaacaagtggctcaagcgttacaacaagtgactcaagctaagggtgatttaaacggtaaccataacttacaagttgctaaagacaatgcgaatacagccattgatcagttaccaaacttaaatcaaccacaaaaaacagcattaaaagaccaagtgtcacatgcagaacttgttacaggtgttaatgctattaagcaaaatgctgatgcattaaataatgcaatgggtacgttgaaacaacaaattcaagcaaacagtcaagtaccacaatcagttgactttacacaagcggatcaagacaaacaacaagcatataacaatgcagctaaccaagcgcaacaaatcgcaaatggcacaccaacacctgtattgacgcctgatacagtaacacaagcagttacaactatgaatcaagcgaaagatgcattaaacggtgatgaaaaattagcgcaagcgaaacaggatgctttagcaaatcttgatacgttacgcgatttaaatcaaccacaacgtgatgcgttacgtaatcaaatcaaccaagcacaagcgttagctacagttgaacaaactaaacaaaattcacaaaatgtgaatacagcaatgggtaacttgaaacaaggtattgcgaataaagataccgtcaaagcaagtgagaactatcatgatgctgatgccgataagcaaacagcatatacaaatgcagtgtctcaagctgaaggtattatcaatcaaacgacaaatccaacgcttaacccagatgaaataacacgtgcattaactcaagtcactgatgctaaaaatggcttaaacggtgaagctaaattggcaactgaaaagcaaaacgctaaagatgctgtcaatgcaatgacacatttaaacgatgctcaaaaacaagcattaaaaggtcaaatcgatcaatcgcctgaaattgcaacagtaactcaagttaaacaaacagcaacgagcctagatcaagcaatgaatcaattatcacaagctattaatgataagactcaaacgttaacggatggtaattatttaaatgcagatcctgacaaacaaaatgcgtataaacaggccgtagaaaaagctgaagcattattgaataaacaaagtggtactaatgaagtacaagcccaagttgaaagcatcactaatgaagtgaacgcagcgaaacaagcattaaatggtaatgataatttagcgaatgctaagcaacaaccgaaacaacaactggcgaatctaacacacttaaatgatgcacaaaaacaatcatttgaaagtcaaattactcaagcgccactagttacagatgtcactacgataaatcaaaaagcgcaagcgttagatcatgcaatggaattattaagaaatagtattgcggataaccaagcgacattagcgtctgaagattatcatgatgcaactgcgcaaagacaaaatgactataaccaagctgtaacagctgctaaaaacatcattaatcaaacaacgtcacctacgatgaatccagatgaagttaatcgtgcaacgacacaagtgaataacacgaaagttgcattagatggtgatgaaaaccttgcagcagctaaacaacaagcaaacaacagacttaatcaattagatcatttgaataatgcgcaaaagcaacagttacaatcacaaattgcgcaatcatctgatattgctgcagtaaatggtcacaaacaaacagcagaatctttaaatacagcaatgggtaacttaattaatgcgattgcagatcatcaagccgttgaacaacgtggtaacttcatcaatgctgatactgataaacaaactgcttatactacagcggtaaatgaagcagaagccatgattaacaaacaaactggtcaaaatgcgaaccaaccagaagtagaacaagctattactaaagttcaaactacacttcaagcgttaaatggagatcataacttacaagttgctaaaacaaatgcgacgcaagcaattgatgctttaacaagcttaaatgatcctcaaaaaacagcattaaaagaccaagttactgctgcaactttagtaactgcagttcatcaaattgaacaaaatgcgaatacgcttaaccaagcaatgcatggcttaagagaaagtattcaagataacgcagcaactaaagcaaatagcaaatatatcaacgaagatcaaccagaacaacaaaactacgatcaagcagtgcaagctgcaaatagcattatcaatgagcaaacagcgacattagataataatgcgattaatcaagcagcgacaactgtgaatacaacgaaagcagcattacatggtgatgtgaagttacaaaatgataaagatcatgctaaacaaacggttagtcaattagcatatctaaacaatgcacaaaaacatatggaagatacgttgattgatagtgaaacaactagaatagcagttaagcaagatttgactgaagcacaagcattagatcaacttatgaatacattacaacaaagtattgctgacaaagatgcaacacgtgcgagcagtgcatatgtcaatgcagaaccgaataaaaaacaagcatatgatgaagcagttcaaaatgctgagtctatcattgcaggattaaataatccgactatcaataaaggaaatgtatcaagtgcgacacaagcagtgacaacatctaaaaatggtttagatggtgttgaacgattagctcaagataagcaaacagctggaaattctctgaatcatttagatcaattaacaccagctcaacaacaagcgttagaaaatcaaattaataatgcaacaactcgtgataaagtggctgaaatcattgcacaagcgcaagcattaaatgaagcgatgaaagcattaaaagaaagtattaaagatcaaccacaaactgaagcaagtagtaaatttattaacgaggatcaagcgcaaaaagatgcttatacgcaagcagtacaacacgcgaaagatttgattaacaaaacaactgatcctacattagttaaatcagtaattgatcaagcaacacaagcagtgaatgacgctaaaaacaacttacatggtgatcaaaaattagctcaagataagcaacgtgcaacagaaacgttaaataacttgtctaacttgaatacaccacaacgtcaagcacttgaaaatcaaatcaataatgcagcaactcgtggcgaagtagcacaaaaattaactgaggcacaagcacttaaccaagcaatggaagcattacgtaatagcattcaagatcaacagcaaacagaagcgggtagcaagtttatcaatgaagataagccacaaaaagatgcataccaagcagcagtacaacatgccaaagatttgattaatcaaactagcaatccaacgcttgataaagcacaagttgaacaattgacacaaggtgttaaccaagctaaagataacctacatggtgatcaaaaacttgcagacgataaacaacatgcagttactgatttaaatcaattaaatagtttaaataatccgcaacgtcaagctcttgaaagtcaaataaacaacgcagcaactcgtgatgaagtagcgcaaaaattagctgaagcacaagcgcttgatcaagcaatgcaagcattacgtaatagtattcaagatcaacaacaaacagaatctggtagcaagtttatcaatgaagataagccacaaaaagatgcataccaagcagcagtacaacatgccaaagatttaattaaccaaacaggtaatccaacactcgataaatcacaagttgaacaattaacacaagcagtaacaactgcaaaagataacctacatggtgatcaaaaacttgctcgtgatcaacaacaagcagtaacgactgttaatgcattaccaaacttaaatcatgcgcaacaacaagctttaactgatgctataaatgcagcgcctacaagaacagaggttgcacaacatgttcaaactgctactgaacttgatcacgcgatggaaacattgaaaaataaagttgatcaagtgaatacagataaggctcaaccaaattacactgaagcgtcaactgataaaaaagaagcagtagatcaagcgttacaagctgcagaaagcattacagatccaactaatggttcaaatgcgaataaagacgctgtagaacaagcattaactaagcttcaagaaaaagtaaatgagttaaatggtaatgagagagtcgctgaagctaaagcacaagcgaaacaaactattgaccaattagcacatttaaatgctgatcaaattgcaactgctaaacaaaacattgatcaagcgacgaaacttcaaccaatcgctgaattagtagatcaagcaacgcaattgaatcaatctatggatcaattgcaacaagcagtcaatgaacatgctaacgttgagcaaactgtagattacacgcaagcagattcagataagcaaaatgcttataaacaagctattgcagaagctgaaaatgtattaaaacaaaattcgaataagcaacaagtggatcaagcacttcaaaacattttaaatgcaaaacaagcattaaatggtgatgaacgtgtagcacttgctaaaacaaatggtaaacatgacatcgaccaattgaatgcattaaacaatgctcaacaagatggatttaaaggtcgcatcgatcaatcacacgatttaaatcaaatccaacaaattgtagatgaggctaaggcacttaatcgtgcaatggatcaattgtcacaagaaatctctggcaatgaaggacgcacgaaaggtagcacgaactatgtcaatgcagatacacaagttaaacaagtgtatgatgaagcggttgataaagcgaaacaagcacttgataaatcgacaggtcaaaacttaactgcagaacaagttatcaaattaaatgatgcagtcactgcagctaagaaagcattaaatggtgaagaaagacttaataatcgtaagtctgaagcattacaaagattggatcaattaacacatctaaacaatgctcaaagacaattagcaatccaacaaattaataatgctgaaacgctaaataaagcatctcgagcaattaatagagcgactaaattagataatgcaatgggtgcagtacaacaatatattgacgaacagcaccttggtgttatcagcagcacaaattacatcaatgcagatgataatttgaaagcaaattatgataatgcaattgcgaatgcagcacatgagttagataaagtgcaaggtaatgcaattgcaaaagctgaagcagagcaattgaaacaaaatattatcgatgctcaaaatgcattaaatggagaccaaaaccttgcaaatgccaaagataaagcaaatgcgtttgttaattcgttaaatggattaaatcaacagcaacaagatcttgcacataatgcaattaacaatgctgatactgtatcagatgtaacagatattgttaataatcaaattgacttaaatgatgcaatggaaacattgaaacatttagttgacaatgaaattccaaatgcagagcaaactgtcaattaccaaaacgctgacgataatgctaaaacaaacttcgatgatgctaaacgtctagcaaatacattgctaaatagtgataacacaaatgtgaacgatatcaatggtgcaattcaagcagtcaaagatgcaatccaaaatcttaacggtgagcaacgtctacaagaagctaaggacaaagcaattcaaaatgttaacaaagtattagcagataaattgaaagaaatcgaagcttcaaacgcgacggatcaagacaagcttattgcgaaaaataaagcagaagaattggcaaacagcatcattaataacattaataaagcaacaagtaatcaggatgtatctcaagttcaaacagctggcaaccaagcgattgaacaagtgcatgccaatgaaataccgaaagctaaaattgatgcaaataaagatgttgataagcaagttcaagcattaattgatgaaatcggtcgaaatccaaatctaacagataaggaaaaacaagcactcaaagatcgaatcaatcaaatacttcaacaaggtcataacgacattaacaatgcactgactaaagaagcaattgaacaagcaaaagagcgtttagcacaagcattacaagacatcaaagatttagtgaaagctaaagaagatgcgaaaaataaaataaaagccttagctaatgcgaagcgtgatcaaatcaattcaaatccagatttaacacctgagcaaaaagcaaaagcgctcaaagaaattgacgaagctgaaaaacgagcactacaaaacgttgagaatgctcaaactatagatcaattaaatcgaggattaaacttaggtttagatgacattagaaatacgcatgtatgggaggttgacgatcaacctgctgtaaatgaaatttctgaagcaacacctgaacaattgcttgttaatggtgaactaatcgtacatcgtgatgacatcattacagagcaagatgttttagcacacattaacttaatagatcagcttacagcagaagttatcgatacaccatcaactgcaacgatttctgatagcttaacagcaaaagttgaagttacattgcttgatggatcaaaagtgattgttaatgttcctgtaaaagttgtagaaaaagaattgtcagtagtcaaacaacaggcaattgaatcaattgaaaatgcggtacaacaaaagattaatgaaatcaataatagtgtgacattaacactggaacaaaaagaagcagcaattgccgaagttaataagcttaaacaacaagcaattgatcatattaacaatgcacctgatgttcattcagttgaagaaattcaacaacaagaacaagcgcatattgaacaatttaatccagaacaatttacgattgaacaagcaaaatcaaatgcaattaaatcgattgaagatgcaattcaacatatgattgatgaaatcaaagctcgtactgatctaacagataaagagaagcaagaagctattgctaagttaaatcaattaaaagaacaagcaattcaattgattcaacgtgcgcaaagcatcgatgaaataactgagcaattggaacaatttaaagctcaaatgaaagcagctaatccaacagcaaaagaactagctaaacgcaagcaagaagctattagtaaaattaaagacttttcaaatgaaaaaatgaatagtattcgaaatagtgaaattggcacagctgatgaaaaacaagcagcaatgaatcaaattaacgaaattgtgcttgaaacaattagagatattaataatgcgcatacattacagcaagttgaggctgcattgaacaatggtattgctcgaatttcagcagtacaaattgtaacatctgatcgtgctaaacaatcatcaagtactggaaatgaatctaatagccatttaacaattggttatggaactgcaaatcatccatttaacagttcgactattggacataaaaagaaacttgatgaagatgatgacattgatccacttcatatgcgtcactttagtaataatttcggtaatgttattaaaaacgctattggtgtggtgggtatctctggcttactagctagtttctggttcttcattgccaaacgtcgtcgtaaagaagatgaagaggaagaattagaaataagagataataataaagattcaataaaagagactttagacgatacaaaacatttaccacttttatttgcgaaacgtcgcagaaaagaagatgaagaagatgttactgttgaagaaaaagattcgttaaatactggcgagtcactcgataaagttaaacatacgccgttcttcttaccaaaacgccgtcgtaaagaagatgaagaagatgtggaagttacaaatgaaaacacagatgaaaaagtgttgaaagataacgaacattcaccactcttaatcgcaaaacgacgcaaagataaagaggaagatgttgaaacaacaactagtattgaatctaaagatgaggacgttcctttattattggctaaaaagaaaaatcaaaaagataaccaatccgaagacaaaaagtcagcatcaaaaaatacttctaaaaaggtagcagctaaaaagaagaaaaagaaatctaagaaaaataaaaaataa

SEQ ID NO: 8514 - DNA, 480 bp, Staphylococcus aureus
  CDS (1)...(480)
atgactttatccattctagttgcacatgacttgcaacgagtaattggttttgaaaatcaattaccttggcacctaccaaatgatttgaagcatgttaaaaaattatcaacaggtcatactttagtaatgggtcgtaagacatttgaatcgattggtaaaccactaccgaatcgtcgaaatgttgtacttacttcagatacaagtttcaacgtagagggcgttgatgtaattcattctattgaagatatttaccaactaccgggccatgttttcatatttggagggcaaacattatttgaagaaatgattgataaagtggacgacatgtatattactgttattgaaggtaaattccgtggtgatacgttctttccaccttatacatttgaagactgggaagttgcctcttcagttgaaggtaaactagatgaaaaaaatacaattccacatacctttctacatttaattcgtaaaaaataa

SEQ ID NO: 8515 - DNA, 519 bp, Staphylococcus aureus
  CDS (1)...(519)
gtgacgtacatgatccgtctaggtaaaatgtcagatttagatcaaatcttaaatctagtagaagaagcaaaagaattaatgaaagaacacgacaacgagcaatgggacgatcagtaccctcttttagaacattttgaagaagatattgctaaagattatttgtacgtattagaggaaaatgacaaaatttatggctttattgttgtcgaccaagaccaagcagaatggtatgatgacattgactggccagtaaatagagaaggtgcctttgttattcatcgattaactggttcgaaagaatataaaggagctgctacagaattattcaattatgttattgatgtagttaaagcacgtggtgcagaagttattttaacggacacctttgcgttaaacaaacctgcacaaggtttatttgccaaatttggatttcataaagtcggtgaacaattaatggaatatccgccatatgataaaggtgaaccattttatgcatattataaaaatttaaaagaatag

SEQ ID NO: 8516 - DNA, 1071 bp, Staphylococcus aureus
  CDS (1)...(1071)
atgacgaaaatcgcatttaccggagggggaacagttggacacgtatcagtaaatttaagtttaattccaactgcattatcacaaggttatgaagcgctttatattggttctaaaaatggtattgaaagagaaatgattgaatcacaactaccagaaattaagtattatcctatttcgagtggtaaattaagaagatatatttctttagaaaatgccaaagatgtatttaaagtattgaaaggtattcttgatgctcgtaaagttttgaaaaaagaaaaacctgatctattattttcaaaaggtggttttgtatctgtgcctgttgttattgcagccaaatcattaaatataccaactattattcatgaatctgacttaacaccaggattagcgaataagatagcacttaaatttgccaagaaaatatatacaacatttgaagaaacgctaaactacctacctaaagagaaagctgattttattggagcaacaattcgagaagatttaaaaaatggtaatgcacataatggttatcaattaacaggctttaatgaaaataaaaaagttttactcgttatgggtggaagtttaggaagtaaaaaattaaatagcattattcgcgaaaacttagatgcattattacaacaatatcaagtgatacatttaactggtaaaggattaaaagatgctcaagttaaaaaatcaggatatatacaatatgaatttgttaaagaggatttaacagatttattagcaattacggacacagtaataagtagagcaggatcaaatgcgatttatgagttcttaacattacgtataccaatgttattagtaccattaggtttagatcaatcccgaggcgatcaaattgacaatgcaaatcattttgctgataaaggttatgctaaagcgattgatgaagaacaattaacagcacaaattttattacaagaactaaatgaaatggaacaagaaagaactcgaattatcaataatatgaaatcgtatgaacaaagttatacgaaagaagctttatttgataagatgattaaagacgcattgaattaa

SEQ ID NO: 8517 - DNA, 2799 bp, Staphylococcus aureus
  CDS (1)...(2799)
atgactaacgaaagaaaagaagtttcagaggctcctgtaaacttcggtgcgaatttaggtctaatgttagatctatatgatgactttttacaagatccatcatctgtaccagaagatttacaagtcttattcagcacaattaagaatgatgactcaattgtaccagctttaaaaagtacaagtagtcaaaatagcgacggcacaattaagcgtgtcatgcgtttaattgataatattcgccaatacgggcatcttaaagccgatatttatcctgtaaatcctccgaaaaggaaacatgtacctaaattagagattgaagactttgatttagatcaacagactttggaaggtatatcagcaggaattgtttcagatcactttgccgacatttatgataatgcttatgaagcaattttaagaatggaaaaacgttacaaaggaccgattgcatttgagtatacgcatattaataacaataccgaacgtggttggttaaaaagaagaattgaaacgccatataaagtaacgttaaataataacgaaaaaagggcactatttaaacaattagcgtatgttgaagggtttgaaaaatatcttcataaaaacttcgttggtgcaaagcgtttttcaattgaaggggtagacgcacttgtaccgatgttacaacgtactattacgattgctgcgaaagaaggtattaaaaatatacaaataggcatggctcaccgtggacgtttaaacgttttaacgcatgtcttagaaaaaccgtacgaaatgatgatttcagaatttatgcatacagatccaatgaaattcttacctgaagatggtagtttgcagttaactgctggatggactggtgatgtgaaatatcaccttggtggtattaaaactactgattcatacggtacaatgcagcgtattgcactggctaacaatccaagtcacttggaaattgttgcacctgttgttgaagggcgtacgagagcagcacaagatgatacacagcgtgctggggctccgacgactgatcatcataaagcaatgccaattattatacacggcgatgctgcttatcctggtcaaggaattaacttcgaaacaatgaatttaggaaacttgaaaggctattctacgggtggctcattgcatattattactaacaatagaattggatttactacagaaccaattgatgcacgttcaacaacttattctacagatgtggctaaaggttatgatgtgccaatattccatgtcaatgctgatgacgttgaagctactattgaagcaattgatattgcaatggaatttagaaaagagtttcataaagacgtcgttattgatttagtaggttatcgtcgtttcggacataacgaaatggatgaaccatcaattactaatccagttccttatcagaatattcgcaaacatgactctgttgaatatgtgtttggtaaaaagcttgttaatgaaggtgtcatttcagaagatgaaatgcattcatttatagaacaagtccaaaaggaactaagagaagctcatgataaaattaataaagctgataaaatggataatccagatatggaaaaacctgcagaacttgcattaccgttacaagcagacgaacaatcatttacgtttgatcacttgaaagaaataaatgatgcattgttaacatatccggatggctttaacattttgaaaaagttaaacaaagttcttgagaaacgtcatgagccgtttaataaagaagatggtttagttgattgggcacaagcagaacaacttgcatttgcgacaattttacaagatggtacaccgattcgcttaactggtcaagatagtgaacgtggtacattcagtcataggcatgccgtgttacatgatgagcaaacaggtgaaacatatacacctttacatcatgttcctgatcaaaaagcgacatttgatatacacaattctccgctttcagaagcagcagtagttggttttgaatacggttataatgtggaaaacaaaaaaagcttcaatatttgggaagcacaatatggtgattttgcaaatatgtcacaaatgatttttgacaacttcttattcagttctcgctcaaaatggggagaacgttcaggattaacattattcttacctcatgcatatgagggtcaaggacctgaacattcatcagcaagattagagaggtttttacaattagctgctgaaaataattgcacagttgtcaacttatctagttcaagtaattatttccacttattgcgtgcacaagcggctagtttagattctgaacaaatgcgaccattggttgttatgtcgccaaaaagcttgctgagaaataaaacagttgcaaaaccaattgatgaatttacttctggtggatttgagccaattttgacagaatcatatcaagcggataaggttacaaaagttattttagcaactggtaaaatgttcattgatttaaaagaagcattagctaaaaatccagacgaatcagttttactcgttgcgattgaaagattgtatccattcccagaggaagagattgaagcattactagcacaattgccaaaccttgaagaagtgtcatgggtacaagaagaacctaaaaatcaaggtgcctggttatatgtttatccatatgttaaagtactagttgcagataaatatgatttaagttatcatggcagaattcaaagggctgctccagctgaaggtgatggagaaattcataaacttgttcaaaataaaattatagaaaatgcattaaaaaataactag

SEQ ID NO: 8518 - DNA, 1887 bp, Staphylococcus aureus
  CDS (1)...(1887)
atgagtgatcgtttcataaaatttaacgacgaacagttagatgccaagcaagtaatgatgttgcaagacttagctcgactcttattaaaaaatgaacaaacacaagttaaaatccaaaaattcccttactataatcctgttcaaaatgttttgattacgagttggttttggtcacatcgaccaagccatatcgaaatggctggtttaaaaacagatgttatgttagctgcttacggttatcatatgatggatgtacaaattgtaaatgaagtagtacaagataaaacttttaaacaccctaaattttatcaacaactttttaaattattagaagatatgcgcgtattaaattctattaaaattgagcgcccaagtactgctaaattaattgatcttcgcttagatacacggatatcatatacggaatctcaaattaaagtgtatcgtactaaaacacaatatacagatttattatttttgtatttagaacatgcatttttaagtcaagatttctttgatataccatctatacattcagatttagatgatattttagttaatatgttcttatatttacctaattttttccaaaatcaaaattctgaagataatatgtatctggctcaaagaattatgtatcaagtagatgatattttaaaagaagatatgctaaacgaatattattacttacctaaaacactatataatacattagctagtccagagtttgaagatttaaagagaactgatgcaagtcaagttgatggggaagatgatacttcagaagatgataataacgaaagtgaaaaagctgactctaaatctgcagatagtgagtcaaaaggtggcgcttatttagaaatggagcttcacgaaggacaaaatagtgaaacattgggtaatgatgaagcacgtgaaggcgatgctacagacgatatgactgatatgatgaccaaaaagggcaaaggatcaaacgatacgctaaatcgtgaagaaggcgatgctgttggtcaaagccaggcatttcaacttgatggtgtgaacaaaaatgtagaaataaaatggcaaattcctgaaattgagccacaatatgttttagaatatcaagaatcgaaacaagacgtacaatatgaaatcaaagacttaattcaaattataaagaaaacgattgaacgagaacaacgagatgcacgttttaatttaacaaaagggcgattacaaaaggatttaattaattggtttatcgacgatcaatataaattgttttacaaaaaacaagatttaagtaaatcatttgatgcgacgtttacattgttaattgatgcgtcagcaagtatgcatgataaaatggctgaaacgaagaaaggtgtagtgttattccacgagacgttaaaagcattgaacattaaacatgaaattttatcattcagtgaggatgcctttgattcagacgatcatgcgcaaccaaatatcattaatgaaattattaactatgattactcaacctttgaaaaagatggcccacgtattatggcacttgaacctcaagatgataatcgtgatggtgttgctattagagttgcaagtgaacgattaatgcgtcgaaatcaacatcaacgatttttaatcgtattttctgacggcgaaccgtctgcatttaattatagtcaagatggtattattgatacgtatgaagctgtagaaatgtcacgtaaatttggcattgaagtatttaatgtatttttgagtcaagatccaataactgaagatgttgaacaaacaattcataatatttatggtcaatatgccattttcgttgaaggtgttgcgcatttacctggacatctctctccattattaaaaaaattactacttaaatctttataa

SEQ ID NO: 8519 - DNA, 3198 bp, Staphylococcus aureus
  CDS (1)...(3198)
atggtggcatatttaaatattcatacggcttatgatttgttaaattcaagcttaaaaatagaagatgccgtaagacttgctgtgtctgaaaatgttgaagcacttgccataactgacaccaatgtattgtatggttttcctaaattttatgatgcatgtatagcaaataacattaaaccgatttttggtatgacaatatatgtgacaaacggtttaaacactattgaaaccgttgttttagcaaaagataataatgggttgaaggatttatatcaactttcatcgaaaataaaaatgaattcaatggaaaatgtttcatttgaactattgcaacaattttcatcgaatttgattatcatttttaaaaatgttgcagacgaacatcgtgacattgttcaagtttttgattcgcatgaagatacgtatttagatcatcgaagtgttttagttcagggtgtaaagcacgtatggattcaaaatgtttgttaccaaacatgtcaagatgccgatacgatttctgcattagcagctattagagacaatacaaaattagacttaattcatgatcaagaagattttggtgcacattttttaactgaaaaggaaattaagcaattagaaattaatcaagaatatttaacgcaggttgatgttatagctcaaaagtgtaatgcagaattaaaatatcatcaatctctacttcctcaatatcagacacctaatgatgaatcagctaaaaaatatttgtggcgtgtcttagttacacaattaaaaaaattagaacttaattatgacgtctatttagagcgattgaaatatgagtataaagttattactaatatgggttttgaagattatttcttaatagtaagtgatttaatccattatgcgaaaacgaatgatgtgatggtaggtccaggtcgtggttcttcagctggctcactggtcagttatttactaggtattacaacgattgatcctattaaattcaatctattatttgaacgttttttaaacccagaacgtgtaacaatgcctgatatagatattgactttgaagatacacgccgagaaagggttattcagtacgtccaagaaaaatatggcgagctacatgtatctggaattgtgactttcggtcatctgcttgcaagagcggttgctagagatgttggacgaattatggggtttgatgaagttacattaaatgaaatttcaagtttaatcccacataaattaggaattacacttgatgaagcatatcaaattgacgattttaaaaagtttgtacatcgaaaccatcgacatgaacgctggttcagtatttgtaaaaagttagaaggtttaccaagacatacatctacacatgcggcaggaattattattaatgaccatccattatatgaatatgcccctttaacgaaaggggatacaggattattaacgcaatggacaatgactgaagccgaacgtattggtttattaaaaatagattttctagggttgagaaacttatcgattattcatcaaatcttgacacaagtcaaaaaagatttaggtattaatattgatatcgaaaaaattccgtttgatgatcaaaaagtgtttgatttgttgtcgcaaggagatacgactggcatattccaattagagtctgacggtgtaagaagtgtattaaaaaaattaaagccggaacactttgaagatattgttgctgtaacttctttgtatagaccaggtccaatggaagaaattccaacttatattacaagaagacatgatccaagcaaagttcaatatttacatccacatttagaacctatattaaaaaatacttacggtgttattatttatcaagagcaaattatgcaaatagcgagcgcatttgcaaacttcagttatggtgaagcggatattttaagaagagcaatgagtaaaaaaaatagagctgttcttgaaagtgagcgtcaacattttatagaaggtgcaaagcaaaatggttatcacgaagacattagtaagcaaatatttgatttgattctgaaatttgctgattatggttttcctagagcacatgctgtcagctattctaaaattgcatacattatgagctttttaaaagtccattatccaaattatttttacgcaaatattttaagtaatgttattggaagtgagaagaaaactgctcaaatgatagaagaagcaaaaaaacaaggtatcactatattgccaccgaacattaacgaaagtcattggttttataaaccttcccaagaaggcatttatttatcaattggtacaattaaaggtgtaggttatcaaagtgtgaaagtgattgttgatgaacgttatcagaacggcaaatttaaagatttctttgattttgctagacgtataccgaagagagtcaaaacgagaaagttacttgaagcactgattttagtgggagcgtttgatgcttttggtaaaacacgttcaacgttgttgcaagctattgatcaagtgttggatggtgatttaaacattgaacaagatggttttttatttgatattttaacgccaaaacagatgtatgaagataaagaagaattgcctgatgcacttattagtcagtatgaaaaagaatatttaggattttatgtttcgcaacacccagtagataaaaagtttgttgccaaacaatatttaacaatatttaaattgagtaacgcgcagaataataagcctatattagttcagtttgataaagttaaacaaattcgaactaaaaatggtcaaaatatggcattcgtcacattaaatgatggcatcgaaactttagatggtgtgattttccctaatcagtttaaaaagtacgaagcgttgttatcacataatgacttgtttatagtcagcgggaaatttgaccatagaaagcaacaacgtcaactaattataaatgagattcaaacattagccacttttgaagaacaaaaattagcatttgccaaacaaattataattagaaataaatcacatatagatatgtttgaagagatgattaaagctacgaaagagaatgctaatgatgttgtgttatccttttatgatgaaacgattaaacaaatgactactttaggctatattaatcaaaaagatagtatgtttaataattttatacaatcctttaaccctagtgatattaggcttatataa

SEQ ID NO: 8520 - DNA, 858 bp, Staphylococcus aureus
  CDS (1)...(858)
atgtttaaagatttttttaatcgaacaaagaaaaagaaatatcttacagtacaagactctaaaaataatgatgtgcctgcaggtattatgactaagtgtccaaagtgtaagaaaattatgtacacaaaagaattagctgaaaatttaaatgtgtgctttaattgtgatcatcatattgctttaactgcgtataaacgtatagaagcaatttctgatgaaggatcatttacagaattcgataagggaatgacctctgcgaatccattagattttccaagttatatagaaaaaattgaaaaggaccaacaaaagacaggtcttaaagaagcagtagtgactggtacagcgcaactagatggtatgaaatttggcgttgctgtcatggattcacgttttagaatgggaagtatgggatcggttatcggtgaaaagatatgtcgcatcattgattactgcactgagaaccgtttaccatttattcttttctctgcaagtggtggtgcacgtatgcaagaaggtattatttccttgatgcaaatgggtaaaaccagtgtatctttaaaacgtcattctgacgctggactattatatatatcatatttaacacatccaactactggtggtgtatctgcaagttttgcatcagttggtgatataaatctaagtgagccaaaagcgttgataggttttgcaggtcgtcgagttattgaacagacaataaacgaaaaattgccagatgatttccaaactgcagaatttttattagagcatggacagttggataaagttgtacatcgtaatgatatgcgtcaaacattgtctgaaattctaaaaatccatcaagaggtgactaaataa

SEQ ID NO: 8521 - DNA, 969 bp, Staphylococcus aureus
  CDS (1)...(969)
atgaagaaaattgcagttttaactagtggtggagattcacctggaatgaatgctgccgtaagagcagttgttcgtacagcaatttacaatgaaattgaagtttatggtgtgtatcatggttaccaaggattgttaaatgatgatattcataaacttgaattaggatcagttggggatacgattcagcgtggaggtacattcttgtattcagcaagatgtccagagtttaaggagcaagaagtacgtaaagttgcaatcgaaaacttacgtaaaagagggattgagggccttgtagttattggtggtgacggtagttatcgcggtgcacaacgcatcagtgaggaatgcaaagaaattcaaactatcggtattcctggtacgattgacaatgatatcaatggtactgattttacaattggatttgacacagcattaaatacgattattggattagtcgacaaaattagagatactgcgtcaagtcacgcacgaacatttatcattgaagcaatgggccgtgattgtggagatctagcattatgggctggattatcagttggtgctgagacaattgtagttccagaagtgaaaacagatattaaagaaatagctgataaaattgaacaaggtattaaacgtggtaagaaacactcaatcgttcttgtagcagaaggttgtatgactgcgcaagattgtcaaaaagaattatcacaatacatcaatgttgataatagagtgtctgtgttaggtcacgttcaacgtggtggtagcccaacaggtgcggatagagttttagcatcacgtttaggtggatatgcggtagacttattaatgcaaggtgaaacagctaagggtgttggaattaagaacaataaaattgtagcaacatcttttgatgaaatttttgatggtaaagatcataaatttgattatagtctatatgaacttgctaacaagttatctatataa

SEQ ID NO: 8522 - DNA, 1758 bp, Staphylococcus aureus
  CDS (1)...(1758)
atgagaaaaactaaaattgtatgtacaattggaccagcttcagaatcagaagaaatgattgagaaattaatcaatgctggtatgaacgttgcacgattaaacttttcacatggtagtcatgaagagcataaaggtagaattgatacaattcgtaaagtagctaaaagattagacaaaattgtagcaattctattagatacgaaaggtccagaaattcgtacgcataatatgaaagacggtatcattgaacttgaacgtggtaacgaagttattgttagcatgaatgaagttgaaggaacacctgaaaagttctcagtaacatatgaaaacttaattaacgatgttcaagtaggttcatacattttacttgatgatggcttaattgaattacaagttaaagatattgatcatgctaaaaaagaagttaaatgtgatattttaaactcaggtgagcttaaaaacaaaaaaggtgttaacttacctggtgtaagagtaagtttacctggtattacagaaaaagatgctgaagatatccgtttcggtattaaagaaaatgttgacttcattgcagcaagtttcgtacgtcgtcctagtgatgttttagaaattcgtgaaattttagaagaacaaaaagctaacatttcagtattccctaaaattgaaaaccaagaaggtattgataatattgcggaaattcttgaagtgtctgatggtttaatggttgcacgtggtgacatgggtgttgaaattccacctgaaaaagtaccaatggttcaaaaagatttaatcagacaatgtaacaaattaggtaaaccagttattacagctacacaaatgttagattctatgcaacgtaacccacgtgctacacgtgcagaagctagtgacgttgccaacgcaatctatgatggtacagatgcagtaatgttatctggtgaaactgctgctggtttatatcctgaagaagctgttaaaacaatgagaaatattgctgtatcagctgaagcagcccaagattacaaaaagttattgtcagatcgtactaaattagttgaaacttcattagtgaatgctatcggtatttcggttgcacatacagctttaaacttaaatgttaaagcaattgtagctgctactgaaagtggttcaacggcacgtactatctctaaatatcgtccgcattcagacattattgcagtgactccaagtgaagaaactgcacgtcaatgttcaattgtttggggtgttcaacctgtagttaaaaaaggacgtaagagtacagatgcattgttaaacaatgcagttgcaacagctgttgaaactggtagagtaactaatggtgatttaatcattattactgctggtgtaccaactggtgaaactggaactactaatatgatgaaaatccacctagttggtgacgaaattgctaatggtcaaggtattggacgtggttcagttgttggtactacgttagttgctgaaactgttaaagatttagaaggtaaagatttatctgacaaagttatcgttactaactcaatcgatgaaacgtttgtaccttatgtagaaaaagctttaggcttaattacagaagaaaatggtattacatcaccaagtgcaattgttggtttagaaaaaggtattccaacagttgtaggtgtagaaaaagctgttaaaaacataagcaataacatgttagttacgattgatgctgctcaaggtaaaatctttgaaggatatgcaaacgtactataa

SEQ ID NO: 8523 - DNA, 1122 bp, Staphylococcus aureus
  CDS (1)...(1122)
atggcagaattacaaagaggtttagaaggggttatcgcagcggagactaaaataagttcaattattgaaagtcaattgacttatgccggctatgatattgatgatctagctgaaaatgcgcaatttgaagaagttattttcctattatggaactatagattgccaaacgaagaagagcttgctcatctaaaagggaaattaaatcaatacatgacattaaatcctcgtgtgtatacacattttgaggagtatgttacagatcacgtgcatccaatgacagcattacgtacgtcgttatcatatattgcacatttcgatcctgatgctgaaaatgaatcagatgaaaatcgttatgaaagagcaatgcgtatacaggctaaagtagcatcattagttacagcgtttgctcgagtaagacaagataaagaaccacttaagcctaatcctgacttaagttatgcggcaaacttcctatatatgttacgtggggaattaccaacagatatagaagttgaagccttcaataaagcacttattttacacgctgatcatgagttgaacgcatctgcatttacagcacgttgtgcggtatcatcattgtcagatatgtactcaggtattgtagcagctgtaggttctctgaaagggccattacatggtggtgcaaacgaacaagttatgacgatgttatctgagattgggtcaattgaaaatgttgatgcttacttagacgaaaaatttgctaataaagataaagtaatgggcttcggtcatcgtgtatataaagatggcgatcctagagcgaaatatttaagagaaatgagccgtcaaattacgaaagacgctggtcgtgaagaattatttgaaatgtcagtgaaaatggaaaaacgtatggcagaagaaaaaggattaattcctaatgttgatttttatagtgcgagtgtttatcactgtatggaaatacctcatgacttattcacgccaatctttgctgtaagtcgttctgcaggatggattgctcatattttagaacaatataaagacaatagaattatgcgtcctagagcgaaatatattggagaaacgaatcgtaagtatatcccgcttgaagaaagaaaataa

SEQ ID NO: 8524 - DNA, 1269 bp, Staphylococcus aureus
  CDS (1)...(1269)
atgactgcagaaaaaattactcaaggaactgaaggattaaacgtacctaacgaaccaattatcccatttattatcggtgatggaattggaccggatatttggaaggcagcaagccgagttatagatgctgctgttgagaaagcctataatggcgaaaaacgcattgaatggaaagaagtgctagctggccaaaaagcatttgatacaactggcgaatggttacctcaagaaacacttgatacaattaaagaatatttaattgctgttaaaggacctttaacaacaccaattggtggtggtattagatcattaaatgtagctttacgccaagaattagatttatttacttgtttaagaccggtacgttggtttaaaggagtaccatcacctgttaaacgtccacaagatgttgatatggttattttccgtgaaaatactgaagacatttatgctggtattgaatttaaagaaggtacaacagaagttaaaaaggtaattgacttcttacaaaacgaaatgggtgcgacaaacattcgattcccagaaacttcaggtattggtattaaaccagtttctaaagaaggtactgagcgattagttagagcagctattcaatatgctatcgataataaccgtaaatcagttactttagttcataaaggtaatattatgaaatttacagaaggctcatttaagcagtggggttacgatttagcattaactgaatttggtgatcaagtattcacttggcaacaatatgacgaaattgttgaaaatgaaggcagagatgctgctaatgctgcacaagaaaaagctgaaaaagaaggcaagattatcattaaagattctattgctgacattttcttacaacaaattttaactcgcccagctgagcatgatgttgtagcaactatgaacttgaatggtgactatatttcagatgctttagctgcacaagttggtggtattggtattgcgccaggtgcaaacattaattatgaaacaggtcatgctatttttgaagcaacacatggtacagctccaaaatatgcaggtttaaataaagtgaatccatcttcagtaattttaagttctgtattaatgttagaacatttaggatggcaagaagcggcagataagattacagattcaattgaagatacaattgcttcaaaagttgttacttatgactttgcccgtttaatggatggtgctgaagaagtttctacatcagcatttgcagatgaattgattaaaaatttaaaataa

SEQ ID NO: 8525 - DNA, 2631 bp, Staphylococcus aureus
  CDS (1)...(2631)
gtgaataaattagtattaatcgatggtaatagcttaagttttagagctttttatgcattacctttgttatcaaacaaagcaggcattcataccaatgcagtatatggttttgcaatgttactagagaagattttaaaagaagaaaagccaaatcattttttagtagcgtttgatgcaggtaaaacgactttcagacatgaaaaatatagtgaatataaaggtggacgccagaaaacgccgcctgaactaagtgagcaatttccttatatacgccaattattagatgcttatcatattaaacgttatgaattagataactatgaggcagatgatattatcggaactttaagtaaagaagcagataaagcgggctttcagacaattattattacgggagaccgagatttaacacaacttgctacggataatgtaaccatttattacactaaaaaaggtgttactgatgttgatcattatacacctgactttattgcggaaaaatacaacgggctaacacctaatcaaattattgatatgaaaggattaatgggagatacttctgataatataccaggtgttgcaggtgttggagagaaaacagcaataaaattgctgaaccaatttgacacagtagaaggtgtctatgaacatttagatgaaatttcaggtaaaaagttaaaagaaaaacttcaaaatagcaaagaagatgcattaatgagtaaagaattagcaacgattaatgtagatagtccgattgaagtaaaacttgaagatacgttaatgactcatcaagatgaacaacaagaaaaaatcgaattgtttaagaagttagaattcaaacaattgttggctgacattgatcaatcagcaagcgttgaagatgcaatagaaaagacatttgaaattgaaacgtcatttgataatgttgattttacttcattgaaagaagcggtcatccatttcgaattagacggtggtaactatttgcgaaataatattttaaaattctctttatttacaggtgaaaaacatattgtaattaatgcggatgacataaataattatgccgaactagtttcgtggttagaaaatccgaatacgaaaaaagtcgtatatgatgctaaaaaaacatatgtagcatcacatagattaggaattgatattcaaaatatttcattcgatattatgttggccagttatataattgatccatctcgtacgattagcgatgttcaatcagttgtttcattgtacggtcaaagttttgtgaaagacgatgtgagtatatatggaaaaggtaagaaatttaaggtgcctgaagatgatgttttaattccatatgttgcttctattactgatgcaatttactttgcgaaaccaaatatggataaacaattagaagaatacaatcaggtagaactcttagctgatttagagctaccgctagctaagattttaagtgaaatggaagaaattggtatatttacagatgttcatgatttagaagaaatggaaaaagaaattcaagaaaaattagacgtcttgattcgaaatatccatgatgtagctggtgaagattttaatataaattctcctaagcaattaggtgttgtattgtttgaaacattacaattacctgttattaaaaagacgaaaacaggatattctactgctgtagatgtcttagagcaattgcaaggtgaacatcctatcattgattatattttagaatatcgtcaattatctaagttacagtctacttatgttgaaggattgcaaaaggtgattagtgatgatcaacgtatccatacacgttttaaccaaactttagcgcaaactggacgtttatcaagtgtagatcctaatttacaaaatattccggttagacttgaagaagggcgtaaaataagaaaagcctttaaaccaacttcaaaagatagcgttatattatcagcagattattctcaaattgaattgcgtgtattagcacacattacacaagatgagagtatgaaagaagcatttatcaacggcgatgatattcatacagcaactgctatgaaagtatttggtgtagaagctgatcaagtcgatagtttaatgcgtcgtcaagcaaaagcggttaactttggaattgtttatgggataagtgattatggtttaagtcaaagcttaggtattactcgtaaaaaagcaaaagcattcattgatgattatttagctagtttcccaggtgtaaaacaatatatgtctgatattgtaaaagatgccaaagctttaggttacgtggaaacattgctacatcgtcgacgttatattcctgatattacgagtcgtaactttaatttacgcggctttgctgaacgtactgctatgaatacgccaatacaaggcagtgctgcagatatcattaaactggcaatggttaaatttgcgcaaaaaatgaaagagacaacatatcaagctaaactattattacaagtgcacgatgaattaatttttgaagtacctaagtcagaagtagattcatttagtgaatttgtagaagagataatggaaaatgcattgcaattagatgttccattaaaagtagactcaagttatggtgcaacttggtatgatgcaaaataa

SEQ ID NO: 8526 - DNA, 1035 bp, Staphylococcus aureus
  CDS (1)...(1035)
gtgcttttaatgtcaacgaatattgcaattaatggtatgggtagaattggaagaatggtattacgtattgcattacaaaataaaaatttaaatgtagtagcgataaatgctagttatccacccgaaacaattgcacatttaatcaattacgatacaacacatggaaaatataatctaaaagttgaaccgattgaaaatggattgcaagttggagatcataaaattaaattggttgctgatcgcaatcctgaaaacttgccatggaaagaattagatatcgatattgctatagatgcaactggtaaatttaatcatggtgataaagccatcgcacatattaaagcaggtgccaaaaaagtattgttaactggtccttcaaaaggtggacatgttcaaatggtagttaaaggcgtaaatgatgaccaattagatatagaagcatttgacatttttagtaatgcttcatgtactactaattgcattggtccagttgcaaaagttttaaataatcagtttggaatagttaatggtttaatgactactgttcacgctattacaaatgaccaaaaaaatattgataatccacataaagatttaagacgtgcacgctcatgtaatgaaagcattattcctacttctactggtgcggcgaaagctttaaaagaagtattaccagaattagaaggtaaattacatggcatggcattacgtgtaccaacaaagaatgtatcgctcgttgatttagttgttgatttagaaaaagaagtaactgtagaagaagtaaaccaagcttttgaaaatacaggtttagaaggtatcattgaagtcgaacatcaaccactagtgtctgttgattttaatactaatccacattcagctattattgatgcaaaatcaacaatggtcatgtcagggaataaagtaaaagttatcgcttggtatgataatgaatggggttattcaaatagagttgtagatgttgctgagcaaattggagcacttttgacatcaaaagaaactgtaagtgcaagttaa

SEQ ID NO: 8527 - DNA, 1938 bp, Staphylococcus aureus
  CDS (1)...(1938)
atggaacaaattaatattcaatttccagatggtaataaaaaggcgtttgataaaggtactactactgaagatatagcacaatcaattagtcctggattacgtaaaaaagcagttgccggcaaatttaacgggcaacttgtagatttaactaaaccgcttgaaactgatggatcaattgaaattgtgacaccaggtagtgaagaagcgttagaggtattacgtcattctactgcacatttaatggcacatgcgattaaaagattatatggtaatgttaaatttggtgttggtcctgtaatagaaggtggcttctactatgacttcgacatagaccaaaacatctcatctgatgactttgaacaaattgaaaaaacaatgaaacaaatcgttaacgaaaatatgaaaatcgaacgaaaagtggtttcacgagatgaagcgaaagagttattcagcaatgatgaatacaaattagaattaatcgacgcgattcctgaagatgaaaatgtaacattatatagtcaaggtgattttactgatttatgtcgtggagttcacgttccatcaacagctaaaattaaagagtttaaactattatctacagcaggtgcatactggcgtggagatagtaacaacaaaatgttacaacgtatatacggtactgctttctttgataaaaaagaattaaaagcacatttacaaatgttagaagagcgtaaagaacgtgatcatcgtaaaattggtaaagagttagaattattcacaaatagccaattagttggtgctggtttgccattatggttacctaacggtgcaacaatcagacgtgaaattgaacgttacattgttgataaagaagttagcatggggtatgaccacgtttatacaccagtacttgctaatgttgatttatacaaaacatctggtcactgggatcactatcaagaagatatgttcccaccaatgcagttagatgaaactgaatctatggtattacgtccaatgaactgtccacatcatatgatgatttatgcgaataaaccacactcatatcgtgaattacctatccgtatcgctgagctaggaactatgcatagatatgaagcaagtggtgctgtatcaggattacaacgtgttcgtggtatgactttaaatgattcacatatctttgttcgacctgatcaaattaaagaagaattcaaacgcgttgtaaacatgattattgatgtgtataaagactttggtttcgaggattatagctttagattaagttatagagaccctgaagataaagaaaagtactttgatgatgatgacatgtggaataaagctgaaaatatgcttaaagaggcagcggatgagcttggcttatcgtacgaagaagcgattggtgaagcggcattctatggtccgaaactagatgttcaagttaaaacagcgatgggtaaagaagagacattatcaacagcacaacttgatttcttattaccagaacgttttgatttaacttatattggtcaagatggtgaacatcatcgtccagttgttattcatcgtggtgttgtatcaacaatggaacgatttgtagcatttttaactgaagaaactaaaggtgcattcccaacttggttagcgccaaaacaagttcaaatcattccagttaacgttgatttacattatgattatgcgcgccaattacaagatgaattgaaatctcaaggtgttcgtgtaagtattgatgagcgtaatgaaaaaatgggttataaaattagagaagctcaaatgcaaaaaataccttatcaaatcgtagttggggataaggaagttgaaaataatcaagtgaatgtgcgtcaatatggatcgcaagaccaagaaacagttgaaaaagatgaatttatctggaatctagttgatgaaattcgtttgaaaaaacatagatag

SEQ ID NO: 8528 - DNA, 1494 bp, Staphylococcus aureus
  CDS (1)...(1494)
atgtcaaaagttcaaaatgaaagtaacaatgttgtcaaaaggggacttaaagatcgtcatatttctatgattgcgattgggggttgtattggtacaggtttatttgtaacttctggtggagcaattcatgatgcaggtgctttgggagcattaataggatacgcaattatcggaataatggtatttttcttaatgacgtcacttggcgaaatggctacttatttgccagtatcaggttcatttagtacatatgctacaagatttgttgatccatctttagggtttgcgcttggttggaactattggtttaactgggtagtaactgtagcagcagatattacgattgcagcacaagtcattcaatattggacaccattgcaaggcatacccgcttgggcgtggagtgcattgttcttagttataatttttagtctgaattctttatcggttcgtgtctatggtgaaagtgaatattggcttgcattaataaaggttgttacagttatcgtttttattgctattggtttattaacgattgtaggaattatgggtggacattttgtaggatttgaaatatttaataaaggtgaaggacctattttaggtggcaacctaggaggaagtttgttatcaattctaggtgtattcttaatcgctggtttctcattccaaggtactgagttaattggtattacggctggtgaatcagaaaatcctgaacgtgctgtgccgaaagcgattaaacaagtattctggagaattgtattattttacattttagccatttttgttatcggtatgttaattccttatgatagtagtgcattaatgggaggcggtaatgacgttgcaacctctccgttaacgctagttttcaaaaatgcaggatttgcttttgcagcctcatttatgaatgctgttatcttaacatcagttttatcagcaggaaactctggaatgtatgcctcaacgcgtatgctttattcaatgagtaaagataaattggcgtttgaaacatttgggaaaacaaataaaaatggtgtgccatatatgtctttattagtaactgcaattattgtagtcatcatatttgtggtacaaagtgttacagaaggtgcttatcaatatatcgttgctgcaagtgggttaactggctttattgcctgggtaggtatcgcagtgagtcattatcgatttagaagagcatttgataaacaaaattatgataaatctaaattgaaatatacagctaaattgtttccgttcggacctatttttgcagcaatcttatgtattgttgtaatcatcggtcaagatgtggactttattaaaacaggagattttaattttagccgcttcctaattacgtatatgggaattccagtatttttagcattctttatttatcataagcttcgatataaaacgaaaaaaattccattagaacaagtagatttacgtcaagacgtatcaatggatgaaataaaaggttaa

SEQ ID NO: 8529 - DNA, 603 bp, Staphylococcus aureus
  CDS (1)...(603)
gtgtataaggaagagcgggtattttatacctgctcttcctttttgcttggtgcaaatttcgtaaaaattttggaggtgtcaaccatagcaaaagatcaaactcaaatcaatgacaaaattcgtgcaaaagaattacgtttaatcggtcaagatggtgaacaaattggtgttaaatcaaagcgagaagctttagaaatggctgaacgtgtagatttagacttagtggtcgttgcaccgaatgcgaaaccaccagttgcaagaattatggattacggtaaattcaaattcgaacaacagaaaaaagaaaaagaaatgaaaaagaaacaaaaaattatcaatgttaaagaaattcgtttaagtccaacaattgaggaacatgatttccaaactaagttgaaaaacggacgtaaatttttaactaaaggcgataaatgtaaagtatctattcgtttcagagggcgtgccattacgcataaggaaattggtcaacgtgtgttagaaaaatatgcagatgaatgcaaagatatagcaacagttgaacaaaaacctaaaatggacgggcgtcaaatgtttatcatgttagcgccaacagctgaaaaataa

SEQ ID NO: 8530 - DNA, 201 bp, Staphylococcus aureus
  CDS (1)...(201)
atgccaaaaatgaaaactcaccgcggagcagctaaacgtgttaaaagaactgcttcaggtcaattaaaacgttcaagagctttcacatctcacttattcgcaaacaagagcactaaacaaaaacgtcaattacgtaaagctagattagtgtctaagagcgatatgaaacgtgtaaaacaattattagcatacaaaaaataa

SEQ ID NO: 8531 - DNA, 1707 bp, Staphylococcus aureus
  CDS (1)...(1707)
atgaaagtcgaagtttataaaggagcgcaaggcaaacataaccttaaagattatgaagaaacatataatacttttgattggaaagacgtagaacaagcattttcttggagtgaaactggaaaaatgaacatggcatatgaatgtatagatcgccatgtagatcaaggatcaggggataaaatagcgttaaattacaaagatgagcacagaaaagaatcgtatacttataaagatatgcaacggttatctaataaagcagcgaatgttttgtctgaacatgcagaagttgacaaaggtgacagagtatttatatttatgtcgcgtacacctgaactatattttgcgttgttaggtgttttaaaaattggtgcaattgttgggccgttatttgaagcatttatggaaaaggcagttgcggatagattagagaacagtgaagctaaagtgttaattactaataaggcattgttacctcgagtacctttagataaattaccaaacttgaaaaaaattgttgtcgtagatgaggatgtagaagacaattacatagacttcattagtttgatggaaactgctagcgatgaatttgacattgaatggttaaagtcggatgatggtttgattttacattatacatcaggttctactgggcaacctaaaggtgtattgcatgttcaacaagcaatgttagttcactatatttctggaaaatatgtattagatttacaagaagatgatgtttattggtgtacagcagatccaggttgggttacaggaacatcttatggtatttttgcaccatggttaaatggcgctacaaattgtatagctggtggtcgcttttcaccagaacagtggtatagtatgattgaagattttaaagtgacgatttggtatacggcaccaacagctttaagaatgttaatgagtgctggtgacgatattgttgagaaatatgacttgtcatcgttgcgttcgattctatcagtaggtgagcctttaaatcctgaagttataaaatgggcgaaaaaagtatacggtttaacggtgttagatacttggtggatgacagaaacaggtggacatatgattgttaactatccaacgatggacgtcaagcttggctcaatgggcaaaccattacctggtattcaagctgcaattatcgatgatgcaggtaatgaattaccaccaaatcgaatgggcaaccttgctataaaaaaaggctggccatcaatgatgtatcgtatctggaagaatccagaaaaatataagtcatattttattggagactggtatgtatctggtgattcggcatataaagatgaagatggttacttctggttccaaggacgtgttgatgatgtaattatgacagctggtgaacgagttggaccatttgaggttgagtctaaattggttgaacacgaagcagttgccgaagcaggaattattggtaaacctgatccggttcgcggtgaaataattaaggcgtttgttgcactgagaaaaggatatgaaccaacagacgaattaaaagaagaaattcgtttatttgttaaagaaggtttgtcggcgcatgcagcaccacgtgaaatcgaatttaaagataaattacctaaaacacgctcaggtaaaattatgagacgtgtattaaaagcttgggaattaaatttagatgcaggggatttaagtacaatggaataa

SEQ ID NO: 8532 - DNA, 357 bp, Staphylococcus aureus
  CDS (1)...(357)
atgccacgagttaaaggtggaacagtaacaagagcgcgtcgtaaaaaaacgattaaattagctaaaggttacttcggttcaaaacatacattatataaagtagctaagcaacaagtaatgaaatcaggtcaatacgctttccgtgaccgtcgtcaacgtaaacgtgacttccgtaaattatggattacacgtatcaacgcagcagctcgtcaacatgaaatgagctactcacgtttaatgaacggtttgaaaaaagctggtatcgacattaaccgtaaaatgttatcagaaattgcaatttctgacgaaaaagcatttgctcaattagtaactaaagctaaagatgctttaaaataa

SEQ ID NO: 8533 - DNA, 519 bp, Staphylococcus aureus
  CDS (1)...(519)
gtgggggcagaaggtcaaaataaaagtgatgcgctaagtcaatatgaagttaagcgaaaaaacgatatggaagaggatccatcatataaacaactcatttcttattgtttacttgaaaatgagcatggcgagatattagtgtatgaacgattatctggcggtggagaagctcgattgcatggacaatcttcaataggtgtaggcggtcatatgaatgatgttccaggagcagaatctattaacgaagtattgagagttaatgcacagagagaattagaagaagaagtaggtttaagtgagcaagattcacaaaatatggaatatatcggttttattaatgacgataataatgaggtgggcaaggtacatattggtgttgtatttaaaatcacggtaagtacgaatgatgtagaagctaaagaaacagatactttacgaataaaatggattgaaaaaggcaacatagagtcatatgatgatttcgaaacgtggagcgcattaatccttcaagatttataa

SEQ ID NO: 8534 - DNA, 927 bp, Staphylococcus aureus
  CDS (1)...(927)
atgcgtaaattagtcgttggctccagaagaagtaaattagctttaacacaaagccagcaatttattgataaattaaaagctgtcgagccaaatctagaaattgaaattaaagaaattgtcacgaaaggcgatcgtatagtagataaacaactgtctaaagtcggaggcaaaggcttatttgttaaagaaatacaacatgaactttttgaaaaaaatatcgatatggcaatacactcgcttaaagacgtaccaagtgtaattccggaaggtttaacattaggttgtatccctgatagagaattaccttttgatgcgtatatttctaaaacacatacaccactatcccaattgccagaaggcagtattattggtactagttcattacgtcgtggtgcacaaatattatctaagtatcctaatttagagattaaatggattagaggtaatatagatacacgattagaaaagttacaaactgaagattatgatgcgattattttagctgcagctggtttaagaagaatgggctggtcagatgatatcgtaacatcttatcttgatagagatacattgttacctgcaatcggacaaggtgctttagggatagaatgtcgtagtgacgatgaagaactattaacattattaagcaaagtacataatgatgaggttgcaaaatgtgtgactgctgaaagaacgtttttagcagaaatggatggtagttgtcaggtgccaatcgcaggatatgctacaatctcagatcaaaaagaaatcgaatttacaggtttaattatgaccccagatggtaaagaacgatttgaatatacaatgaacggaacagatccggttgagttaggcaaaaaagtgagtaacaaattaaaagagcaaggtgcttatgaaattataaaatgcttaaatgaacaacattaa

SEQ ID NO: 8535 - DNA, 669 bp, Staphylococcus aureus
  CDS (1)...(669)
atgaagccagttgtagttatgacacaaacaaatgacatgcaaagtgatttagtatcaattattcacaaaccctttattgatataaagccactaaattttgatattcatttgttaaatcaacgctatgactggcttattttttcatctaaaaatgctgtgaaatttttttataaatatctaaaaggaattaatgttgataacattgctgtgataggaagtaagacagcgcaatattgtgaatcacttggcattcaagttgattttatgccaaacgacttttctcaagaaggatttttaaaatcatttaatcaaactaaccaaaaaatacttttgccttcgagtgaattggcgagaccattgttatcagcagcgttatctaaagataatgaagttgttaaaatagatttatatacttcagtgcctaacaaacaaaatatacaagatgttaaagaaatgatagaacatcaacaaatcgatgcattaacattttcaagttcgtcggcagtacgttattattttaatgaaggatttgtaccaaaattcaagtcgtattttgctattggagaacaaacagcacggaccattaaatcatatcaacaaccagtaacaattgcagaaattcaaacacttgaatcactaattgaaaagattttagaaagtaggggctaa

SEQ ID NO: 8536 - DNA, 975 bp, Staphylococcus aureus
  CDS (1)...(975)
atgaaatttgatagacatagaagattgagatcatcagcgacaatgagagacatggttagagagaatcatgtaagaaaagaagatttaatatatccaatttttgtagttgaaaaagatgatgtgaaaaaagaaattaagtcattgccaggtgtataccaaatcagtttgaatttacttgaaagtgaattaaaagaagcttatgacttaggtatacgtgccattatgtttttcggtgttccaaactcaaaagatgatataggtactggtgcatacattcacgatggtgttattcaacaggcaacacgtattgctaaaaaaatgtatgatgacttattaattgttgcagacacttgtttgtgtgaatatactgatcatggtcattgtggtgtgattgatgaccatacacatgacgttgacaatgataaatcattgccactacttgttaaaacagcaatttctcaagtggaagctggagctgatattattgcaccaagtaatatgatggatggttttgttgctgaaattcgtcgtggactagatgaagccggctattacaatattcctataatgagttatggtgtcaagtatgcatctagtttctttggaccttttagagatgcagcagattcagcgccatcatttggtgatagaaaaacgtatcagatggaccctgctaaccgtttggaagcacttcgtgaattagaaagtgatcttaaagaagggtgcgacatgatgattgttaaacctgctctaagttatttagacatagttcgagacgttaaaaatcatacgaatgttccagttgttgcatataatgtgagtggagaatatagtatgactaaagcagcggcacaaaatggttggatagatgaagaacgtgtcgttatggaacaaatggtttcaatgaaacgtgcaggtgctgatatgattattacgtattttgcaaaggacatttgtcgctatttagataaataa

SEQ ID NO: 8537 - DNA, 102 bp, Staphylococcus aureus
  CDS (1)...(102)
atggatatgaaaccaaaatatgatcctcgtgaagttgaagcgggacgttatgaagaatgggtaaagaatggttattttaaaccgtcagaagataaatcataa

SEQ ID NO: 8538 - DNA, 2433 bp, Staphylococcus aureus
  CDS (1)...(2433)
atgaaacgtatgcaaggatacgatacgttatacttaccaggtatggatcatgctggtattgcgacacaggcaaaggtagaagctaaattaaatgaacaaggaataactagatatgatcttggtcgtgaaaagtttttagaacaggcatgggattggaaagaagagtatgcgtcatttattcgtgcgcaatgggctaaattaggtctaggtttagattatagtagagaacgttttactttagatgaaggtttaagtaaagcagttaaaaaagtttttgttgatttatacaataaaggaattatttatcgtggcgaacgtattataaattgggatcctaaagcacgtacagctttatctgatattgaagtaatacatgaagatgttcaaggtgcgttttatcattttaaatatccttacgctgatggtgaaggttttattgaaattgcaacaacaagaccagaaacgatgttaggtgatacagcgattgttgttaaccctaatgacgaacgatacaaagatgtaatcggtaaaactgttatattaccaatcgtaggacgcgaactgcctattttagcagatgagtatgttgatatagacttcggttctggtgctatgaaagtgacaccagcacatgaccctaatgattttgaaattggtcaaagacatcaattagaaaatattatcgttatggatgaaaatggtaaaatgaacgacaaagctggcaaatacgaaggtatggaccgttttgattgtcgtaaacagctagttgaagatttaaaagaacaagatttagttatcaagattgaagatcatgttcattctgtaggtcattcagaacgatctggcgctgttgttgaaccatatttatcaacacaatggtttgtgcgcatggaagacttagcgaaacgttcattagataaccaaaaaacagatgatcgtattgatttttatccgcaacgtttcgaacatacatttaaccaatggatggaaaatattagagattggacgatttcaagacaattatggtggggtcatcaaattccggcttggtatcataaagaaacaggcgaaatatatgttggagaagaagcgccaactgatattgaaaattggcaacaagatgaagatgtattagatacgtggttctcaagtgctttatggcctttctctacgttaggttggcctgatttagaaagcgaagactttaaacgatactacccaacaaatgccttagttacaggttacgatattatctttttctgggtagcacgtatgatattccaaggcttagaatttacagatcgtcgtccatttaatgatgtgttattacacggcttagttcgtgctgaagacgggcgtaagatgagtaaatcattaggtaatggtgtggatccaatggatgttattgacgaatacggtgctgatagcttgcgttacttcttagcaacgggttcatctccaggacatgatttaagatactcaactgaaaaagttgagtcagtgtggaactttatcaataaaatctggaatggggcacgtttcagtttaatgaatatcggtgaagactttaaagttgaagatatcgatttaagtggtaacttatcattagcagataaatggattctaacacgtttaaatgaaacgattgcaacagttactgatctaagtgacaaatatgaattcggcgaagttggacgtgcattatataatttcatttgggatgatttctgtgattggtacattgaaatgagtaaaattccaatgaatggtaatgacgaagaacaaaaacaaattacacgttcagtattgagttatactttagacaatattatgagaatgctacatccattcatgccatttgtaacagagaaaatatggcaaagtttaccacatgaaggtgacacaattgttaaagcttcatggccagaagtgcgtgaatcattgatttttgaagaaagtaaacaaacaatgcaacaacttgttgaaatcattaaatctgtaagacaatcacgtgtagaagtaaatacgccattgtctaaagaaatacctattttaattcaagctaaagataaagaaattgaaacaactttatcacaaaacaaagattatttaatcaaattctgtaatcctagtacgttaaatattagcactgacgtggaaattcctgagaaagcaatgacatcagttgtaattgcaggtaaagtggtattaccattagaagggctaattgatatggataaggaaatcagccgtttggaaaaagaattagctaaacttcaaagcgaattagatagagtagataaaaagctctctaatgaaaactttgtaagtaaagcacctgaaaaggttataaatgaagaaaaacgtaaaaaacaagattatcaagaaaaatatgatggtgtgaaggcaagaattgaacaattaaaagcatag

SEQ ID NO: 8539 - DNA, 2613 bp, Staphylococcus aureus; identical to SEQ ID NO: 4438
  CDS (1)...(2613)

SEQ ID NO: 8540 - DNA, 318 bp, Staphylococcus aureus
  CDS (1)...(318)
gtgcaaagtatgtttgctattattgaaacaggtggaaaacaaatcaaagtagaagaaggtcaagaaatcttcgttgaaaaattagacgtaaacgaaggagatacttttacatttgataaagtattatttgtaggtggagattcagttaaagttggagcgccaacagttgaaggtgcaacagttactgctactgttaataaacaaggtcgcggtaaaaaaatcactgtattcacatacaaacgtcgtaaaaattcaaaacgtaaaaaaggccatcgtcaaccatacactaaattaacaatcgataaaatcaacgcgtaa

SEQ ID NO: 8541 - DNA, 321 bp, Staphylococcus aureus
  CDS (1)...(321)
atgattactgttgatattacagttaatgatgaaggcaaagtaacagacgttattatggatggccatgctgaccatggtgaatatggtcatgatatcgtttgtgctggagcttcagctgtattgtttggtagtgttaatgcgattataggattgacatctgagagaccagatatcaattatgacgacaatggtggtcattttcatataagaagcgttgatacaaataacgatgaagcgcaactaattcttcaaacaatgcttgtgtctttacaaactattgaagaagaatataatgagaatattagattaaattataagtga

SEQ ID NO: 8542 - DNA, 300 bp, Staphylococcus aureus
  CDS (1)...(300)
gtgaggtgcattccgatgttaaaattaaacttacaattcttcgcatctaaaaaaggggtaagttctacaaaaaacggacgtgactctgaatcaaaacgcttaggtgctaaacgtgctgacggtcaattcgtaacaggtggttcaattttatatcgccaacgtggtactaaaatttaccctggtgaaaatgtaggtcgtggtggcgatgatacattattcgctaaaatcgacggcgttgttaaattcgaacgtaaaggtcgcgacaaaaaacaagtttctgtatatgcagtagctgaataa

SEQ ID NO: 8543 - DNA, 1302 bp, Staphylococcus aureus
  CDS (1)...(1302)
gtgagatatatgtttgtcgatcaagtcaaaatatctcttaaagccggtgatggtggtaatggtattaccgcatacagaagagaaaaatatgtaccatttggtggaccagctggcggtgacggtggtaaaggtgcttcagtcgtatttgaagtggatgaaggtttaagaacgttattagattttaggtatcaacgtcattttaaagcaagcaaaggtgaaaatggccaaagtagtaatatgcatggtaaaaatgcggaagatttagtattaaaagttccacctggcacaattattaaaaatgttgaaacagatgaagtgttagcagatcttgttgaagatggtcaaagagctgtagtagcaaagggcggtcgaggtggacgaggtaattcacgttttgcaacgcctagaaaccctgcacctgacttcagtgaaaaaggtgaaccaggtgaggaattagatgtatctttagaattgaaattattggctgatgtaggattagtaggcttccctagtgtgggtaaatcgactttattatctatcgtttcaaaagctaagcctaaaattggggcatatcattttacaacgattaaaccaaatctaggtgttgtttcaacacctgatcaacgaagttttgttatggcagatttaccaggtttaattgaaggtgcatctgatggcgttggattaggacatcaatttttaagacatgtagagagaacaaaagttattgttcacatgattgatatgagtggttctgaaggtagagaacctattgaagattataaagtcattaatcaagaattagccgcgtacgagcaacgtttagaagatagacctcaaatcgtagtagctaacaagatggatttacctgaatcacaagataatttaatcttatttaaagaagaaattggcgaagatgtgccagttattccagtttcaacaataacgcgtgataatattgatcaattattatatgcaatagcagataaattagaagaatataaagatgttgacttcacagttgaagaagaggagtcggttggcattaaccgagtattatataaacatacaccgtcacaagataaatttacaatttcaagagatgatgatggtgcttatgtggtaagtggtaatgctattgaaagaatgtttaaaatgactgactttaacagtgatccagcagtacgtcgatttgctcgtcaaatgcgttcgatgggtattgatgatgcgcttagagaacgtggttgtaaaaatggtgatatcgttagaattcttggcggagaatttgaattcgttgaatag

SEQ ID NO: 8544 - DNA, 459 bp, Staphylococcus aureus
  CDS (1)...(459)
atgatggacaataaagattataaaaagttttatttaattagagaagatgtcttgcctgaatccgtggttaaaacattgaagattaaagatgccttaaaaagtgatccgacattgtccatttatgatgccgttaaacagtttgatctatctagaagtgctttttataaatatagagaaacgatatttccagtagacgataaaatgcttgaccatcgagaatttacattaattttatatgtaactgatattgtgggtatgttggcacgtgtactagatgttatatcaaagttagaactatctgtattaacgattcatcaaagtattccaatggaagaaaaagcaacaataacattatcactgaatgctaaatctaaagaaacttcagtagaagatgttattggcgctttgagaaatttagattatgtatcaaaagtagaattaattagtatgagtatgtaa

SEQ ID NO: 8545 - DNA, 1065 bp, Staphylococcus aureus
  CDS (1)...(1065)
atgaacattttgcaaagtcgaatgaggagagagaataacgtgaatattgaagaatttgactatgacttaccagaatcattaattgctcaaacgcctttaaaagatcgtgatcatagtcgtttattagtcatggatagagaaactggtgaaatgaaacatttacatttcaaagatatcattgagtattttagacctggtgatacattagtgcttaacgatacgcgagtaatgccagctagactttttggtttgaaagaagaaactggtgcaaaagttgaaatgttaatgttaacccaaattgaaggtaatgattgggaagtcttactgaaaccagctaagcgtattaaagttggtaataaattgaattttggtaatggcaaaattatagctgaatgcataaaagaaatggatcaaggtggacgcatcatgcgtttacattatgaaggtattttacaagaaagattagatgaattaggggaaatgccactgccaccatacatcaaagaacgtttagatgatccagatcgttatcaaacagtttacgctaaagaaagtggttcagcggcagcaccaacagcaggattacattttactgatgagttattaactgaaattaaaaataaaggtgttaatatcgcatttgttacattacatgttggattaggtacgtttagaccggtgagcgtcgacgatgtgaatgaccacgaaatgcatagtgaatattatcaaatgacacaagaaacagctgatttattaaatgatactaagtccaaaggacatcgtattatatcagttggtacaacttcaacacgtacacttgaaacaattcgacgcgatcatgataaatttgttgaaacgagtggctggactaatatatttatttatccaggatttgattttaaagcaattgatggccagattactaattttcatttaccaaaatcaacattagttatgctagtatcagcgtttagtactcgtgaaaatgttctgaatgcttataaaacggcagtaaatttagaatatagattctttagttttggcgatgcaatgttaattatataa

SEQ ID NO: 8546 - DNA, 1155 bp, Staphylococcus aureus
  CDS (1)...(1155)
gtgaggattttgaatatgcctgcagtaacatacgaacacattaaaacttgtaaacaatcaggtgcgcgtttaggtatcgtgcacacaccacacggttcatttgaaacacctatgtttatgccagttggtactaaagcaaccgttaaaacaatgagtccagaagagttaagacaaattgaagcaaaaatcattttgggcaacacatatcatttgtggttacaacccggaaatgatattatcaaacacgctgggggattacataaattcatgaattgggatggtccgattctaacagattcaggcggtttccaagtgtttagtttaagtaatttacgtaaaattacagaagaaggcgtggaatttagacatcatactaatgggtctaaattatttttgagtcctgagaaatcaatgcaaattcaaaatgatttaggttctgatattatgatggcatttgatgaatgtccaccgatgcctgctgaatatgattatgtaaaaaaatctattgaacgtacaacacgttgggcgaaaagatgtctagatgcacaccaaagacctgaagatcaagcattgttcggcattatacaaggtggcgaatatgaagatttaagagaacaaagtgcaaaggatttagtagaattagattttcctggttatgcaatcggcggtttgtcagttggtgaacctaaaccggttatgtataaaatggttgaacatacagagcagtttatgcctaaagataaaccaagatatttaatgggtgtaggatctccagatgcgttaatcgaatgtagtattcgcggcatggatatgtttgattgtgtcttaccgacacgtattgccagaaatggtacttgtatgacatcgcaaggtcgtttagttattaaaaatgcaaaatttgcagatgatttaagaccgttagatgagaattgtgactgttatacatgtcaaaactactcaagagcgtatatacgtcatttaatcaaggcagaggaaacttttggtattcgtcttactactattcataatttacattttctgctaaaattaatggaagatataagacaagccattcgagaagatcgtcttttagatttcaaagaagaattcttcgagcaatatggattaaatgttgagaacccaaaaaacttttaa

SEQ ID NO: 8547 - DNA, 2274 bp, Staphylococcus aureus
  CDS (1)...(2274)
atgattaaaccgaagtataagtggaaattaattaaaccaactgaatacataagtgatgaattaacatcaaaattaaagttaacgccaatcgtaaaaaaaatattagaaagtaaatcgattattgatgaacaagcaattgaatccatcatttcagatacagatatcaatcatgatgcattgcaattgagcgatatgacaaagactattgaaagaattaaaagagcgatagcgaatgatgagaaaatcctagtttatggtgattacgatgccgacggtgttacctcaactacaattttagtgacaacattacaacttttaggtgcacaagtaggatggcatattcctaaccgctttaccgaaggatatggaccaaacgaactagcatttagaaatgctcatgatgaaggcataacattaatcataactgttgataatggcatacaaggtcataatgaaattaaaatggttcaagatttaggagttgatgtcattgtaactgatcatcatgaaattggtagtacattaccagaagcatatgcaatcgtacatccaatgcatccatcgtttaattatccgttccaacaattgtgtggtgcaggtgttgcgtacaaattagcacaagcattgattgaaaatgtacctgattattttaaagcattagttgcgataggtaccattgcggatttagtatccttaactgatgaaaatcgatcattagtgaaacaaggattaaaagtcttaaatgatcaatgtccgacctctgttaaagcattgctaaaagaagcgggatacaatgacaatattgacgaagaaacaattggttttattattggacctagacttaatgctgtaggtcgtttagatgacgcatcattagcttgcgaattgttgatgactgacgacgaagaagaagctgcatttttagcagaacaagttgaacattttaaccgtgaaagaaaagatattgtagcagctatcacagaagaagcaatggcaatggcagaaatgaaagttaaaaatggagatttatttttacttttagcaaaagaaaattggcatgaaggtgtcttaggtattgttgcttcgaaaattgtcgaaacgtttgctttgccaacattaattttaaatattgatagggagcaaaatcatgcaaaaggttccgccagatcaattgatcaagtgtcgatgtttgaaatactatcagcacaccaagagttaatcgctaaatttggcggccatcatatggctgcaggtatgacgatggatattgaaaatatagaatcgttagctgaaggtttaaataaatggatgaaagaattatctgaaacaacttcgttagatcccgtaaagccagtagatgtattattaacagaaaatgatataacgattaaaaatattcgtgatatgaatcgtttaagacccttcggaacagatttttctagacctatttttgaaatggatgatttatcagtttcttcagttaaggcgataggtcaacaaaaaaatcatctaaaattgacacttggtgaaagtaatatcgccgcactattttggcaaaatggacacttagaacctgagttacaagatgaacaaccaattaatatattaggttctgttcaaatcaacgaatggaatggtaatcaatcaccgcaattaattattcaagatattgcgatgaacgaacagcaaatattagattatagaagtaagcgaaaaagtttaccttttacagaaaatgatgaaaatattgtcgtgcttattcatcctaaaagtgataaagtaaatgcgaatgaatattattatggtgaagaaattaaacaacaaactgataaagtagtattaagagatttacctacgtcaatggaagatttgtctaattccctgcaacaactgcaattttctcaactttatatagttttgcaacataatcattcgatttacttcgatggtatacctaatatggatgtttttaaaaagtgttataaagcattaataactaaacaagaaacaaatatccagaaagagggtatgttattgtgtcaacatttaagtgtaaaaccagatacacttaaattcatgttgaaagttttcttagacttaaaatttgtaacacaagaagatggtttaattcgaatcaatcaacaacctgataaaagatcgattgattccagcaaagtatatcaattaagacaacaacgtatggatgttgaaaagcaattattatatcaagatttttcagaaatgaaaaattggataaagtcacaattgtcgtga

SEQ ID NO: 8548 - DNA, 2211 bp, Staphylococcus aureus
  CDS (1)...(2211)
atgaatggggtgtatcatataatgaacaacgaatatccatatagtgcagacgaagttcttcacaaagcaaaatcatatttgtcagcagatgaatatgagtatgttttaaaaagctatcatattgcttatgaagcacataaaggtcagttccgaaaaaacggattaccatacattatgcatcctatacaagttgcaggtattttaacagaaatgcgattagacggaccgacgattgtcgcaggttttttgcatgatgtaattgaagatacaccgtatacatttgaagatgtaaaagaaatgttcaatgaagaagttgctcgaattgttgatggtgtgacgaagcttaaaaaagtaaaataccgctcaaaagaagaacaacaagctgaaaatcatcgtaagttatttattgcgattgccaaagatgtacgcgtaattttggtgaaattagcagacagattacataatatgcgtaccttgaaagccatgccgcgtgaaaaacaaattagaatttctcgagaaacattagaaatttatgcacctttagcacatcgtcttggtattaatacaatcaaatgggaactagaagatacggctcttcgttatattgataatgtacaatattttagaatagtcaatttaatgaagaagaaacgtagtgaacgtgaagcgtatatcgaaacggctattgatagaatacgtactgaaatggaccgaatgaatatcgaaggcgatataaatggtagacctaaacatatttacagtatttatcggaaaatgatgaagcagaaaaagcaatttgatcaaatttttgatttgttggcgatacgtgttattgtcaattctattaatgattgttatgcgatacttggattggtgcatacgttatggaaaccgatgccaggacgttttaaagattatattgcaatgcctaaacaaaatttgtatcagtcattgcataccacagtagtaggtccaaatggagacccgctcgaaatccaaatacgaacgtttgatatgcacgaaattgctgaacatggtgttgcagcacactgggcttacaaagaaggtaaaaaagtaagtgaaaaagatcaaacttatcaaaataagttaaattggttaaaagaattagctgaagcggatcatacatcgtctgacgctcaagaatttatggaaaccttaaaatatgacttgcagagtgacaaagtatacgcatttaccccagcgagtgatgttattgagttgccatatggtgctgtgccgattgattttgcctatgcgattcacagtgaagtcggtaataagatgattggtgccaaggtgaatggcaaaattgtaccaattgactatattttacaaacaggcgatattgttgaaatacgtactagtaaacattcatatggaccaagtcgtgattggttgaaaattgttaaatcgtctagtgccaaagggaaaattaaaagtttcttcaaaaaacaagatcgttcatctaatattgaaaaaggccgaatgatggttgaagctgaaataaaagagcaaggatttagagtcgaagatattttgacagagaaaaatattcaggttgttaatgaaaaatataactttgcaaatgaagatgatttatttgcagctgtaggatttggcggcgtgacatccttacagattgttaataaattaactgaacgacaacgtattttagataaacaacgtgctttaaatgaagcacaagaagttacgaaatcattgcctattaaagacaacatcattactgatagtggtgtctatgtagaaggtttagaaaatgtgcttatcaagttgtcaaaatgttgtaatcctataccaggtgatgatattgtaggttatatcaccaaaggtcacggtattaaagtacatcgcactgattgcccaaatattaagaacgaaactgaacgactaattaatgttgaatgggtaaaatcaaaagacgcaactcaaaaatatcaggttgatttagaggtaactgcgtatgaccgaaatggtttgttgaatgaagtcctacaagctgttagctcgacagccggcaatttaattaaagtttcaggacgttcagatattgataaaaatgcaataataaatattagtgtcatggtgaaaaacgtgaatgatgtttatcgtgtggtagaaaagatcaaacaacttggtgatgtttatacagtaacaagagtttggaactag

SEQ ID NO: 8549 - DNA, 876 bp, Staphylococcus aureus
  CDS (1)...(876)
atgaaaaaaatagaggcatggttatctaaaaagggtcttaaaaataaacgtactctaatagtagtgattgcctttgtcttatttatcatctttttgtttttattgctgaatagcaatagtgaagatagtgggaacattacgataactgaaaatgctgaattacgtacaggtccaaacgctgcgtatccagtcatttacaaagttgagaaaggtgaccattttaaaaagattggtaaagtaggtaaatggattgaagttgaagatacatccagtaatgaaaaaggttggatagctggatggcacacaaatttagatattgtcgcggataatacaaaggagaaaaatcctttgcaaggtaaaacaatagtgcttgatcctggtcatggaggtagtgaccagggtgcttcaagcaatactaaatataaaagcttagaaaaagattatacgttgaaaacagcaaaagaattgcagcgcactttagaaaaagaaggcgcaactgttaagatgacaagaacagacgatacatatgtttcactagaaaatcgtgatatcaaaggcgatgcctatttgagtatacataatgatgcattagaatcatctaatgcaaatggaatgacagtttattggtatcatgataatcaaagagctttagcagatacgttagacgctatgattcagaagaaaggtctactttctaatcgcggttcaagacaagaaaattatcaagtgttaagacaaacaaaagttcctgctgttttattagaattaggttatattagtaacccaactgatgaaacgatgattaaagatcaattacatagacaaattttagaacaagcaattgttgatggccttaaaatttatttttctgcgtag

SEQ ID NO: 8550 - DNA, 1263 bp, Staphylococcus aureus
  CDS (1)...(1263)
atgattaaaatacctagagggacgcaggatattttacctgaagattcaaagaaatggcgttacattgaaaatcaattagatgaattaatgacattttataattataaagaaataagaacaccaatttttgaaagtacagatctttttgcaagaggtgttggtgattcaaccgatgtcgtacaaaaagaaatgtatacatttaaagataaaggcgatagaagtattacattaagacctgagggaacagctgcagttgtgcgttcatatattgaacataaaatgcaaggtaatccaaaccaaccaattaaactttattacaatggaccgatgtttagatatgaacgtaagcaaaaagggcgctatcgtcaatttaatcaatttggtgtagaagctattggtgctgaaaatcctagcgtagatgcggaagtattagctatggttatgcatatttatcaatcatttggattaaaacatttaaagcttgttattaatagtgtaggggatatggcgtctcgaaaagaatataacgaagcgttagtgaaacactttgaaccagtaattcatgaattttgttcagattgtcaatcacgtttgcatacaaatccgatgcgaattttggattgtaaagtagaccgtgataaagaagcgattaagactgcacctagaatcactgatttcttaaatgaggaatctaaggcatattatgaacaagtaaaagcttatttagatgatttaggtattccatatattgaagatcctaacttagttcgtggattggattattatacacatacagcatttgaattaatgatggataaccctaactatgatggtgccattacaactctttgtggtggtggccgttataatggtttattagaattgctagatggtccaagcgaaacaggtattggttttgcgctaagtatagaacgattattgcttgcacttgaagaagaaggtatcgaattagatattgaagaaaacttagatttattcattgttacaatgggtgatcaagcagatcgatatgctgtaaagttattaaatcatttgagacataatggtattaaagcagataaagactacttacagcgtaaaattaaaggacaaatgaaacaagcagaccgtttaggtgccaagtttacaatcgttattggtgatcaagaattagaaaataataaaatcgatgttaaaaatatgacaactggtgaatctgaaacaattgaattagacgcattagtcgaatattttaagaagtag

SEQ ID NO: 8551 - DNA, 1263 bp, Staphylococcus aureus
  CDS (1)...(1263)
atgacgaatgtattaattgaagatttaaaatggagaggtcttatttatcaacaaactgatgaacaaggtattgaagatttattaaataaagaacaagtgacgttatactgcggtgctgatccaacggcagatagcttacacattggtcacttactaccatttttaacattaagaagatttcaagaacatggacatcgtcctatcgttttaattggcggtggtacaggtatgattggtgatccatcaggtaaatcagaagaacgtgtgctacaaacagaagaacaagtagataaaaatatcgaaggtattagtaagcaaatgcataatatttttgaatttggaacagaccatggtgcagtgcttgttaataatagagactggttaggacaaatttcattaattagctttttacgtgactatggtaaacacgtcggcgttaattacatgttaggtaaagattcaatccaaagtcgtttagaacatggtatttcatatacagaattcacatacacgattttacaagctattgatttcggtcatttgaatagagaattgaattgtaagattcaagtaggtggatcagatcaatggggtaatatcacgagtggtattgaattaatgcgtcgtatgtatggtcaaacagacgcatacggtttaactatttcgcttgtaactaaatcagatggtaagaaatttggtaaatctgagtcaggtgctgtttggttagatgctgaaaaaacaagtccttatgaattttatcaattctggattaatcaatcagacgaagatgtaattaaattcttaaaatactttactttcttaggaaaagaagaaattgatcgcttagaacaatctaaaaatgaagcaccgcatttacgtgaagctcaaaaaacattagctgaagaagtaactaaatttattcatggtgaagatgcattaaatgatgcaatccgtatttcacaagcattatttagtggtgatttaaaatcattatcagcgaaagaattaaaagatggatttaaagatgtgcctcaagtgacattatcaaatgacacaacaaatatcgttgaagtccttattgaaacaggcatttctccttctaaacgacaagcgcgtgaagatgttaacaatggtgcgatttatattaatggtgagagacaacaagatgttaattatgctttagcaccagaagataaaattgatggcgaatttacgattattcgtcgcggtaagaaaaaatacttcatggttaactatcaataa

SEQ ID NO: 8552 - DNA, 1554 bp, Staphylococcus aureus; identical to SEQ ID NO: 4667
  CDS (1)...(1554)

SEQ ID NO: 8553 - DNA, 1578 bp, Staphylococcus aureus
  CDS (1)...(1578)
gtgaaaatgatgccacgtaaatttagagttttgcaaattggaggagacgatttagaacctattttccaacacaaaaaaggtgtgagttgggattacttcgatattggattgtttgaatttgatagtggttatgtagaggctattgaagcgattgttgaagcagaagggcgctttgattttatctatattcaagcaccatactcggagacattaacgaatttattacaaatgataagcgaaccatacaatacgtatgttgatgaatcattttggtctgttgaatatgaacaagacgaaaatgtccaaaaatacgttgttcaaccattacattatcgaaacattgaagaacgtaataataaattagaggcagttagtttctcaggacagtatggagataaggtttctcctaagttagcacttgttcatccgaattttaaaggagatgtcgtttaccaaggtaattcagagctcacgttgagtggagaatttggaaaagaatttaaacctatcgcatcttggcaaaataatctcgtttacgataaagataaagttattcaaatatggccagaatttgatattgatggtgcggtcgagttgcaatatacatttagattgattcagactggcgctgatggtgcattaattgaacaaatcatattgactgatgaaatgttagacagtcctttagagatacctacgaaaccatttgatgcttatataagtgtaactgttaaggcgcgtggcaacgggacggtacatttaggacctatacacaaacgatggtctagattagacatgggtcaatttttacttggtggtagtcgttttgtagatagtcaacgacaggaatttatttattatttccaccctggtgatatgaaaccaccactaaacgtatattttagtggttatcgaacagcggaaggtttcgaaggatattatatgatgaaacgtatgaatgcaccgtttttacttatcggcgatcctcgtgttgaaggtggtagcttttatatcggttcatctgaatatgaacaaggtattatcaatgttattgacgagacattagaaaagctgaattttaaatcacatgaattaatattatctggtttatctatgggttcatttggtgccttgtattatggtgctcagttaaatcctcaggcaattattgttggtaaaccacttgttaatattggaacgattgctgaacatatgcgattacttagaccagaagagttcggtacagcattagacgtcctggtgtctaatgaaggtgatacatctcaagcgtcgatacaggcattaaatcaaaaattttggcaaacatttcagaagaaatcattgtcacaaactatttttgccatagcatatatgcaacatgatgattatgatccacatgcatttcaagagctactacctgtattgacagcacaccaagcaagagtgatgaatcgcagtattcctgggcgacataatgatgattcacctaccattgcaagttggtttgttaatttttacaacattattttggaagacaagtttgggagagttcaacatgctgaaaaacaaaacatttaa

SEQ ID NO: 8554 - DNA, 987 bp, Staphylococcus aureus
  CDS (1)...(987)
atgaaggaaaatttttggagtgaattaccacgtccattttttattttggcgccaatggaagacgttacagatatcgtctttcgacacgttgtaagtgaagcagctagaccggatgtatttttcactgaatttacaaataccgagagcttttgccaccctgaaggcatacatagtgtgcgcggtcgcttaacttttagcgaagatgaacagccgatggtcgctcacatatggggagataagccagaacagttccgtgaaacgagtattcaattagctaaaatgggctttaaaggcatagacttaaatatgggatgtcctgtagcaaatgttgctaaaaagggtaagggttccggcttaatcttaagacctgacgtcgctgccgaaattattcaagcaactaaagcaggtgggcttccggtaagtgttaaaacacgccttggctactatgaaatcgatgaatggaaagattggttgaagcatgtcttcgaacaagacattgcaaatttatctattcatcttcgtacacgtaaagaaatgagtaaagtagatgcacattgggaattaatcgaagctattaaaaatttacgtgacgaaattgcaccaaatacattgctaacaattaacggtgacattcccgatagaaaaacaggacttgaatttgcagaaaaatatggcattgatggcgtcatgattggtagaggcattttccataatccattcgcttttgaaaaagaaccacgcgaacacacaagcaaggaactattagatctattgagattgcatttatcattgtgtaacaaatatgaaaaagatgaaatacgacaattcaagagcttgcgtagattctttaaaatctatgtgcgtggcataagaggcgctagtgaacgtcgccatcaattgatgaacacacaatcaattgcggaagctcgagcactactagatgaatttgaggcccagatggacgaagacgttaaactagaattatag

SEQ ID NO: 8555 - DNA, 567 bp, Staphylococcus aureus
  CDS (1)...(567)
gtgaggaataaaatatttgtatggaaaagagagataattatgaataaaaccagtaaagtttgtgtagcagcaacattagcattgggcacactgattggagtaacagttgttgaaaattcggcgccaacaagtaaacaggcacaggcagcaataaccccatattatacttacaatggttatattggtaataatgctaattttattctggataagaattttattaacgcgattaagtatgataacgtgaaattcaatggtattaaattagctaaaacgaatacgataaaaaaagtagagaaatatgatcaaacttttaaaggtgtttccgcaaaaggaaacgaagcaagtcaattgcaatttgtagttaaaaataatatttcattaaaagatatccaaaaagcttatggcaaggacttgaaaaaagaaaatggtaaaacaaaggaagctgatagcggtattttttactatcaaaatgctaaaaagacattaggcatctggtttgtcgttgatcataatagagttgtcgaagtaacagttggacatacaccatacaaaacaagtaaataa

SEQ ID NO: 8556 - DNA, 969 bp, Staphylococcus aureus
  CDS (1)...(969)
atgttttttaaaaggagcgacaaaaatatgaaagagaaaattgtcattgcattaggcggtaatgcgatacagacaaaagaagcaacagctgaagcacaacaaacagctattagacgtgcgatgcaaaaccttaaacctttatttgattcaccagcgcgtattgtcatttcacatggtaatggcccacaaattggaagtttattaatccaacaagctaaatcgaacagtgacacaacgccggcaatgccattggatacttgtggtgcaatgtcacagggtatgataggctattggttggaaactgaaatcaatcgcattttaactgaaatgaatagtgatagaactgtaggcacaatcgttacacgtgtggaagtagacaaaaatgatccacgatttgataacccaactaaaccaattggtcctttttatacgaaagaagaagttgaagaattacaaaaagaacagccagactcagtctttaaagaagatgcaggacgtggttatagaaaagtagttgcgtcaccactacctcaatctatactagaacaccagttaattcgaactttagcagacggtaaaaatattgtcattgcatgcggtggtggcggtattccagttataaaaaaagaaaatacctatgaaggtgttgaagcggttatagataaagattttgctagtgagaaattagcaacgctgattgaagcagataccttaatgattcttacgaatgtagaaaatgtatttattaactttaatgaacctaatcaacaacaaatagatgatattgatgtagcaacactgaaaaaatacgcagcacaaggtaagtttgcggaaggatcgatgttgccaaaaatagaagctgcgatacgatttgttgaaagtggggaaaacaaaaaagttatcattaccaatttagagcaggcatacgaagctttgattggtaataaaggtacacacattcacatgtag

SEQ ID NO: 8557 - DNA, 456 bp, Staphylococcus aureus
  CDS (1)...(456)
atgtcgaccaataaaaacgattatgagcatatgttgttttattttgcatataaaacctttattactaccgctgatgaaattatagagaagtatggtatgagtcgtcagcatcatcgttttttgttttttatcaataaattacctggtattactattaaatcattactagaaatattagaaatttctaaacaaggatcacatgcaacacttcaaaaattaaaagagcaaggtctcattattgaaaaagttttagagactgatcgacgtgtcaaaaaattatattcgacggataaaggcgatcaactcattgctgaattgaacaaggcgcaagatgaattattgcaaaatatatatcaacaagtcggttcggattggtatgatgtgatggaagcattggctaaagggcgacctggctttgattttattaagcatttgaaagatgaaaaagaaagctag

SEQ ID NO: 8558 - DNA, 1425 bp, Staphylococcus aureus
  CDS (1)...(1425)
atgttatcagttaaaaaagccacaaaatttgcagttgctaaccttattatcgtgtcaacagtttttagttctgtcacacctgcaattgcgcaatccgataaaagttctaaagatgaaagtttcgcggttggtaatactaaaaatccaaaaaatgttatctttttagttggcgatggcatgggtccatcatttaacacagcttatcgttattataaaaatgatccgcatgctaaagaaatgacccctactgcttttgattcatatttaaaaggcacaaatcgtacatattcaaatgacccaaaacagaatattactgattctgcagctggcggaacagcctttagttccggtcataagacatataatggtgccatcggtgttgacagtaacaagcagaaagtgaagacggtgcttgaacgtgcaaaagaaaaaggtaagtcgactggtcttgtttcaacagctgaattaacagatgcaacaccagcagcatatgctgcacacgtgacttctagagatgataaaaatgaaatcgctaaacaattttataaagataaaatcaacggaaagcataaagttgatgttttattaggcggtggcgctaaatatttcggtaaaagtaatggcaatttagataaaaaattcaaaaaagatggttacgaccttgccacgaacagtaaggagttatcaaaatctgataaagataaagttcttggtttgtttgcagataaaaatatgccacttgcaatagatgcttcaaaagacgaaccatcattagctgatatgcaacaaagtgcacttagtaagcttgagcgtaataaaaaagggttctttttaatggtcgaaggtgcttctatagataaatcagcgcattccaacgatattacaggcgttatgtctgaaatggaaggttttgaaaaagcattcgatgacgccattcaatatgctaagaagcataaagatacacttgtcgttgcaacagcagatcactctactggtggtctaacaattggtaaagataaaggatacgaatggaatcctcaaccgattaaatcgatgaaacactctggatcatatatgacagaaaaaatggctaaaggtgaagaccctgaaaaagttattaatgaaggttatggctttgaattttcacaagatgatatgaaaaaggttaaaaaagagaataaaaagctaaaaagactacttaaaaaagaaaaagacgaaaaatccgcagatgtagaaaaacaaacaaaagccttacaacacgcaattcagaagccagtaaatgataaatcttatacagggtggacttccgatggacatacaggcgaggatgttaatacctacgcttatggacctagatcagaatcatttagtggtaatatcgaaaatacagaaagcgcaaaaataatatttgatatattcaagtaa

SEQ ID NO: 8559 - DNA, 1491 bp, Staphylococcus aureus
  CDS (1)...(1491)
atggaacttttaaaacatttatctcagcgtcaatacattgatggtgagtgggttgaaagcgcgaataaaaatacaagagatattatcaatccatacaatcaagaagtgatatttacggtttctgaagggacagaagaggatgcagaacgtgcaatcttagctgcaagacgtgcgtttgagtctggtgaatggtcgcaagaaactgctgaaacaagaggtaaaaaagtacgtgccatcgcggacaagatcaaagaacatcgcgaagcgttagcacgattagaaacattagatactggaaaaacgttagaagaatcatatgcagatatggatgatattcataatgtgtttatgtattttgctggattagcagataaagacggtggcgaaatgattgattcaccaattccagatacagaaagcaaaattgttaaagaaccagtaggtgtagttacacaaattacaccttggaattatccgttattacaagcatcatggaaaattgcgccagcgcttgctacgggttgttcactagttatgaaaccaagtgaaattacaccattaacaacaatacgtgtttttgaattaatggaagaagttggtttccctaaaggaacaattaatcttattctaggtgcaggttctgaagttggtgacgtaatgtcaggtcataaagaggttgaccttgtatcatttacaggtggcattgagactggtaagcatattatgaaaaatgctgctaataatgttacgaatattgccttggaacttggcggtaaaaatccaaacattatctttgatgatgctgattttgaattggcggtagaccaagcgttaaatggtggatatttccatgcaggtcaagtttgttcagcaggatcaagaatattagtacaaaacagtattaaagacaaatttgagcaagcacttattgatcgcgtgaaaaaaatcaaattaggtaatggttttgatgctgatactgaaatgggaccagtgatttcaacagaacatcgtaataaaatcgaatcttatatggatgtagctaaagcagaaggcgcaacaattgctgttggtggtaaacgtccagatagagacgatttaaaagatggtctattcttcgagccaacagtcattacaaattgtgatacgtcaatgcgtattgtacaagaagaggttttcggacctgtcgttactgtagaaggctttgaaactgaacaagaagcgattcaattagcgaatgattctatatatggtttagcaggtgctgtattttctaaagatattggaaaagcacaacgcgttgctaacaagttgaaacttggaacggtgtggattaatgatttccatccatattttgcacaagcgccatggggtggatacaaacaatcaggtatcggtagagaattaggcaaagaaggcttagaagagtaccttgtttcaaaacacattttaacaaatacaaatccacaattagtgaattggtttagcaaataa

SEQ ID NO: 8560 - DNA, 1818 bp, Staphylococcus aureus
  CDS (1)...(1818)
gtgttttggttagctaagtttagcaattcaacgataaccaatcagccactaacaaatatttcatgcaatactcactttgaaatacaacaaactttggaggtcataacgatgagtaagaaaaacaaatcatatgattatgtcatcattggaggaggcagtgcaggttctgtactaggtaatcgtctgagtgaagataaagataaagaagtcttagtattagaagcgggtcgcagtgattatttttgggatttatttatccaaatgcctgctgcgttaatgttcccttcaggcaataaattttacgattggatttattcaacagatgaagaaccacatatgggcggtcgtaaagtagcacatgcccgaggtaaagttttaggtggatcaagttcgattaatggcatgatttatcaacgtggtaatccaatggactatgaaggctgggcagaaccagaaggtatggaaacttgggattttgcgcactgtttaccgtattttaaaaaattagaaaaaacatacggtgcagcgccttatgataaatttagaggccatgatggaccaattaaattaaaacgagggccagcaacgaatcctttattccagtcattctttgatgcaggtgttgaagcaggctatcataaaacacctgatgtgaatggatttagacaagaaggttttggaccgttcgatagtcaagtacatcgtggtcgccgaatgtcagcttcaagagcatatttacatccagctatgaagcgtaaaaacttaaccgttgaaacacgtgcctttgttactgaaattcattatgaaggtagaagagcaactggtgttacgtataagaaaaatggcaaactacataccatcgatgctaatgaagtcatcttgtctggtggggcattcaatacgccacaattactacaattatctggtatcggtgattcagagttcctaaaatcaaaaggcattgagccacgtgttcatttacctggtgtgggtgaaaactttgaagatcacttagaggtatacattcaacataaatgtaaggaacctgtatcattacagccaagcttagatatcaagcgcatgccatttattggtttacaatggattttcacacgtacaggtgcagcagcatctaaccattttgaaggtggcggatttgtacgttcaaataacgaagttgattatcctaacttaatgttccattttttaccaatagctgtaagatatgatggtcaaaaggcagcggtcgcacatggttatcaagttcacgtaggaccaatgtattcaaactctcgtggtagcttgaaaatcaaatctaaagatccattcgaaaaaccaagtatccgctttaattatttatcaacagaagaagataaaaaagaatgggtagaagcaattcgtgtagcaagaaatatcttatctcaaaaagcaatggatccattcaatggtggagaaatttcaccaggaccagaagtgcaaacagacgaagaaattcttgattgggttcgtagagatggtgaaacagcattacacccatcttgtagtgctaaaatgggtcctgcttcagatccaatggcagtcgttgacccgttaacaatgaaagtccacggtatggaaaatttacgtgtagttgatgcatcagctatgccacgtacgacaaatggcaatatacatgcacctgttttaatgttagctgaaaaagcagcagacattatacgtggcagaaagcctttagagccacaatatattgattattataagcatggtgttcatgatgaaaatgaaggtgcaatcgaagtaaaaccatatgctaaataa

SEQ ID NO: 8561 - DNA, 480 bp, Staphylococcus aureus
  CDS (1)...(480)
atgaccaaaaatataaatgaaatgaaggcatgtattatgaacatttatgatgaatatagaagttatgtaatagaagaactggatgattgtctcacaatacaaaaaaataatgacactgcatattacgatgttctagaagcgataaatgatttatcaaatgattcattatgtgtgttaaatcatttatatattaacgaaggacaagaagaaacattcgagcaaaagtttttgcaacgtaataagcatttaaaaaacgttgatgggtttaaagcattaaggtttttaagacctagaacagctggtagacactatatcattattacgctgtgggaaaataggcaagcattttatcattggcaaaattcagctgagtacaagcatacacacaagcatcgtggcacttcgaaaggtgcagatgtaaaaataattaatcgtgaattatcatacaatattcgtattgaattagctgatatggtctag

SEQ ID NO: 8562 - DNA, 900 bp, Staphylococcus aureus
  CDS (1)...(900)
gtggaaagtatgaataaagagcaattagaaaaaatgaaaaatggaaaaggctttattgccgcattagaccaaagtggtggtagtacaccaaaagcacttaaagaatatggtgtaaacgaagatcaatatagcaatgaagacgaaatgttccaacttgttcacgatatgcgtacacgtgtggtaacttcaccttcattctcaccagataaaattttgggtgctattcttttcgaacaaacaatggatcgcgaagtagaaggcaaatacactgcagattacttagctgataaaggtgttgttccgttcttaaaagtagacaagggtcttgctgaagagcaaaatggtgttcaattaatgaaaccaatcgacaacttagacagcttattagatcgtgcaaacgagcgtcacatttttggtacaaaaatgcgttctaatattttagaattaaatgaacaaggtatcaaagacgttgttgaacaacaatttgaagtcgctaaacaaattattgctaaagggttagtgccaattatcgaaccagaagttaatattaacgcaaaagataaagctgaaattgaaaaagtattaaaagctgagcttaaaaaaggtttagacagcttaaatgctgatcaattagttatgttaaaattaacaattcctactgaagctaacttatacaaagacttagctgaacatccaaatgttgttcgtatcgttgtattatcaggtggttacagcagagaaaaagcgaacgaattacttaaaaataacgctgaacttatcgcaagcttctcacgtgcattagctagtgatttaagagctggacaatctaaagaagaattcgataaagcattaggtgacgctgtagaatcaatctacgacgcatctgtaaacaaaaactaa

SEQ ID NO: 8563 - DNA, 705 bp, Staphylococcus aureus
  CDS (1)...(705)
atgacgaatgtcttgtatcaacatggtacattaggtacgttaatggctggcttactagaaggaacagctacaattaatgaattgttagaacatgggaatttagggattgcaacgttaacagggtctgatggcgaagtaatatttttagacgggaaggcatatcatgctaacgagcataaagaatttatagaattaaaaggcgatgagaaagtaccgtatgcatcgattactaattttaaagcgagtaagacatttccattgcaacaattatcacaagatgatgtattcgcacaaattaaaaatgaaatgttaagtgagaatttattttcggctgttaaaatttatggcacatttaaacatatgcatgtacgaatgatgcctgctcagcaaccgccatatacacgtttgattgattcagcacgcagacaacctgaggaaaaaagacaagatattcgtggtgccattgttggattttttacaccagaattatttcatggcgtagggtctgctggttttcatatacattttgcggatgatgaaagagcttatggtggacatgttcttgactttgaagtggatgacgttgtcgttgagatacaaaactttgaaacattccaacaacatttcccggtaaataacgagacgtttgttaaagcgaaaatagactataaagatgtggcagaagaaattagagaagctgaatag

SEQ ID NO: 8564 - DNA, 792 bp, Staphylococcus aureus
  CDS (1)...(792)
atgaaacaaaagcaaactaaaatttctatggtaacagcttatgattttccaagtgctaaacaagtggaagcagcgggtattgatatgattcttgttggggattcacttggtatgactgtattaggttatgaaagtaccgtacaagtgacgttagcagatatgattcatcacggtcgtgcagtaagaagaggcgcaccaaatacatttgtagttgttgatatgccgattggtgcagtaggcatctctatgacacaagacttaaatcatgctctaaagctttatcaggagacgaatgcaaatgcaattaaagcagaaggagcgcatattacaccatttattgaaaaagcaacggcaattggtattcctgttgttgcacatttaggattaacacctcaaagtgttggcgttatgggatataaattacaaggtgcaacgaaagaagcagctgagcaacttattttagatgcgaaaaatgtagaacaagctggtgcagttgcgttagtacttgaagcaattccaaatgatttagcagaagaaattagcaagcatttaacaattccagtcattggtattggtgcaggaaaaggtacagatggtcaagtattggtttatcacgatatgttaaattatggtgttgaacataaagcgaaatttgtgaagcaatttgctgattttagtgttggtgtagatggtttaaaacaatacgatcaagaagttaaatctggtgcatttccatcagaagaatatacgtataaaaagaaaattatgaatgaggttaataacaatgactaa

SEQ ID NO: 8565 - DNA, 2361 bp, Staphylococcus aureus
  CDS (1)...(2361)
atgataatatattggtgtatgacagttaatggagggaacgaaatgaaagctttattacttaaaacaagtgtatggctcgttttgctttttagtgcaatgggattatggcaagtctcgaacgcggcagagcagcatacaccaatgaaagcacatgcagtaacaacgatagacaaagcaacaacagataagcaacaagtaccgccaacaaaggaagcggctcatcattatggtgaagaagcggcaaccaacgtatcagcatcagcgcagggaacagttgatgatataaacaacaaagtaacttccaacgcaccatctaacaaaccatctacagcagtttcagcaacagtaaacgaaacgcgcgatgtagatacacaacaagcctcaacacaaaaaccaactcgcacagcaacattcaaattatcaaatgctgaaacagcatcactttcaccacgaatgtttgctgccaatgcaccacaaacaacaacacataaaatattacatacaaatgatatccatggccgactagccgaagaaaaagggcgtgtcatcggtatggctaaattaaaaacagtaaaagaacaagaaaagcctgatttaatgttagacgcaggagacgcattccaaggtttaccactttcaaaccagtctaaaggtgaagaaatggctaaagcaatgaatgcagtaggttatgatgctatggcagtcggtaaccacgaatttgactttggatacgatcagttgaaaaagttagagggtatgttagacttcccgatgctaagtactaacgtttataaagacgggaaacgcgcatttaaaccatcaacgattgtaacgaaaaatggtattcgttatggaattattggcgtaacgacaccagaaacaaagacgaaaacaagacctgaaggcattaaaggtgttgaatttagagatccattacaaagtgtgacagcagaaatgatgcgtatttataaagacgtagatacatttgttgttatatctcatttaggtattgatccttcaacacaagaaacatggcgtggcgattacttagtgaaacaattaagtcaaaatccacaattgaagaaacgtattacagtcattgatggtcattcacataccgtacttcaaaatggtcaaatttataacaatgatgcattagcacaaacaggtacagcacttgcgaatatcggtaagattacatttaattaccgcaatggagaggtatcgaatattaagccgtcattgattaatgttaaagacgttgaaaatgtgataccgaacaaagcattagctgaacaaattaatcaagctgatcaaacatttagagcacaaacagcagaggttattattccaaataatacgattgatttcaaaggagaaagagatgacgttagaacgcgtgaaacaaatttaggaaacgcgattgcagatgctatggaagcatatggcgttaagaatttctctaaaaagactgactttgccgtgacaaatggtggaggtattcgcgcctctatcgcaaaaggtaaggtgacacactatgatttaatttcagtattaccatttggaaatacgattgcgcaaattgatgtaaaaggttcagacgtctggacggcttttgaacatagtttaggcgcaccaacaacacaaaaagatggtaagacagtattaacagcgaatggcggtttactacatatctctgattcaatccgtgtttactatgatatgaataaaccgtctggcaaacgaattaatgctattcaaattttaaataaagagacaggtaagtttgaaaatattgatttaaaacgtgtatatcacgtaacgatgaatgacttcacagcatcaggtggcgacggatatagtatgttcggtggccctagagaagaaggtatttcattagatcaagtactagcaagttatttaaaaacagctaacttagctaagtatgatccgacagaaccacaacgtatgttattaggtaaaccagcagtaagtgaacaaccagctaaaggacaacaaagtagcaaaggtagtaagtctggtaaagatgcacaaccaattggtaaagacaaagtgatgaatccagcgaaacaaccggcgccaagtaaagttgtgttgttgccaacgcatagaggaactgatagtagtggtagagaaggttctgatcgcgcattggaaggaactgctgtatcaagtaagagtgggaaacaattggctagcatgtcagcgcctaaaggtagcacacatgagaaacagttaccaaaaactggaaatgatcaaagttcaagcccagcagcgatgtttgtattagtagcaggtataggtttaatcgctactgtacgacgtagaaaagctagctaa

SEQ ID NO: 8566 - DNA, 276 bp, Staphylococcus aureus
  CDS (1)...(276)
atgactaaagaaacagataataaaaaaacagtagcgacttctgacaacaaagacacacagcaacaaaatcaacctgaagaagatgaacgtcaaggtttgaatggttatcgtaaaacagatcttgatttagaaatcgagcaagagctacgtgaaatgatgaaaacaggagaaaatgaaacgaaaaacgattacaaaaagtttaaagtgttttcacttatttcaacacttgtcattgtcattttagcaattataagatttgttcataaaatgatgtaa

SEQ ID NO: 8567 - DNA, 372 bp, Staphylococcus aureus; identical to SEQ ID NO: 4556
  CDS (1)...(372)

SEQ ID NO: 8568 - DNA, 297 bp, Staphylococcus aureus; identical to SEQ ID NO: 4557
  CDS (1)...(297)

SEQ ID NO: 8569 - DNA, 1812 bp, Staphylococcus aureus
  CDS (1)...(1812)
atggatacaaaagactttaaacgtttagaaaaaatgtattccccgcgatacttacccggattagatggattgagggcattcgcagttataggaatcattatttatcacttgaatgcacaatggttaagtgggggctttttaggagtagatacattcttcgttatttcaggttatttaataacaagtttgttgataagtgagtattatcggacgcaaaaaatcgatttgctagagttctggaagcgacgattgaaacgactcattccggcagtgttatttttaatctgtgtcgtgcttatgttcacactgatatttaaaccggaattgattatacaaatgaaacgagatgctattgcagctatattctatgtttcaaactggtggtacatttcacagaatgtagattattttaaccaatttgctattgaaccactcaaacatttatggtctttagccattgaagaacaattttacttgcttttcccattggttatcacgttcttattacatagatttaaaccgagaaatattattcaaacgctatttattgtatcgttgatttctttaggacttatgatagtgattcattttatcactggagataattcacgtgtgtattttgggacagatacacgactgcaaactttattgcttggttgtatattagcatttatttggccaccgtttgctttgaaaaaagatatttctaaaaagattgtcgtatcattagatattatagggatatctggttttgcggtgctaatgactttgttctttatagttggagaccaagatcaatggatatataatggaggattttacattatatcatttgcaactttattcattattgcgattgcggtacatccttctagtttatttgctaaatttttaagtatgaaacctttactaattataggtaaacgatcatatagcttatatttatggcattatcctatcattgtttttgtgaacagttattacgtacaaggacaaataccggtatacgtttatattatagaaattttgttaacagcgttaatggctgaaatttcgtatcgctttattgaaacacctatacgtaaaaaaggatttaaagcttttgcatttttacctaaaaagaagagtcaatttgctagaactgtgttagttatcttattattgattccatctatcatcgtgctcagtgggcaatttgatgcacttggtaaacaacatgaagctgagaagaaagagaagaagactgaatttaaaacaacgaagaaaaaagtcgttaaaaaagataaacaagaggataagcagacggcgaatagtaaagaggatattaaaaagtcatcaccactattaattggtgactcggttatggtagatattggtaatgtctttactaagaaaataccaaatgcacaaattgatggtaaagttggacggcaactcgttgatgctacaccaattgtgaaatcgcaatataaagactatgctaaaaaaggtcaaaaagttgtagtagagcttggtacaaatggggcatttacgaaagatcaattaaatgaactattggatagttttggaaaagcagacatatatttagtttctattagagtacctagagattatgaaggtagaataaataaattaatttatgaggcagctgaaaagcgctctaatgtacatctagtcgattggtataaagcttctgcaggtcatccggagtactttgcatatgacggtattcacttagaatatgcaggtagtaaagcgctgactgatttgattgtaaaaacgatggaaacacatgctacaaataagaaataa

SEQ ID NO: 8570 - DNA, 2409 bp, Staphylococcus aureus
  CDS (1)...(2409)
gtggctaatacgaaaaaaacaacgttagatatcactggtatgacttgtgccgcatgttcaaatcgtatagaaaagaaactgaataaacttgatgacgttaatgcccaagtgaatttaactacagagaaagcaactgttgagtataaccctgatcaacatgatgtccaagaatttattaatacgattcaacatttaggttacggtgtcgctgtagaaactgtcgaattagacattacaggcatgacttgtgctgcatgctcaagccgtattgaaaaagtgttaaataaaatggacggcgttcaaaatgcaacggtcaatttaacaacagagcaagctaaagttgactattatcctgaagaaacagatgctgataaacttgtcactcgcattcaaaaattaggttatgacgcgtctattaaagataacaataaagatcaaacgtcacgcaaagctgaagcgctacaacataaattgattaagcttatcatatcagcagtattatctttaccgctattaatgttaatgtttgtgcatcttttcaatatgcatataccagcactatttacgaatccatggttccaatttattttagctacacctgtacaatttattattggatggcaattttatgtaggtgcttataaaaacttaagaaatggtggcgccaatatggatgtacttgttgctgttggtacaagtgcagcatatttttacagtatttatgaaatggttcgttggctaaatggctcaacaacgcaaccgcatttatactttgaaacaagcgccgtactaattaccttaatcttattcggtaagtatttagaagctagagcgaagtctcaaacaaccaatgcgcttggcgaattattaagtttacaagctaaagaagcacgcattttaaaagacggtaatgaagtgatgattcctctaaatgaagtacatgttggagatacacttatcgttaaaccaggtgaaaagatacctgttgatggcaaaattattaaaggtatgactgccatcgacgaatctatgttaacaggtgaatctatccctgttgaaaagaatgttgatgacactgtaattggttcaacgatgaacaaaaacggtactattactatgacagcaacaaaagttggcggagacactgcgttggcaaatattattaaagttgtcgaagaagctcaaagttctaaagcgccgattcagcgattggcagatattatttctggttatttcgttcctatcgttgttggtatcgcactattaacatttatcgtgtggattactttagttacaccaggtacatttgaacctgcacttgttgcgagtatttccgttctcgtcattgcttgtccatgtgcattaggacttgctacaccaacttctattatggtaggtactggtcgcgctgctgaaaatggtattttatttaaaggtggcgagtttgttgaacgcacacatcaaattgataccatcgttttagataagacgggtaccattacaaatggtcgtccagtcgtgacagattatcatggtgacgatcaaacgctacaactacttgctactgctgaaaaagattctgaacacccattggcagaagccatagtcaattatgcaaaagaaaagcaattaacattaactgagacaacaacatttaaagcagtacctggtcatggaattgaagcaacgattgatcatcaccatatattggttggtaaccgtaaattaatggctgacaatgatattagcttgcctaagcatatttctgatgatttaacacattatgaacgagatggtaaaactgctatgctcattgctgttaattattcattaactggtatcatcgcagtggcagatactgtaaaagatcatgccaaagatgctataaaacaattgcatgatatgggcattgaagttgccatgttaactggcgataataaaaatactgctcaagctattgcaaaacaagtaggcatagatactgttattgcagatattttaccagaagaaaaagctgcacaaattgcgaaactacagcaacaaggtaagaaggttgtgatggttggtgacggtgtaaatgatgcacctgcattagttaaagctgatatcggtatcgccattggtacaggtacagaagttgccattgaagcagctgatattactattcttggtggcgacttgatgcttattcctaaagccatttatgcaagtaaagcaactattcgtaatattcgtcaaaatctattttgggcattcggctataatattgccggtatccctatagctgcattgggcttacttgcgccatgggttgctggtgctgcaatggcactaagttcagtaagtgttgtcacaaacgcacttagattgaaaaagatgcgattagaaccacgccgtaaagatgcctag

SEQ ID NO: 8571 - DNA, 1827 bp, Staphylococcus aureus
  CDS (1)...(1827)
atgaagtggctaaaacaactacaatcccttcatactaaacttgtaattgtttatgtattactgattatcattggtatgcaaattatcgggctgtattttacaaataaccttgaaaaagagctgcttgataattttaagaagaatattacgcagtacgctaaacaattagaaattagtattgaaaaagtatatgacgaaaagggctccgtaaatgcacaaaaagatattcaaaatttattaagtgagtatgccaaccgtcaagaaattggagaaattcgttttatagataaagaccaaattattattgcgacgacgaagcagtctaaccgtagtctaatcaatcaaaaagcgaatgatagttctgtccaaaaagcactatcactgggacaatcaaacgatcatttaattttaaaagattatggcggtggtaaggaccgtgtctgggtatataatatcccagttaaagtcgataaaaaggtaattggtaatatttatatcgaatcaaaaattaatgacgtttataaccaattaaataatataaatcaaatattcattgttggtacagctatttcattattaatcacagtcatcctaggattctttatagcgcgaacgattaccaaaccaatcaccgatatgcgtaaccagacggtcgaaatgtccagaggtaactatacgcaacgtgtgaagatttatggtaatgatgaaattggcgaattagctttagcatttaataacttgtctaaacgtgtacaagaagcgcaggctaatactgaaagtgagaaacgtagactggactcagttatcacccatatgagtgatggtattatcgcaacagaccgtcgaggacgtattcgtatcgtcaatgatatggcacttaagatgcttggtatggcgaaagaagacatcatcggttattacatgttaagtgtattaagtcttgaagatgaatttaaacttgaagaaattcaagagaataatgatagtttcttattagatttaaatgaagaagaaggactaatcgcacgtgttaactttagtacgattgtgcaggaaacaggatttgtaacgggttatatcgctgtgttacatgacgttactgaacaacaacaagttgaacgtgagcgtcgtgaatttgttgccaatgtatcacatgagttacgtacacctttaacttctatgaatagttacattgaagcacttgaagaaggtgcatggaaagatgaggaacttgcgccacaatttttatctgttacccgtgaagaaacagaacgaatgattcgactggtcaatgacttgctacagttatctaaaatggataatgagtctgatcaaatcaacaaagaaattatcgactttaatatgttcattaataaaattattaatcgacatgaaatgtctgcgaaagatacaacatttattcgagatattccgaaaaagacgattttcacagaatttgatcctgataaaatgacgcaagtatttgataatgtcattaccaatgcgatgaaatattctagaggcgataaacgtgtcgagttccacgtgaaacaaaatccactttataatcgaatgacgattcgtattaaagataatggcatcggtattcctatcaataaagtcgataagatattcgaccgattctatcgtgtagataaggcacgtacgcgtaaaatgggtggtactggattaggactagccatttcgaaagagattgtggaagcgcacaatggtcgtatttgggcaaacagtgtagaaggtcaaggcacatctatctttatcacacttccatgtgaagtcattgaagacggtgattgggatgaataa

SEQ ID NO: 8572 - DNA, 1374 bp, Staphylococcus aureus
  CDS (1)...(1374)
atgaaagacgctgcattaacacgtcgttttaacgaggtactggttaacgaaccaagcgcaagagatacggttgaaattttaaaaggaattcgcgaaaaatttgaagcacaccatcaagtcaaattacctgatgacgtattaaaggcatgtgtagacttatccattcaatatattccacaacgcttattacctgacaaagcaatcgatgtattagatattacagctgcacatttatctgcacaaagccctgctattgataaagtcgcgactgaaaaacgtatttctgaattggaacatgataagcgtaaagctgtaagtgctgaagaatataaaaaagcagatgacattcaaaatgaaatcaaatctctacaagataaattagaaaacagtaatggtgaacatactgcagtagcaacggtgcacgatatttctgataccattcaacgattaactggtattcctgtatctcaaatggatgccaatgacattgaacgtttaaaaaatatttctagtcgtttaagaagtaaaatcatcggtcaagataaagctgtagaaatggtttctcgtgccattcgtcgtaatcgagctggttttgatgatggcaatcgtccaattggtagcttcctatttgtcggtcctactggtgttggtaaaacagagcttgccaaacagttagccattgatttatttggtaataaagaggcactgattcgacttgatatgagtgaatatagtgatactactgctgtttctaaaatgattggtacaactgctggttatgtcggttatgacgataattcaaatacattaactgaaaaagtacgacgcaatccatattcagtcattctatttgatgaaattgaaaaggctaatccacaaatattaacattattactacaagtgatggatgatggtaatttaacagatggtcaaggtaacgtcatcaactttaaaaacacaatcattatttgtacgtcgaacgctggttttggtaacggtacagaccaagaatacgatgacattatgcaagaaatgaaaaaattcttccgccctgaatttcttaaccgcttcaatggtattgtggaattcttacacctagataaagaatcactacaggaaatcattaatttattgttggatgatgtccaagtaacatttgataaaaaaggtattacgatgaatgtctctcaagatgcaaaagattggttaattgaagagggatatgatgaagagttaggcgcacgcccattaagacgcattgttgaacaacaagtgcgtgacaaaataacagattattatttagatcatacagacgttaaacatgtggatttagatatcgaagacaacgaattagtcgtcaaaggtaaatcatga

SEQ ID NO: 8573 - DNA, 696 bp, Staphylococcus aureus
  CDS (1)...(696)
gtgatgtttatgaataacaattttttcaatagtgacttcgattctattttacgaagaatgatgcaagacatgcaaaactcaaatcagactagtaacaagaaatactatattaatggtaaagaagtttcaccggaagaattagcacaatttacgcaacaaggtggtaatcattctgccgaacaaagtgcgcaagcttttcaacaagcagcactaagacaacaaggtcaacaaagtggcaatggcaattatctagaacaaattggtcgtaacttaacgcaagaggctcgtgacggattattagatccagtcatcggtcgtgataaagaaatccaagaaactgcagaagtcttaagtagacgcactaaaaacaatcctatcctagtcggagaagctggagttggtaaaactgcgattgtcgaaggtttagcgcaagcaatcgttgaagggaacgtacctgcagcaatcaaagataaagaaattatatctatagatatttcatcgcttgaagctggaacgcaatatcgtggcgcctttgaagaaaacatccaaaagttagttgaaggcgttaaatcatcacaaaatgctgtgctcttctttgacgaaattcaccaaatcatcggttccggcgcaacaggaagtgattccggtagtaaagggttatctgatattttaaaaccagcattaagtcgtggttaa

SEQ ID NO: 8574 - DNA, 558 bp, Staphylococcus aureus; identical to SEQ ID NO: 4643
  CDS (1)...(558)

SEQ ID NO: 8575 - DNA, 1287 bp, Staphylococcus aureus; identical to SEQ ID NO: 4644
  CDS (1)...(1287)

SEQ ID NO: 8576 - DNA, 708 bp, Staphylococcus aureus
  CDS (1)...(708)
atgcaaatggctagaaaagttgttgtagttgatgatgaaaaaccgattgctgatattttagaatttaacttaaaaaaagaaggatacgatgtttactgtgcatacgatggtaatgatgcagtcgacttaatttatgaagaagaaccagacatcgtattattagatatcatgttacctggtcgtgatggtatggaagtatgtcgtgaagtgcgcaaaaaatacgaaatgccaattataatgcttactgctaaagattcagaaattgataaagtgcttggtttagaactaggtgcagatgactatgtaacgaaaccgtttagtacgcgtgaattaatcgcacgtgtgaaagcgaacttacgtcgtcattactcacaaccagcacaagacactggaaatgtaacgaatgaaatcacaattaaagatattgtgatttatccagacgcatattctattaaaaaacgtggcgaagatattgaattaacacatcgtgaatttgaattgttccactatttatcaaaacatatgggacaagtaatgacacgtgaacatttattacaaacagtatggggctatgattactttggcgatgtacgtacggtcgatgtaacgattcgtcgtttacgtgaaaagattgaagatgatccgtcacatcctgaatacattgtgacgcgtagaggcgttggatatttcctccaacaacatgagtag

SEQ ID NO: 8577 - DNA, 1284 bp, Staphylococcus aureus
  CDS (1)...(1284)
atgtcatcaatcgtagtagttgggacacaatggggagacgaaggaaaaggaaaaataacggatttcttggcagaacagtcagatgttatcgcgcgtttttcaggtggtaataatgcaggccataccattcaatttggcggagaaacatataaattacatttagtaccatctggtatcttttacaaagacaaattagcggtaatcggtaacggagtcgttgttgatccagttgcactattgaaagaattagacggattaaatgaacgtggcattcctacaagtaatttacgtatatctaatcgtgcacaattgattttaccatatcacttagcacaagatgaatatgaagaacgtttacgcggtgagaataagattggtacaactaaaaaaggtatcggtccagcatatgtagacaaagttcaacgtatcggtattcgtatggcagatttacttgaaaaagaaacattcgaaagattattaaaatcaaacattgaatataaacaagcatatttcaaaggtatgtttaacgaaacatgtccatcatttgatgatatctttgaagaatattatgcagcaggtcaacgtctaaaagaatttgtaacagacacatcaaaaatcttagacgatgcatttgtagcagatgaaaaggtacttttcgaaggtgcgcaaggtgtaatgttagatatcgaccatggtacatatccattcgttacatcaagtaatccaattgcaggtaacgttactgttggtacaggtgtaggtcctacattcgtttcaaaggtaattggtgtatgtaaagcttatacatcacgtgttggtgatggtccattccctactgaattattcgatgaagatggacatcatattagagaagttggtcgtgaatacggtacaacaacaggacgtcctcgtcgtgtaggttggtttgattcagttgtattacgtcactctcgtcgtgtaagtggtattacagatttatctattaactcaattgatgttttaacaggcctagacacagtgaaaatttgtacagcttatgaattagacggtaaagaaattgctgagtacccagcaaacttagatcaattaaaacgttgtaaaccaatctttgaagagttaccaggttggacagaagacgtaacaagtgtgcgtactttagaagaattacctgaaaatgcacgtaagtatttagagcgtatttcagaattatgtaatgtacaaatttctatcttctcagttggtccagatagagaacaaacaaacctattaaaagaattgtggtag

SEQ ID NO: 8578 - DNA, 621 bp, Staphylococcus aureus
  CDS (1)...(621)
atgaaaaaatggacaaatcgattaatgacaatcgctggtgtggtacttatcctagtggcagcatatttgtttgctaaaccacatatcgataattatcttcacgataaagataaagatgaaaagattgaacaatatgataaaaatgtaaaagaacaggcgagtaaggataaaaagcagcaagctaaacctcaaattccgaaagataaatcgaaagtggcaggctatattgaaattccagatgctgatattaaagaaccagtatatccaggaccagcaacacctgaacaattaaatagaggtgtaagctttgcagaagaaaatgaatcactagatgatcaaaatatttcaattgcaggacacactttcattgaccgtccgaactatcaatttacaaatcttaaagcagccaaaaaaggtagtatggtgtactttaaagttggtaatgaaacacgtaagtataaaatgacaagtataagagatgttaagcctacagatgtagaagttctggatgaacaaaaaggtaaagataaacaattaacattaattacttgtgatgattacaatgaaaagacaggcgtttgggaaacacgtaaaatctttgtagctacagaagttaaataa

SEQ ID NO: 8579 - DNA, 1401 bp, Staphylococcus aureus
  CDS (1)...(1401)
atggatagaatgtatgagcaaaatcaaatgccacataacaatgaagctgaacagtctgtcttaggttcaattattatagatccagaattgattaatactactcaggaagtgttgcttcctgagtcattttataggggtgcccatcaacatattttccgtgcaatgatgcacttaaatgaagataataaagaaattgatgttgtaacattgatggatcaattatcgacggaaggtacgttgaatgaagcgggtggcccgcaatatcttgcagagttatctacaaatgtaccaacgacgcgaaatgttcagtattatactgatatcgtttctaagcatgcattaaaacgtagattgattcaaactgcagatagtattgccaatgatggatataatgatgaacttgaactagatgcgattttaagtgatgcagaacgtcgaattttagagctatcatcttctcgtgaaagcgatggctttaaagacattcgagatgtcttaggacaagtatatgaaacagctgaagagcttgatcaaaatagtggtcaaacaccaggtattcctacaggatatcgagatttagaccaaatgacagcagggttcaaccgaaatgatttaattatccttgcagcgcgtccatctgtaggtaagactgcgttcgcacttaatattgcacaaaaagttgcaacgcatgaagatatgtatacagttggtattttctcactagagatgggtgctgatcagttagccacacgtatgatttgtagttctggtaatgttgactcaaaccgcttaagaaccggtactatgactgaggaagattggagtcgttttactatagcggtaggtaaattatcacgtacgaagatttttattgatgatacaccgggcattcgaattaatgatctacgttctaaatgtcgtcgattaaagcaagaacatggcttagacatgattgtaattgactacttacagttgattcaaggtagtggttcacgtgcgtccgataacagacaacaggaagtttctgaaatctctcgtacattaaaagcattagctcgtgaattagaatgtccagttatcgcgttgagtcagttatctcgtggtgttgaacaacgacaagataaacgtccaatgatgagtgatattcgtgaatctggttcgattgagcaagatgccgatatcgttgcattcttataccgtgatgattactataaccgtggcggcgatgaagatgatgacgatgatagtggttttgagccacaaacgaatgatgaaaacggtgaaattgaaatcatcattgctaagcaacgtaatggtccaacaggcacagttaagttacactttatgaaacaatataataaatttacagatatcgattatgcacatgctgatatgatgtaa

SEQ ID NO: 8580 - DNA, 807 bp, Staphylococcus aureus
  CDS (1)...(807)
atggcatttcacgataaaacagcaacacaagtgacaaacattgaactgaacgtaagagacttagacttaatgacaacattttacaaaaacattttaggactatccgttaaaagttctgacgataacacaaccgtattatctgttgggactggtggccatactctaacgttacatttattagaagacggccgtcagacttccccacgagaagcaggactttttcatatagcatttttattaccaactactgaggatctagctaacttcttatatttcgtggcacaaaaaaatatgggcatcggcgctggtgatcatttagtaagtgaagctttatatttcaacgaccccgaaggtaatggtattgaagtctatcgcgatagaccttcatcttcatgggaatggcaaaatggcaaagttaaaatggatactttagaagttgatagccaaaccttattaacacatcgtactgatgaaggttggcaaggaatgccagcaaaaggcatgattggacacttacatttaaaaacacatgacttagacgcagcatatcaatgttacattgaacaattaggattccaacatgtgtctgattttccacgtgcgctatttatgtcaacgaatcattatcaccatcatattgctgctaatacttggcaatccaatcaagcaagacaaaacaatgcacaaagttatggattaacacatgttgatatttatcaacccgacgcctcaacacatacatttacggcaccagaagggtttgacatcacagttcattcaaatactgaccttgttccagaaaaataa

SEQ ID NO: 8581 - DNA, 435 bp, Staphylococcus aureus; identical to SEQ ID NO: 4403
  CDS (1)...(435)

SEQ ID NO: 8582 - DNA, 597 bp, Staphylococcus aureus
  CDS (1)...(597)
gtgatggaacatatttttagagaaggacaaaatggtgcgccgacgctaatattattgcatggtacaggtggtgatgagttcgatttattaccattaggcgaagcattgaatgaaaattatcacttgttaagtattagaggacaagtttcagaaaatgggatgaaccgttatttcaaacgtcttggtgaaggtgtttatgatgaagaagatttggcatttcgtggacaagaattgttaacgttcattaaagaagctgctgaacgttatgattttgatattgaaaaggctgtgcttgttggattttcaaatggatcaaatatagcgattaacttaatgttgcgttcagaagcaccatttaaaaaagcattgttatatgcaccattatatccaattgaagtaacgtcaacaaaaaatttatcagatgtcagtgtgttgctttctatggggaaacatgatccaattgtgccattagctgcaagtgaacaagtcattaacttgtttaagacacgtggggcacaagtcgaagaagtttgggtgaatgatcatgaaattacagaaactggattaacggctggtcaacaattacttgggaaataa

SEQ ID NO: 8583 - DNA, 447 bp, Staphylococcus aureus
  CDS (1)...(447)
atgaaagtaatttttacacaagatgttaaaggtaaaggtaaaaaaggtgaagttaaagaagtaccagtaggttatgcaaataacttcttattgaaaaagaattatgctgtagaagcaacaccaggtaaccttaaacaattagagttacagaaaaaacgtgcaaaacaagaacgccaacaagaaattgaagatgctaaagcattaaaagaaactttatcaaacattgaagttgaagtatcagcaaaaactggtgaaggtggtaaattgtttggatcagtaagtacaaaacaaattgccgaagcactaaaagcacaacatgatattaaaattgataaacgtaaaatggatttaccaaacggaattcattccctaggatatacgaatgtacctgttaaattagataaagaagttgaaggtacaattcgcgtacacacagttgaacaataa

SEQ ID NO: 8584 - DNA, 1956 bp, Staphylococcus aureus; identical to SEQ ID NO: 4276
  CDS (1)...(1956)

SEQ ID NO: 8585 - DNA, 489 bp, Staphylococcus aureus
  CDS (1)...(489)
gtgtttaatatgtttcattttataattatggtggtatataacatgaattataacatattggaggttaaggaaatgccctttacaatgaaaggttaccccgaaaaatggaaagaatttgaagtaattaaacggcaaaaagcgatagaaattgcgaatgcaatgttaaaagaaggatatcttgaaaaagatgttgttcctattgcggcgaaaaaagcgaaagattggtatcgagcgttatcgaaagaagaaatcaaagcattagaagaagagaacttcgtacaattccatacagcaacaatggaaaaaacagaggtggatagtgaatatgcaacaactgataatgaagaacatattcaagaacaatcaaatcaagataaatcgtactttgatagcgaatcaattggcaaccaaagtggtggcgttcgacaaagagaaccgcttatggatggtccacatccaaaagttgtggaatcatttaaagacgtataa

SEQ ID NO: 8586 - DNA, 708 bp, Staphylococcus aureus; identical to SEQ ID NO: 4400
  CDS (1)...(708)

SEQ ID NO: 8587 - DNA, 1986 bp, Staphylococcus aureus
  CDS (1)...(1986)
gtgaatagaggtggaataatgaatcggcagtccactaagaaagctttactaataccatttgtcatcatgatcatcacagcaattgttttaatgggtgtatggtttatctttaatagtcttatagcactaattgcatctatcgttcttgtcgtgatgattattgttagcatcgttttattcagacaagctttaatgaaaatggatagttatgtagatggtttgagtgcgcaaatttcaacaacaaataataaagcaatcaaacatttaccaattggtatcattgttttagatgaaaatgatcacatcgaatgggttaaccaatttatgacagatcatatggaagcaaatgtcatttctgaatctgtaaatgaagtatttccaaacattttaaagcaattagatagagtgaaatccgttgaaatagaatataatcagtatcatttccaagtacgttattctgagaatgatcactgcctctatttctttgatataactgaacaagtacaaacaaatgaactatatgaaaattctaaaccaatcattgcgacattatttttagataactacgatgagattactcaaaatatgaatgatacgcagcgttcggaaatcaattcaatggtaacgcgtgttattagtcgatgggcaactgagtataatatattctttaaaaggtatagttccgatcaattcgtagcctatttaaatcaaaaaatattagctgacttagaagaatctaaatttgatatcttgagtcaactacgtgaaaaaagtgttggttatcgtgcccaattaacattaagtatcggtgttggtgaaggtactgaaaatttaatcgacttaggtgaattatcacaatcaggcctagacttagcattaggacgtggtggtgaccaagttgcaattaaaagtattaatggtaatgtgcgtttctatggcggtaagactgacccgatggagaaacgtactcgtgtaagagcacgtgtgatctcacatgcgttaaaagatattcttgcagagggtgacaaagtcattatcatgggacataaacgtcctgacttagatgcaattggtgcagcaatcggtgtgtctagatttgcaatgatgaataatttagaagcatacatcgtattaaatgagactgacattgatccaacattacgacgcgtgatgaacgaaattgataaaaagccagagttaagagagcgatttattacatcagatgatgcttgggatatgatgacatctaagacaaccgtagtgattgttgatacgcataaaccggaactggttttagatgaaaatgtcttaaataaagcaaatcgtaaagttgttatcgatcatcatagacgtggtgaaagcttcatctctaacccattgttggtatatatggaaccatatgcaagttcgacagctgaattggtaacagagttactggaatatcaaccaacagaacaacgtttaacacgtcttgaatcaacagtgatgtatgcaggtattattgtagatacaagaaactttacattacgaacaggatcaagaacattcgatgcagcgagttatctacgtgcacatggtgcagatacgattttaacgcaacatttcttaaaagatgatgtggatacttacattaatcgatctgaattaattcgaactgtaaaagtcgaagataatggcatagccattgcgcatggttcagaagataaaatttatcatccagtaacagttgcacaagcagcagatgaactgttaagtttagaaggtattgaagcatcatatgttgttgcgagacgtgaagataatctgattggtatatctgcgcgttcactcggttcagtaaatgtccagttaacaatggaagcacttggtggcggtggacatttaaccaatgctgcaacacaacttaaaggtgtgacagtcgaagaggcgatagcacaattacaacaagcaattacagaacaattaagtaggagtgaagatgcatga

SEQ ID NO: 8588 - DNA, 3006 bp, Staphylococcus aureus
  CDS (1)...(3006)
gtgaaaaacaatcttaggtacggcattagaaaacataaattgggagcagcatcagtattcttaggaacaatgatcgttgttgggatgggacaagataaagaagctgcagcatcagaacaaaagacaactacagtagaagaaaatgggaattcagctactgataataaaacaagtgaaacacaaacaacggcaactaacgttaatcatatagaagaaactcaatcatataacgcaacagcaacagaacaaccgtcaaacgcaacacaagtaacaactgaagaagcaccaaaagcagtacaagcaccacaaactgcacaaccagcaaatttagaaacagttaaagaagaggtagttaaggaagaagcgaaacctcaagttaaggaaacgacacaacctcaagacaatagcggagatcaaaaacaagtagatttaacacctaaaatggctacacaaaatcaagcagcagaaacacaagttgaagtggcacagccaagaacggtatcagaaagtaatccacgtgtgacaagatcagcagatgtagttgaagctaaggaagctagtgacgcgaaagtggaaacgggtacagatgtgacaagtaaagttacagtagagagtggttctattgaggcacctcaaggaaataaagtagaaccgcatgctggtcaacgtgtcgtattgaaatacaaattgaaattcgaaaagggtttacacaaaggggattattttgatttcaccttgtctaataatgtaaatacttatggagtttcaacagctagaaaagtaccagaaatcaaaaatggttcagtcgtaatggcgacaggacaacttcttggaaatgggaaaattaggtatacatttacagattatattgattataaagtaaatgtgactgctgatttagaaatcaatttatttattgaccctaaaactgtacaaagcaatggacaacaaacaataacttcaacgttgaatgataaggaaacaaaaaacacattgccaatagaatataatccaggagtaagtaatagctatgctaatgtaaatggttctattgaaactttcgataaaggaaataatagattcactcatgtggcttacataaagccacaaaatgggcataaatcagatagcgtttcaattactggtacattaactcaaggtagtaaagcagatgggaaggctcctactgtaaaagtatatgaagttttaaaggatgctaatgaattaccacaaagtgtatacgcaaatgtatcagattcttcaatgtttaaagatgtaactgaggaaatgaaagataaattaaaagtagaaaataatgggaactataaattagatattgaaaaattagaaaaaagttatgttatacactatgacggtgaatacttaagtgggtcagatcaagtgaacttcagaacacacatgtttggatatccagaacagcagtataagtattactatactcatttaggatacaaacttacatgggataatggcttagttttatatagtaataaagcaaaaggcgatggcacaaatggaacaataacagaatcgaataatatgacatttgatgaagaatatggaactggagttattacaggtcaatatgataagaatttagtaactactgttgaagaagaatatgattcttcaactcttgacattgattaccacacagctatagatggtgaaggtggttatgttgatggatacattgaaacaatagaagaaacggattcatcagctattgatatcgattaccatactgctgtggatagcgaagcgggtcacgttggaggatacactgaatcctctgaggaatcaaatccaattgactttgaagaatcgacacatgaaaattcaaaacatcacgctgatgttgttgaatatgaagaagatacaaacccaggtggtggtcaagtaacaactgagtctaacttagttgaatttgacgaagagtctataaaaggtattgtaactggcgcagtgagcgatcatacaacagttgaagatacgaaagaatatacaactgaaagtaatctgattgaactagtagatgaactacctgaagaacatggtcaagcacaaggaccaatcgaggaaatcactgaaaacaatcatcatatttctcattctggtttaggaactgaaaatggtcacggtaattatggcgtgattgaagaaatcgaagaaaatagccacgttgatattaagagtgaattaggttatgaaggtggccaaaatagcggtaaccagtcattcgaggaagacacagaagaagacaaacctaagtatgaacaaggtggtaatatcgtagatatcgatttcgacagtgtacctcaaatccaaggtcaaaataatggtaaccagtcattcgaagaagatacagagaaagacaagcctaagtatgaacaaggtggtaacatcattgatatcgatttcgacagtgtgccacaaattcatggattcaataaacataatgaaattattgaggaagatacaaataaagataagccaaattatcaattcggtggacacaacagtgttgattttgaagaagatacacttccaaaagtaagcggtcaaaacgaaggtcaacaaacgattgaagaagatacaacgccgccaacgccaccgacaccagaagtaccgagtgagccaggcgaaccaacgccgccaactccagaggtaccaagtgagccggaaacaccaacaccgccaacgccagaggtaccagctgaacctggtaaaccagtaccaccagccaaagaagaacctaaaaagccttctaaaccagtggaacaaggtaaggtagtaacacctgtcattgaaatcaatgaaaaggttaaagcagtggcaccaactaaacaaaaacaatctaagaaatctgaactacctgaaacaggtggagaagaatcaacaaacaaaggtatgttgttcggcggattattcagcattctaggtttagcattattacgcagaaataaaaagaatcacaaagcataa

SEQ ID NO: 8589 - DNA, 1539 bp, Staphylococcus aureus
  CDS (1)...(1539)
atgacatcaaaacatcaacaaaaggggtctatcgtcaatcgtttcttgaatagtgttgaaaaaattggaaataaattgccagatcctagcgtcttattctttttaatgtgtgtgggcttagccattatgacgtgggttatctcattatttaatgtatctgttaagcatccaggtacgcatcaaaccatttatattaaaaatataattagccatgatggatttacgatgataatgaatgatacgattaaaaatttctcagagttcccagcattaggcttagtactagcagtgatgattggtataggtgttgcagagaaaacaggatacttcgacaagttaatgatttctgttgtgaatcgcgcaccacgtttcttaattttaccgactattatattaattggtattttaggtagtacagccggcgatgctgctacaattatcttgccgccgctcgcagcgatgctttttattaaaattggctatcaccctatcgctggactaacaatggcatatgcttccgctgtaggtggctttgccgcaaatatagttgttggtatgcaagatgttttggtctattcatttacagaaccagcaacacgtatcgtttcagattctattaaaacaaacgttgctatgaactggtactttatcgcagcgagtgtcgttgtattacttcctacgatattgctagttacaactaaactgattattcctaggttaggtcaatatgatgatcgtttaatgcatgatgatcatgaagaaacgtcttcacatattactgacaaagaagcacatgctttaaaatgggcaaatatcagtttcatagtcacaattattttattaattattacagccattcctgaacatagctttttaagaaatgctaaaacaggcagcttactagacgatgcgccattaattaacggtgtcggattaattattcttgtcgtatttttagtacctggattagtttatgggattttaagcaaagaaattaaaaatacaaaagacttaggtaaaatgtttggcgatgctgtaggatcaatgggaacatttatcgttattgtgttttttgcagcacagctacttgcatatttaaagtggagtaatttaggaattatcgctgctgttaaaggtgccaaattattagaacatcaaaacggtattgtattgatactaggtattattgtactgagtgcaatggtcaacatgttaatcggaagcgcatcggctaaatggggtattttaggaccgatattcgtaccaatgttaatccttatcggctttcatcccgcatttacacaagtcatttaccgtgtaggagattcaattaccaatccaattacaccgatgatgccgtacttacctttattattaacttatgcacaaaaatacgataaacgcatgaaactcggagccttactttctagtttaatgccgtattcaatcgcgctaagtattgtgtggacagtatttgtcattatttggttcttattaggtatccctgttggaccaggtggtccgatattcgttaaataa

SEQ ID NO: 8590 - DNA, 819 bp, Staphylococcus aureus
  CDS (1)...(819)
atgaaacgtttagaaaataaagttgcagtcgtaacaggagcaagtacaggtatcggacaagcttctgcaatcgctttagctcaagaaggtgcgtatgtattggcggtagacatagctgaagcggtatcggagactgtcgataaaattaaaagtaatggtgacaaagcaaaggcttatgttgtggatattgcaagcgaacaacaaattgacaattttgcatcagaaattagagaacagtttgggcatgttgatgtgttatttaataatgccggtgtggataatgcggctggtagaattcatgagtatccaacagacgtatatgacaagattatgaatgtagatatgcgtggaacatttttgatgacgaaaatgatgttacctttaatgatgactaaaggtggctctattgttaacacatcttcattttcaggacaggcagcagatttgtatcgctcaggatataatgctgcgaaaggggcagtgattaattttactaaatccattgcaatcgaatatggtagagatggcattcgagctaatgcaattgcaccaggtacgattgaaaccccgttagtagataaactgacaggtactagcgaagataaggaaggcaaagcattcagagaaaatcagaaatggatgacaccgctgggacgtttaggtaaaccagaagaagtaggcaagctcgttgtctttttagcatctgatgagagttcatttattactggtgaaacaattcgcattgatggcggtgttatggcttacacatggcctggcgagatgttgagtgatgattcgtggaagcggacattggaataa

SEQ ID NO: 8591 - DNA, 819 bp, Staphylococcus aureus; identical to SEQ ID NO: 4635
  CDS (1)...(819)

SEQ ID NO: 8592 - DNA, 1302 bp, Staphylococcus aureus; identical to SEQ ID NO: 4636
  CDS (1)...(1302)

SEQ ID NO: 8593 - DNA, 861 bp, Staphylococcus aureus
  CDS (1)...(861)
gtgtttataatgagtaaaatttttgtaactggtgcaacgggccttatcggcattaaattagttcaaagactaaaagaagaggggcatgaggttgctggttttactacatctgagaatggtcaacaaaagctagctgctgttaatgtaaaagcatatattggtgatatattaaaagctgatactattgatcaagcgttagcagattttaaaccagaaatcattatcaaccaaattacggatttaaaaaatgttgatatggcagcaaatacgaaagtacgtattgaaggttctaaaaacttaattgatgcggcgaaaaagcatgacgttaagaaagtaattgcccaaagtattgcctttatgtatgaacctggcgaaggattagcaaatgaggaaacttcacttgattttaactcaactggtgatagaaaagtaacggttgatggtgtggttggtctagaagaagaaacggctcgtatggatgaatacgttgttttacgttttggttggttatatggcccaggtacttggtacggaaaagatggcatgatttataatcaatttatggatggtcaagtgacactttcagatggtgtaacatcatttgtgcatcttgatgatgcagttgaaacatctattcaagctattcattttgaaaatggtatttataatgtagcagatgatgcacctgttataggttctgaatttgcagaatggtataaagaacaacttggtgttgaaccaaatattgatattcaacctgcgcaaccatttgaacgtggcgtaagcaatgagaagtttaaagcacaaggtggtactctgatttataaaacttggaaagatggcatgaatccaattaaataa

SEQ ID NO: 8594 - DNA, 1515 bp, Staphylococcus aureus
  CDS (1)...(1515)
atgactttatatttagatggtgaaacactaacaattgaggatattaaatcatttttacaacaacaatcaaagattgaaattattgatgatgcgttagaacgtgtcaaaaaaagtagagcggtagttgaacgcattattgaaaatgaggaaacggtttacggtatcactacaggttttgggttatttagtgatgtacgtatagacccgacgcaatataatgaattacaagtgaatctgatacgctcacatgcctgtggactaggtgagccattttcaaaagaagtagcattagtcatgatgattttacgattgaatacattattaaaaggtcattcaggtgccactttagaattagtgagacaattacaattttttataaatgaacgtattataccgataatcccacagcaaggctctctcggtgcatcaggagatttagcgccattatcacatttagcattagcattaattggcgaagggaaagtattgtacagaggtgaagaaaaggatagtgacgatgtattaagagaattaaatagacaacctttgaaccttcaggctaaagaaggtttagcattgattaatggtacgcaagctatgacagctcaaggtgtcattagttatatagaagcagaagatttaggttaccaatctgaatggattgctgcattaacgcatcagtctcttaacggcattatagatgcatatcgacatgatgtgcacgctgttcgtaattttcaagaacagattaatgtggcagcgcgtatgcgtgattggttagaaggatcaacattaacgacgcgacaagcagaaatacgtgtacaagatgcatatacgttgcgttgtataccacaaatccatggcgcgagttttcaagtattcaattatgttaaacagcaattagaatttgaaatgaatgcggctaatgataatccacttatatttgagggagcaaatgaaacgtttgttatttcaggtggtaacttccatggacaaccaattgcttttgcattagatcatcttaaattaggtgtaagtgaattagcaaacgtatcggaacgtcgtctagagcgactagtaaatcctcaattaaatggtgatttaccagcatttcttagcccagagccaggattgcaaagtggcgcgatgattatgcaatatgctgctgcaagtctcgtttctgaaaataaaactttagcgcatccagcgagtgttgattctatcacttcatctgcgaaccaagaagatcacgtatctatgggaactacagctgctagacatggttatcaaattattgaaaatgcaagacgtgtgttggcaatcgaatgtgttattgcattacaagcagcagagttgaaaggtgtcgaaggattatcaccaaaaacacgtcgcaagtatgatgagtttcgaagtatcgtgccatccattacacatgaccgtcaatttcataaagatattgaagcggttgcacagtatttaaagcaatcaatttatcaaacgactgcatgtcactaa

SEQ ID NO: 8595 - DNA, 978 bp, Staphylococcus aureus
  CDS (1)...(978)
atgaaaatgaataaattagtcaaatcatccgttgctacatctatggcattattattactttctggtactgctaatgctgaaggcaaaataacaccagtcagcgtaaaaaaagtcgatgacaaagttactttatacaaaacaacagccacagcagattctgataaatttaaaatttcacagattttaacattcaatttcatcaaagataaaagttatgataaagatactttagtgcttaaagctactggaaatattaactcaggctttgtgaaacctaatcctaatgactatgacttttcaaaattatattggggagctaaatacaatgtatctataagctcacaatctaatgattcagtaaacgtcgttgattatgcaccaaaaaatcaaaatgaagagtttcaagttcaaaatactttaggctatacatttggtggtgacattagtatctctaatggtttatctggtggacttaatggaaatacagctttttctgaaacaattaattataaacaagaaagttacagaacaacattaagtcgcaacacaaattataaaaatgttggctggggagttgaagcacataaaattatgaataatggttggggaccttatggacgagatagcttccacccaacatatggtaatgaactcttcttagctggcagacaaagcagtgcatacgctggccaaaacttcatagcgcaacaccaaatgccattactatctagaagtaacttcaatccagaatttttaagcgtactatcacacagacaagatggcgctaaaaaatctaaaattacagtaacttatcaacgtgaaatggatttataccaaattcgttggaatggcttctactgggcaggcgcaaattataaaaactttaaaactagaacatttaaatcaacatatgaaattgattgggaaaatcacaaagtgaaattgttagatacaaaagaaactgaaaacaataaatag

SEQ ID NO: 8596 - DNA, 966 bp, Staphylococcus aureus
  CDS (1)...(966)
atgaacttaaaattaaatagaaagaaagtgatttctatgattaaaaataaaatattaacagcaactttagcagttggtttaatagcccctttagccaatccatttatagaaatttctaaagcagaaaataagatagaagatatcggccaaggtgcagaaatcatcaaaagaacacaagacattactagcaaacgattagctataactcaaaacattcaatttgattttgtaaaagataaaaaatataacaaagatgccctagttgttaagatgcaaggcttcatcagctctagaacaacatattcagacttaaaaaaatatccatatattaaaagaatgatatggccatttcaatataatatcagtttgaaaacgaaagactctaatgttgatttaatcaattatcttcctaaaaataaaattgattcagcagatgttagtcagaaattaggctataatatcggcggaaacttccaatcagcgccatcaatcggaggcagtggctcattcaactactctaaaacaattagttataatcaaaaaaactatgttactgaagtagaaagtcagaactctaaaggtgttaaatggggagtgaaagcaaattcattcgttacaccgaatggtcaagtatctgcatatgatcaatacttatttgcacaagacccaactggtccagcagcaagagactatttcgtcccagataatcaactacctcctttaattcaaagtggctttaatccatcatttattacaacattgtcacacgaaagaggtaaaggtgataaaagcgagtttgaaatcacttacggcagaaacatggatgctacatatgcatatgtgacaagacatcgtttagcggttgatagaaaacatgatgcttttaaaaaccgaaacgttacagttaaatatgaagtgaactggaaaacacatgaagtaaaaattaaaagcatcacacctaagtaa

SEQ ID NO: 8597 - DNA, 1935 bp, Staphylococcus aureus
  CDS (1)...(1935)
atggtgactgcattgtcagatgtaaacaacacggataattatggtgctgggcaaatacaagtattagaaggtttagaagcagtacgtaaaagaccaggtatgtatataggatcgacttcagagagaggtttgcaccatttagtgtgggaaattgtcgataatagtatcgatgaagcattagctggttatgcaaatcaaattgaagttgttattgaaaaagataactggattaaagtaacggataacggacgtggtatcccagttgatattcaagaaaaaatgggacgtccagctgtcgaagttattttaactgttttacatgctggtggtaaattcggcggtggcggatacaaagtatctggtggtttacatggtgttggttcatcagttgtaaacgcattgtcacaagacttagaagtatatgtacacagaaatgagactatatatcatcaagcatataaaaaaggtgtacctcaatttgacttaaaagaagttggcacaactgataagacaggtactgtcattcgttttaaagcagatggagaaatcttcacagagacaactgtatacaactatgaaacattacagcaacgtattagagagcttgctttcttaaacaaaggaattcaaatcacattaagagatgaacgtgatgaagaaaacgttagagaagactcctatcactatgagggcggtattaaatcttatgttgagttattgaacgaaaataaagaacctattcatgatgagccaatttatattcatcaatctaaagatgatattgaagtagaaattgcgattcaatataactcaggatatgccacaaatcttttaacttacgcaaataacattcatacgtacgaaggtggtacgcatgaagacggatttaaacgtgcattaacgcgtgtcttaaatagttatggtttaagtagcaagattatgaaagaagaaaaagatagactttctggtgaagatacacgtgaaggtatgacagcaattatatctatcaaacatggtgatcctcaattcgaaggtcaaacgaagacaaaattaggtaattctgaagtgcgtcaagttgtagataaattattctcagagcactttgaacgatttttatatgaaaatccacaagtcgcacgtacagtggttgaaaaaggtattatggcggcacgtgcacgtgttgctgcgaaaaaagcgcgtgaagttacacgtcgtaaatcagcgttagatgtagcaagtcttccaggtaaattagccgattgctctagtaaaagtcctgaagaatgtgagatattcttagtcgaaggggactctgctggggggtctacaaaatctggtcgtgactctagaacgcaggcgattttaccattacgaggtaagatattaaatgttgaaaaagcacgattagatagaattttgaataacaatgaaattcgtcaaatgatcacagcatttggtacaggaattggtggcgactttgatctagcgaaagcaagatatcacaaaatcgtcattatgactgatgccgatgtggatggagcgcatattagaacattgttattaacattcttctatcgatttatgagaccgttaattgaagcaggctatgtgtatattgcacagccaccgttgtataaactgacacaaggtaaacaaaagtattatgtatacaatgatagggaacttgataaacttaaatctgaattgaatccaacaccaaaatggtctattgcacgatacaaaggtcttggagaaatgaatgcagatcaattatgggaaacaacaatgaaccctgagcaccgtgctcttttacaagtaaaacttgaagatgcgattgaagcggaccaaacatttgaaatgttaatgggtgacgttgtagaaaaccgtagacaatttatagaagataatgcagtttatgcaaacttagacttctaa

SEQ ID NO: 8598 - DNA, 807 bp, Staphylococcus aureus; identical to SEQ ID NO: 4545
  CDS (1)...(807)

SEQ ID NO: 8599 - DNA, 2406 bp, Staphylococcus aureus
  CDS (1)...(2406)
atggcaaagcaaaaactagtaatgattggtaacggtatggcgggcattcgaacaatcgaagaaatattagaacgcgccaacgatttatatgatattacggtaattggtaaagaaccttatccaaactataaccgcatcatgctttcaaatattttacaaaataaaatgacagttgaagaaacaattatgaatccatatgagtggtatgaggaacatggtattgagttaattacaaatgatcctgtaattgaagtagatagagcaaatcaatcagttactactgcaaatggtattgaagtatcatacgataaattgatttttgcgacaggttctaaagcattcgtcattccagttccaggttcgacattaccgagtgtaattggttggagaacgattgatgatactgaacaaatgatgaatattgctaagactaaaaagaaagcaattgtaattggtggaggcttactaggtttagagtgtgcacgtggtttattagatcaaggtatggaagtaacggtgttacatttagctgaatggttgatggaaatgcagctagaccgtaaagctggaaatatgcttaaagcagatctagaaaagcaaggtatgaagtttgaaatgcaagccaacacaactgaaatcttaggagaagatgatgttgaaggtgttaaattggctgatggacgcgagattccggcagacttagttgttatgtcagtaggtattcgaccatacacagaagtagccaaagaatcaggtctagatgttaatcgtggtattgttgtcaatgatgtgatgcaaacaagtgatagcaatgtatatgcagttggtgaatgtgcagaacataacggcaaagtttatggactcgttgcaccactatatgaacaaggtaaagtattagctgatcatttaacaaataaagaaacgaacggatacaagggatcaacaacatttacgtcattaaaagtttctggttgtgacttgtatagtgctggtcaaattgtagaaaatgcagaaattaaaggtattgaaatatttaatagcgttgataataactataaaaaaatctttttaaaagacggtaatgtagttggtgcagtactatatggtgatatcgatgatggttcacgcttttataacatgatgaaaaaaggtgaatctactgaagactacacactggtatcattgcttactaaaggtggagaagaggcatcgctatcaattgctgatatggctgatgatgaaacaatttgtggttgtaatggtgttgataaaggtactatagtaaatgctattacggaaaatggctttacaacagttgaagaagtaacggctaaaacaaaagcggggaattcatgtggtaaatgtaaaccgcaaattgctcaaatattgcagcacaccttaggagatgactttgttgccgcaaaacctgctggtatatgtggttgtactgatttgacacgcgatcaaattgtaacgcaaataagagcgaaaggtttaaaaacatctaaagaagttcgacatgttttaaactttaaaaataaaggtggatgtccaaaatgtcgaccagcaatcaactattatttaaacatggtttatccacatgatcatgaagatgaaagagaatcaagatttgctaacgaacgttaccatgcgaatattcaaaatgatggtacattttctgttatacctcaaatgcgtggaggtgttacagatgcagaccaactgattcgtctaggagaagtggctaaaaaatatcatgtaccattagttaaagtgacaggttcacaacgtgttggtttgtatggagttaaaaaagaagaattaccaaatatatgggaagacctaggtatgcgttcagcatcagcttatggtaagaaaacacgctcagttaaaagctgtgttggtaaagagttttgtcgatttggtacgcaatacacgacacgacttggcattcgtttagaaaaaacatttgaatacatcgatacacctcataaattcaaaatgggtgtatcaggctgcccaagaagttgtgttgaatcaggtgttaaagattttggtattatctcagttgaaaatggattccaaatctatatcggtggtaatggaggtacagaagttgaaaaagctgaatttttaacaactgtagaaacagaagatgaagtaatcaaattatgtggtgctttgatgcaatattatcgcgaaacaggtatatatgctgaaagaacagcgccatggttaagaagacttggatttgaaaatgtaaaagaagtcttacttaacccagaaagacaaaatgaactatttgaacgcattatggatgctaaaaaagcagtcgaagctgaaccttgggaagcaataactagcaatgcgcaagcacgtaaaatttttgaagtggagaaggtgtaa

SEQ ID NO: 8600 - DNA, 315 bp, Staphylococcus aureus
  CDS (1)...(315)
atggaaacaaaagaaaaaattaaagtgacaactatagatgaattaacacccctaattggaaaaaaggttattgtcaaaggcaaagaggtaggattgtttttaacagaaagtggcaaaattcatgcgattcacaatatctgtccacacaaacaaggaccattgtctgaagggacagtgagtggagaatatgtattttgcccgctccacgatcaaaaaattgatttaaatacaggtattgttcaagaacctgatgaaggttgtgtagatgtttatgaggtagaagttacagacgggaacgtatatatatgtctgtag

SEQ ID NO: 8601 - DNA, 1194 bp, Staphylococcus aureus
  CDS (1)...(1194)
atgattttggtgaaggtgaaacgaatgtacaaaacaaaaggtggctttcaacttacattacagacattaagtttagtggttgggtttatggcttggagtataattgcgccattaatgccctttattaaacaagatgtcaatgttactgaaggtcaaatatcaatcattttagcgataccagttattttgggatcggtgctccgtgtgccatttggttatctaacaaacattgttggcgctaaatgggtattctttactagttttatcgtattgttattcccgatatttttcttaagccaagcacaaacaccgggtatgttaatggcgtcagggtttttccttggtgtaggtggtgcaattttctcagttggtgttacatcagttcctaaatatttccctaaagaaaaagtaggtctagcaaatggtatttatggtatggggaatatcggtacagcagtttcttcatttttagcaccgccaattgcgggtattattggttggcaaacaactgttagaagttacttaattattatcgctttatttgcattaattatgtttatatttggtgatacacaagaacgtaaaattaaagtgccattaatggcacaaatgaaaacattatctaaaaactacaaattatattacttgagttattggtatttcattacttttggtgcttttgtagcatttggtattttcttacctaactacttagtaaatcattttggaattgacaaagtagatgctggtattcgatcaggtgtattcattgcgctggcaacattcttaagaccaataggtggcattttaggtgataaatttaatgcagttaaagtattgatgattgattttgttgttatgattatcggtgccgttattttaggtatttcagaccatatcgcattatttactgtaggctgtttaacaataagtatttgtgcaggtattggtaacggcttaatcttcaaattagtaccatcatacttctcaaatgaagcgggatccgcaaatggtatcgtatcaatgatgggtggtttaggaggattcttcccaccactagtaatcacgtacgtagctaatttaacaggttcaagccatttagcatttattttcttagcggtatttggatgtattgcattatttaccatgcgtcatttataccaaaaagaatatggctcattgaaaaacggttga

SEQ ID NO: 8602 - DNA, 1134 bp, Staphylococcus aureus
  CDS (1)...(1134)
atgatggaattcactattaaaagagattattttattacacaattaaatgacacattaaaagctatttcaccaagaacaacattacctatattaactggtattaaaatcgatgcaaaagaacatgaagttatattaactggttcagactctgaaatttcaatagaaatcactattcctaaaactgtagatggcgaagatattgtcaatatttcagaaacaggctcagtagtacttcctggacgattctttgttgatattataaaaaaattacctggtaaagatgttaaattatctacaaatgaacaattccagacattaattacatcaggtcattctgaatttaatttaagtggcttagatccagatcaatatcctttattacctcaagtttctagagatgacgcaattcaattgtcggtaaaagtgcttaaaaacgtaattgcacaaacgaattttgcagtgtccacctcagaaacacgcccagtactaactggtgtgaactggcttatacaagaaaatgaattaatatgcacagcgactgactcacaccgcttggctgtaagaaagttgcagttagaagatgtttctgaaaacaaaaatgtcatcattccaggtaaggctttagctgaattaaataaaattatgtctgacaatgaagaagacattgatatcttctttgcttcaaaccaagttttatttaaagttggaaatgtgaactttatttctcgattattagaaggacattatcctgatacaacacgtttattccctgaaaactatgaaattaaattaagtatagacaatggggagttttatcatgcgattgatcgtgcatctttattagcacgtgaaggtggtaataacgttattaaattaagtacaggtgatgacgttgttgaattatcttctacatcaccagaaattggtactgtaaaagaagaagttgatgcaaacgatgttgaaggtggtagcctgaaaatttcattcaactctaaatatatgatggatgctttaaaagcaatcgataatgatgaggttgaagttgaattcttcggtacaatgaaaccatttattctaaaaccaaaaggtgacgactcggtaacgcaattaattttaccaatcagaacttactaa

SEQ ID NO: 8603 - DNA, 1362 bp, Staphylococcus aureus
  CDS (1)...(1362)
atgtcggaaaaagaaatttgggaaaaagtgcttgaaattgctcaagaaaaattatcagctgtaagttactcaactttcctaaaagatactgagctttacacgatcaaagatggtgaagctatcgtattatcgagtattccttttaatgcaaattggttaaatcaacaatatgctgaaattatccaagcaatcttatttgatgttgtaggctatgaagtaaaacctcactttattactactgaagaattagcaaattatagtaataatgaaactgctactccaaaagaaacaacaaaaccttctactgaaacaactgaggataatcatgtgcttggtagagagcaattcaatgcccataacacatttgacacttttgtaatcggacctggtaaccgctttccacatgcagcgagtttagctgtggccgaagcaccagccaaagcgtacaatccattatttatctatggaggtgttggtttaggaaaaacccatttaatgcatgccattggtcatcatgttttagataataatccagatgccaaagtgatttacacatcaagtgaaaaattcacaaatgaatttattaaatcaattcgtgataacgaaggtgaagctttcagagaaagatatcgtaatatcgacgtcttattaatcgatgatattcagttcatacaaaataaagtacaaacacaagaagaatttttctatacttttaatgaattgcatcagaataacaagcaaatagttatttcgagtgatcgaccaccaaaggaaattgcacaattagaagatcgattacgttcgcgctttgaatgggggctaattgttgatattacgccaccagattatgaaactcgaatggcaattttgcagaagaaaattgaagaagaaaaattagatattccaccagaagctttaaattatatagcaaatcaaattcaatctaatattcgtgaattagaaggtgcattaacgcgtttacttgcatattcacaattattaggaaaaccaattacaactgaattaactgctgaagctttaaaagatatcattcaagcaccaaaatctaaaaagattaccatccaagatattcaaaaaattgtaggccagtactataatgttagaattgaagatttcagtgcaaaaaaacgtacaaagtcaattgcatatccgcgtcaaatagctatgtacttgtctagagagcttacagatttctcattacctaaaattggtgaagaatttggtgggcgtgatcatacgaccgtcattcatgctcatgaaaaaatatctaaagatttaaaagaagatcctatttttaaacaagaagtagagaatcttgaaaaagaaataagaaatgtataa

SEQ ID NO: 8604 - DNA, 153 bp, Staphylococcus aureus; identical to SEQ ID NO: 4686
  CDS (1)...(153)

SEQ ID NO: 8605 - DNA, 1380 bp, Staphylococcus aureus
  CDS (1)...(1380)
atggatttagatacaattacgagtatttcaacaccaatgggtgaaggggcaattggaattgttcgattgtctggaccgcaagccgttgaaattgctgacaaattatataaaggaaaacatcttttaaatgatgttccatcacatacgattaattatggtcatattattgatccagagtctaaagaagtggttgaagaagttatggtgtctgtgttaagagcaccaaaaacatttacacgcgaagatattatagaaattaattgtcatggtggtattttaactattaatagagtgctggaacttactatgacatatggcgctagaatggctgagccaggtgaatttacaaaacgtgcctttttaaatggtcgtattgatttatctcaagctgaagcagttatggactttattcgctcgaaaacagatagagcttctaaagttgcgatgaatcaaattgaaggtcgtctaagtgacttaatcaaaaaacaacgtcaatctatattagagatactcgctcaagtggaagtgaatattgattatcctgaatacgatgatgttgaagatgcgactactgaatttcttttagagcagtctaaagaaatcaaacaggaaattaatcgtttattagataccggtgcgcagggtaaaattatgcgtgaaggtttatctacagttattgttggtaaaccaaacgtaggtaaatcatcgatgttaaataatttaatacaagataataaagcgattgtaactgaggtagcgggtacgactagagatgtcttagaagagtacgtcaatgttcgtggcgtgccattaagattagttgatactgctggtatacgtgagacagaagatatagtagagaagattggtgttgaacgctctagaaaggctcttagccaagcagacttaattttatttgtattaaacaataacgaagcattgactcaagaagattacacattatatgaagtggttaaaaatgaagatgtaatcgtaattgttaataaaatggatttagagcaaaatatagatattaatgaagttaaagatatgataggcaatacgccattaattcaaacttcaatgttaaaacaagaaggtattgatgaattagaaatacaaattcgagatttgttctttggtggagaagtacaaaatcaagatatgacttatgtttctaattcaagacatatttctttattaaaacaagcaagacaaacgatacaagatgcgattgatgcagcagaatctggtgtgcctatggatatggtacaaattgatttaactagaacttgggaaatattaggagaaattattggtgagactgcaagtgatgaactcatcgatcagttattcagtcaattctgcttaggtaaatag

SEQ ID NO: 8606 - DNA, 1878 bp, Staphylococcus aureus
  CDS (1)...(1878)
gtggctcaagaatatgatgtaatcgttataggtgcgggacatgcaggtgtagaagcaggtttagcatctgcaagacgtggtgctaaaacattaatgctaacaataaatttagataatattgcatttatgccatgtaacccatctgtaggaggaccagctaaaggtatcgttgttcgtgaaattgatgctttaggtggacaaatggcaaaaacaatcgataaaacacacattcaaatgagaatgttaaatactggtaaaggacctgctgtaagagcactaagagcgcaagcagataaagtactttatcaacaagaaatgaaacgcgtgattgaagatgaagaaaatttgcatataatgcaaggtatggtagacgaacttattatagaagataatgaagttaaaggtgtacgtacaaatattggtacagagtatttatctaaagcagtaattattacaacgggaacatttttacgtggtgaaatcattttaggtaatatgaagtattcaagtggaccaaatcaccaattaccatcaatcacattatcagacaatttaagagaacttggttttgatattgttcgttttaaaacaggtacaccaccgcgtgtaaattcaaaaacaattgactattcgaagactgaaatacaaccaggtgacgatgtaggtcgtgcattcagctttgaaacaacagaatatatattagatcaattgccatgttggctaacgtatactaatgctgaaacacacaaagttatcgatgataatttacatctatctgcaatgtattcagggatgattaaaggaaccgggccacgttattgcccttcaattgaagataaatttgttcgatttaatgataagccgcgacatcaacttttcttagagcctgaaggtcgtaatacaaatgaagtatatgtgcaaggattgtctacaagtcttcctgagcatgtgcaacgtcaaatgttagagacgataccaggtcttgaaaaagcagatatgatgcgtgctggctacgcaattgaatatgatgccattgtgccaacgcagttatggcctacacttgaaacgaaaatgattaaaaacctatacactgcaggtcaaattaatggtacatctggttatgaagaagcagcaggacaaggattgatggcaggtattaacgctgcaggtaaagtgttaaacacaggcgaaaagatattaagtcgttcagatgcatatattggtgtattaatcgatgatcttgtaactaaaggtactaatgaaccttatcgtttactaacatcacgtgcagaatatcgtttgttactacgtcatgataatgctgatttgagattgacggatatgggatatgaacttggtatgatttctgaagaacgatatgcacgttttaatgaaaaacgtcagcaaattgattcggaaattaagcgtttatcagatattcgtattaaaccaaacgaacatacgcaagcgattattgaacaacatggtggttctcgcttaaaagatggtattttagctatcgatttattacgcagacctgaaatgacttacgatataattttagaaattttagaagaaaaacatcaattgaatgcagatattgaagaacaagtagaaatacaaacaaaatatgaaggttatatcaataaatcactacaacaagttgagaaagttaagcgtatggaagaaaagaaaattccagaagacttagattatagtaagattgatagtttggcgactgaagcgcgagaaaaattatcagaagtaaaacctttaaatattgcacaagcttctagaatatcaggggtaaatccagcagacatatctatattattgatttacttagaacaaggtaaactccaaagggtgagtgactaa

SEQ ID NO: 8607 - DNA, 720 bp, Staphylococcus aureus
  CDS (1)...(720)
atgactgtagaatggttagcagaacaattaaaagaacataatattgaattaaatgagactcaaaaacatcagtttcaaacatattatcgtttacttgttgaatggaatgaaaagatgaatttgacaagtattacagatgaacacgatgtatatttgaaacatttttatgattccattgcacctagtttttattttgattttaatcagcctataagtatatgtgatgtaggcgctggagctggttttccaagtattccgttaaaaataatgtttccgcagttaaaagtgacgattgttgattcattaaataagcgtattcaatttttaaaccatttagcgtcagaattacaattacaggatgtcagctttatacacgatagagcagaaacatttggtaagggtgtctacagggagtcttatgatgttgttactgcaagagcagtagctagattatccgtgttgagtgaattgtgtttaccgctagttaaaaaaggtggacagtttgttgcattaaaatcttcaaaaggtgaagaagaattagaagaagcaaaatttgcaattagtgtgttaggtggtaacgttacagaaacacatacctttgaattgccagaagatgctggagagcgccagatgttcattattgataaaaaaagacagacgccgaaaaagtatccaagaaaaccagggacgcctaataagactcctttacttgaaaaataa

SEQ ID NO: 8608 - DNA, 759 bp, Staphylococcus aureus
  CDS (1)...(759)
atgacgatattatcagtgcaacatgtttcaaaaacatatggtaaaaagcacacatttcaagcacttaaagatattaactttgacatacaaaaaggcgaattcgttgcgattatggggccttctggatcaggtaagacaaccttattaaatgtactaagttcaattgaccaaatttctagcggtagcgtgattgctaacggacaagagcttaataaacttaatcaaaaagcacttgccaaattccgtaaagaatcattaggtttcatcttccaagattacagtattctgccgacattaactgttaaagaaaacattatgttacctttatctgttcaaaaaatgtcgaaggcaacaatggaaaaaaattataaagcgatcacgacagcattaggtatttatgacctgggaaataaataccctagcgaattatctggtggtcaacaacaaagaactgcagcagcgagagcatttgttcataaacctcaaatcatatttgcagatgagccaacaggcgcactcgactcgaaaagtgcaaatgacctattacaacgtttggaagaaatgaataaatcgtttgatatcacaattgtcatggttacacatgatccagttgcagcaagttttgcagaacgtgtcatcatgctaaaagatggccaaattcatacacaactttatcaggaaggacgttctaaacaggccttttatgaagacattgtacatcttcaatcagtattaggtggtgtctcaaatgacatttaa

SEQ ID NO: 8609 - DNA, 957 bp, Staphylococcus aureus
  CDS (1)...(957)
atgaactatcaagttcttttatattataaatatacgacgattgatgaccctgaacagtttgctcaggatcacttagccttttgtaaagcacaccatttaaaaggtagaattcttgtttctacagaaggtattaacggcacattatctggtacaaaagaagaaaccgaacaatatatggcacatatgcatgccgatgaacgattcaaagatatggtgtttaaaattgatgaagctgaaggacatgcttttaagaaaatgcatgtacgtcctcgaaaagagattgttgctttagatttagaagaagacgtcgatccaagacacacaactggccaatatttatcacctgtagaatttagaaaagctcttgaagatgatgacacagtcattattgatgcacgtaatgattatgaatttgatttaggtcatttccgaggtgcaattcgtccaaatatcacgcgctttagagatttgcctgactggattaaagagaataaagcgttatttgcagataaaaaagtggttacgtactgtactggtggcattcgatgtgaaaaattttctggatggcttttaaaagaaggtttcgaagatgtagcacaacttcacggcggtattgctacatatggtaaagaccctgaaacaaaaggtcaatattgggacggtaaaatgtatgtatttgatgatcgtatcagtgttgatatcaaccaagttgaaaaaacaattattggtaaggattggtttgatggcaaaccatgtgaacgttatattaattgcgctaacccagaatgtaataaacaaatattagtttctgaagaaaatgaagccaaatatttaggtgcatgctcttatgaatgtgctaaacatgagcgtaatcgttatgttcaagcaaataatattagtgataatgagtggcaacaacgtttaacaaactttgatgatttacatcaacatgcttag

SEQ ID NO: 8610 - DNA, 516 bp, Staphylococcus aureus
  CDS (1)...(516)
atgactaactttacttttgatggtgcacacagtagtttagaattccaaattaaacatttaatggtttctaaagtgaaaggttcatttgatcaatttgatgtagctgttgaaggagatattaatgacttcagtactttgaaagctactgcaacaattattccaagctcaattaacactaaaaacgaagcacgtgataaccacttaaaatctggtgatttctttggtactgatgaatttgataaaatcacatttgaaacaaaatcagttactgaaaacaaagttgttggtgatttaacaattaaaggtatcactaacgaagaaacattcgacgttgaattcaacggagtaagtaagaatcctatggatggttctcaagtaacaggtattattgttactggtacaatcaatagagaaaaatatggcattaactttaaccaagcacttgaaactggtggagtaatgctaggtaaagatgtgaaattcgaagcatcagctgaattttcaatctcagaataa

SEQ ID NO: 8611 - DNA, 1125 bp, Staphylococcus aureus; identical to SEQ ID NO: 4524
  CDS (1)...(1125)

SEQ ID NO: 8612 - DNA, 768 bp, Staphylococcus aureus
  CDS (1)...(768)
atgattgatattcataaccatatattagttgatatagatgatggtcctaaaacaattgaaaagagtattgcactattaaagcaagctaaggatgaaggtgtaacaagtattgtagcgacacctcatcatttgcatccgagatatgataatacatttcaacaagtgcttgtgaaattggcggagttaagaacgcacccagaagttcaagcattggatattaaattatttcccgggcaagaaattagaattacagattcgattctgcaaggcttagataatggtagtattcaaggtattaatcgttcgaaatatttgctaattgaatttccaacgggcgaagtaccacattatacaaaacaattgttttttgaaatacaatcgagaggctacataccaatcattgcacatcctgaaagaaatagaagtatcgccaaaaatccagaaatattatatgaacttgttgcaaatggggcattgagtcaattaacatcgagttctttagttggtggatttggaaaaaacattcaaaagttatcattacaatttatagaatgtaatttggctcattttgtagcttcagatgcacattcatgtgaccaaagaccatttttgatgcaagaattatttcacaatcataaattgaagaaatattcgaatgacattgaagcattacttcgaaatgccagttcagtaatcaatgataattttgtttatttagacagaccgactaagccaggaaaagtgaagtcgtttttgaaatggttttaa

SEQ ID NO: 8613 - DNA, 360 bp, Staphylococcus aureus
  CDS (1)...(360)
atgattttgcgttacgcaacgaatttaaaacttgcgaaagagctataccaagccagtaaacctaaattgcaagaagataagggtatgattgaactgtttgaacatacttttggcttgcaaaaagaacttgtaaaatacgtaggcattgcagaagcaactactgctgctttatactcagctagctttatcaataaaaacatttctcgccttgcttccctatcaacaataggtattttaagtgtagctgcttacaaacatttcgaagctggtcatggaaaaaaaggtgcgcaacatgcattagatttattaggacttgctactttaagtttactagatacattttcttgtaataaaaaatag

SEQ ID NO: 8614 - DNA, 693 bp, Staphylococcus aureus
  CDS (1)...(693)
atgaattattcaccgaagcaaggtgtaaggagtcatggcttaccacacgatccatttaaaagtagtacagtaccacgtccgatagggtggatctctactgtatcgaaagatgggaaagataatttagcaccttatagtcagtatcaaaacttaacttgggatccgcctatggttatgttcgcagcaaatcaatctgttcttggtgatcatgagcgtaaagatacagtaaaaaatgcagaagagacagggtggtttgtatggaacatggccacgtatgatttaagagaagctgttaatttatcgtcgaaggcactaccacctgaagaggatgaatttgaatatgcaggtgtgacgaaagaagcatgtatagaagcaccaggttatcgagtcaaagaatcgccagtacattttgaatgtgagtacgttcaaacgattcgtattccgacaggagaccctgtatcaacagttgatattgttataggaagagttgctcaggttcatattgacgataaggtcattcttgataatggtaaattagacattaagtctattaaacctattgctaggttaggatattatgattacacggttgtgaatgaaatatttgaaatgaaagcaccatcagcttctaaagaagagcttgcaggtttagaaggaagaaattttgataatcaatcagataacaagaaataa

SEQ ID NO: 8615 - DNA, 7035 bp, Staphylococcus aureus
  CDS (1)...(7035)
atgagtaaaagacagaaagaatttcatgacagcttagcaaacgaaaaaacaagagtaagactttataaatctggaaaaaattgggtgaaatccggaattaaagaaatagaaatgttcaaaataatgggactaccatttattagtcatagtatggtgagtcaagataatcaaagcattagtaaaaaaatgactggatacggactgaaaacgacggcagtgatcggcggggctttcacggtaaacatgttgcatgaccagcaagcttttgcggcttctgatgcaccattaacatctgaattaaatacacaaagtgaaacagtaggtaatcaaaattcaacgacaatcgatgcatcaacatcaacagccgattccacaagcgtaacgaaaaatagtagttcggtacaaacatcaaatagtgacacagtctcaagtgaaaagtctgaaaatgtcacttcgacaactaatagtacaagcaatcaacaagaaaaattgacatctacatcagaatcaacatcctcaaagaatactacatcaagttctgatactaaatctgtaacttcaacttcaagtacagaacaaccaattaatacatcaacaaatcaaagtactgcatcaaataacacttcacaaagcacaacgccaacttcagccaacttaaacaaaactagcacaacgtcaactagcactgcgccagtaaaacttcgaactttcagtcgcttagctatgtcaacatttgcgtcagcagcgacgacaaccgcattaactgctaatacaattacagttaataaagataacttaaaacaatatatgacaacttcaggtaatgccacttatgaccaaagtacaggggtcgtaacgttaacgcaagatacaacaagccaaaaaggtgccattacattaggaacacgtattgactctaataagagttttcatttttctggaaaagtaaatttaggtaacaaatatgaagggcatggaaatggtggagatggtatcggttttgccttttcaccaggtgtattaggtgaaacagggttaaacggtgccgcagtaggtattggtggcttaagtaacgcatttggcttcaaattagatacgtatcacaatacatctacgccaaattcatcagcaaaggcgaaagctgacccatctaatgtagctggtggaggtgcgtttggtgcctttgtaacaacagatagttatggtgttgcatcaacatatacatcaagttcaacagctgataatgctgcaaagttaaatgttcaacctacaaacaacacgttccaagattttgatattaattataatggtgatacaaaagttatgaccgttaaatatgcaggtcaaacatggacacgtaatatttcagattggattgcgaaaagtggtacgaccaacttttcattatcaatgacagcctcaacaggtggcgcgacaaatttacaacaagtacaatttggaacattcgaatatacagaatctgctgttacacaagtgagatacgttgatgtaacaacaggtaaagatattattcccccaaaaacatattctggaaatgttgatcaagtcgtgacaatcgataatcaacaatctgcattgactgctaaaggatataactacacatctgtcgatagttcatatgcatcaacttataatgatacaaataaaactgtaaaaatgacgaatgctggacaatcagtgacatattattttactgatgtaaaagcaccaactgtaactgtaggcaatcaaaccattgaagtgggtaaaacaatgaatcctattgtgttgactacaacagataatggtacagggactgtgacaaatacagttacaggattaccaagcggattaagttatgatagtgcaacgaattcaatcattgggacaccaacaaaaattggtcaatcaacagtgacagtagtatctactgaccaagcaaataacaaatcgacgacaacttttacaataaatgttgtggatacgacagcaccaacagtgacgccaataggagataaatcatcagaagttttttctccaatatcaccgattaatattgctacgcaggacaatagtggtaatgcagtaacaaatacagtcacaggattgccgtctggattaacattcgatagcacaaataatactattagtggtacaccaacaaacattggtacaagtactattacaatcgtttctacagatgcgagtggtaacaaaacgacaaccacttttaaatatgaagtaacaagaaatagcatgagtgattccgtatcaacatcgggaagtacccaacaatcacaaagtgtgtcaacaagtaaagctgactcacaaagtgcttctacgagcacatctggttcaataatgacttcaacatcagctagtacctcgaaatcgacaagtgtaagcctatctgattctgtgagtgcatctaagtcattaagcacatctgaaagtaatagtgtatcaagctcaacaagcacaagtttagtgaattcacaaagtgtatcatcaagcatgtcaggttcagttagtaaatcaacatcattaagcgattttatttcgaactctagcagtactgaaaaatcagagagtgtctcaacaagtacatctgattcattgcgtacatcaacatcgttaagtgattcagtaagcatgagtacatcaggaagcttgtctaagtcacaaagcttatcaacaagtacatccgattcggctagtacatcacaatcggtaagtgatagtacatcaaattcaattagtacatcagaatcattaagtgagtcaggtagtacatcagaatctataagtatttctaatagcatttcgaattcagtgagtgcatcaacaagcaaattggaatcacaaagtacatcaatatcattaagtacaagtgattctaaatcgatgagtacatcagaatcattaagcgattcaacgagcacaagtgattcagtatctggatcattaagtgtagcggggtcacaaagtgtctcaacaagcacatcagactcaatgagcacgtctgaaatgataagcgattctatgagtacaagtggatcattagctgcatcagacagtaaatcaatgtccgtaagtagttcgatgagcacgtctcagtcaggtagtacatcagaatcattaagtgattcgataagtacatcggattctgacagtaagtcattatcattgagtacaagtcagtctggctcaacaagcacatcaacatcaacaagtagttcagtacgtatgtcggaatcacaaagtacatctggttcaatgagcacaagtcaatccgattcaacaagcatatcaacgtcgtttagtgattcaacgagtgatagcaaatcagcttcaactgcatcaagtgaatcaatatcacaaagtgtatcaacaagtacatctggttcggtaagtacttcgacatcgttaagtacaagtaattcagaacgcacatcaacatctatgagtgattccacaagcttaagtacatcagagtctgattcaacgagcgactcaacgtcgacgagcgattctatcagtgaagcgatatctggttcagagagtacgtctatatcattaagtgaatcaaatagtacaagtgattcagagtcgaaaagtgcatctgcttttttaagtgaatcattgagtgaaagcacatccgaatcaacatcagagtcattaagtggttcaacaagcgatagtacgtctttatcagatagtaattctgaatctggtagcacttcaacatcattaagtaattcaacaagtggtagtgcgtccatttcaacatcgacaagtggtagcgcatcaacatcaacggttaagagcgagagtgtctcaacatcattgagcacatcaacgagtacaagtttgtctgactctacaagtctgtcaacatcattaagtgattccacaagtggtagcaagtccaattcactaagtgcatcaatgtcgacaagtgattcaatcagtacaagaaaatcagagtcattaagtgcatcgacatcattaagcggttcaacgagtgagagtgaatccggctcaacatcatcaagtgaaagtaaatccgattcaacatcaatgagcctgagcatgtcccaatcaacatcaggaagtacaagtgtgtcaacatcagaaagtttgtctgactcaacgagtacatcattgtcactgagtgcctcaatgaatcaaagtggtgtagactcaaactcagcaagccaaagtgcctcaacctcaacaagtacaagcacgagcgaatccgattcacaaagcacatcatcatatacaagtcagtcaacaagccaaagtgaatccacatcgacatcaacgtcactaagcgattcaacaagtatatctaaaagtacaagccaatcaggttcaacaagcacatctgcatcattaagtggttcagaaagcgaatccgattcacaaagcatatcaacaagcacaagtgagtcaaaatcagaaagtacatccacatcgctcagtgactcaacaagtacaagcaactcaggatcagcaagtacgtcaacattgctcagtaactcagcaagcgcaagtgaatccgattcgtcgtcaacatcattaagtgattcaacgtcagcgtcaatgcaaagcagtgaatccgattcacaaagcacatcaacgtcattaagtaattcacaaagtacatcaacatcaattcgaatgtcgactattgcaagtgagtcagtatcggaaagtacatcagaatctggttcaacatcagaaagtacaagtgaatccgattcgacatcaacatcattaagcgattcacaaagcacatcaagaagtacaagtgcatctggatcggcaagtacatcaacatcaacaagtgactctcgtagtacatcagcttcaactagtacttcgatgcgtacaagtacgcttgattcacaaagtatgtcgctttcaacaagtacatcaacaagtgtgagtgattcaacgtcattatctgatagtgtgagtgattcaacatcagactcaacaagtacgagtacatctggttcgatgagtgcgtctatatcgttaagtgattcgacaagcacatcaacatcggctagtgaagtaatgagcgcaagcatatctgattcacaaagtatgtcagaatctgtaaatgattcagaaagtgtaagtgaatctaattctgaaagtgactcaaaatcgatgagtggttcaacaagcgtaagtgattctggctcattgagcgtctcaacgtcattaagaaaatcagaaagtgtaagcgagtctatttcattgagtggctcacaatcgatgagtgattcagtaagcacaagcgattcgtcatcattaagtgtatcgacgtcacaaagaagttcagaaagcgtgagtgaatctgattcattaagtgattcaaaatcaacaagtggttcgacttcaacaagtacatcaggttcattgagcacttcgacatcattaagtggttcagaaagtgtaagcgagtctagctcgctaagtgattcaatatcaatgagtgattctactagtacaagtgactccgactcattaagtggatcaatatctttaagtggttccacaagtcttagcacttctgattcattaagtgattcaaaatcattgagtagctcgcaaagtatgagtggatcagaatcaacgtcaacaagtgtgagcgattcgcagtcaagctcaacaagtaatagtcaatttgactctatgagcatcagtgcatcagaaagtgactcaatgtctacaagcgattcgtctagcatcagtggatcaaattcaacgagtacatcactttcaacatctgattcaatgagcggaagcgtatcagtttcaacatcgacaagtttaagtgactcaatatcaggttcaataagtgtaagtgactcgagctcaacgagtacatcagagtcgctaagtgattctatggcacaaagccagtcaacaagcacaagcgcatcaggttcgttaagcacatcgatatcattatcaatgtcagcaagtgcaggtacattgacatcacaaagcacgtcggtgtcgacgtcattatcaacatcagacagtataagtgattcgacttcaataagtatcagtggttcacaaagtgctgtagaatcagaatctacaagtgattcaacttctatcagtgactcagaatcattgagtacatctggctcaacaagtagttcaacttcaacaagcacatcagaatcattaagtacgtctaattcaggttcaacaagcgtatcagaatcattaagtacgtctggttcaggttcaacgagcgtatctgactcatcgagtacgtctagttccttaagtacatctggttcaacgagtgtatctgactcaacatcaatgagtgaatctaattcagcgagtatttcaatgtcacaaagtatttccggatcaacaagtggttcaacttcgataagtacatcagaatcattaagtatgtctggttcaacgcacaactcgacttcagtgagcgactcagattcgataagtacatctaattctggaagtatgtctaattcgataagacacttcacttctctaagtacttctgggttaatgagtttgagtgattctaattcaatgagcgattcagactcagtttcaataagtgcatcagagtcaatgtcagcaagtatgtccgactcagtttcaatgagcgactcaacatcatcaagtatgtctaactcaatgtcaatgagtacatcagaatctaactcaatacatccgtcaaattcgatgagtacgagtcagactcatttcacgagcacatctatttcaacaagtgagtccatagcaccaaatacaaatgaatctcagtcaacattaagtgcgacatctgtatcatcaaaacatgatgctgaacctgcgcaaagtgaagaaagattgccagatacaggtgactcaataaaacaaaatggattactaggtggcgttatgacattattagttggtttaggtttaatgaagagaaagaaaaagaaagatgaaaatgatcaagatgattctcaagcataa

SEQ ID NO: 8616 - DNA, 309 bp, Staphylococcus aureus
  CDS (1)...(309)
atgaccatgactgatgctattgttagactgattccaggtgttttaggtaatgaacagtcacatcaagacgattcattttcagatgggttattagagtttccgcaatatacacgtccgcgtgaatttaagggtctaacagttccagatgttttattgtctggaaatcatgccaatattgatgcatggagacatgagcaaaagttgatccgcacatataataaaagacctgacttaattgaaaaatatccattaactaatgcagataagcaaatattagaaagatataaaataggattgaaaaaaggttag

SEQ ID NO: 8617 - DNA, 351 bp, Staphylococcus aureus
  CDS (1)...(351)
atgacaaatcacaaattaatcgaagcagtaactaaatcacaattacgtacagacttaccaagtttccgtcctggtgatactttacgtgtacacgtacgtatcattgagggtactcgtgagcgtatccaagtattcgaaggcgttgtaattaaacgtcgtggcggtggcgtttctgaaacgtttacagttcgtaaaatttcatcaggtgttggcgtggaacgtacattcccattacacacaccaaaaattgaaaaaatcgaagttaaacgtcgtggtaaagtacgtcgtgctaaattatattacttacgtagtttacgtggtaaagctgctagaatccaagaaattcgttaa

SEQ ID NO: 8618 - DNA, 873 bp, Staphylococcus aureus
  CDS (1)...(873)
attgctggtggagcagctgctagaccatttgtaacacatcataatgcattagatgcaacgttatacatgcgtattgctattgagttgcatttaaaacgtttaattgtcggtggacttgaaaaagtatatgaaattggtagagtattccgtaatgaaggtgtatcaactagacataaccctgaattcacaatgattgaattatatgaagcatatgcagattatcatgacattatggatttaacagaatctatggtgagacatattgccaatgaagtgttaggttctgcaaaagtacaatacaatggggaaacgattgatttagaatctgcttggactcgtttgcatattgttgatgctgtaaaagaagctactggtgtagatttttatgaagttaaaagtgatgaagaagctaaagctttagctaaagaacatggtattgaaattaaagatacaatgaaatatggtcatattttaaatgaattctttgagcaaaaagttgaagaaacacttattcagccaacgtttatctatggtcatccgactgaaatttcacctttagcgaagaaaaatcctgaagatcctagatttactgatcgtttcgaattgttcattgtaggtagagagcatgcaaatgcatttactgaattaaatgatcctattgatcaaaaaggtcgttttgaagcgcaacttgttgaaaaagcgcaaggtaatgatgaagcgcatgaaatggatgaagattacattgaagcgttagaatatggtatgcctccgacaggtggtcttggtatcggtattgacagattggttatgttattaactgactctccatcaatcagagacgtattattattcccttatatgagacaaaaataa

SEQ ID NO: 8619 - DNA, 753 bp, Staphylococcus aureus
  CDS (1)...(753)
atgaaacatcaatcaattgtgaatttgaaaagtttgaatgttttacccgataaaaacaatgattggattaatcaacgagacataaactatgagaattatttaccaatgtatgattccaaggatattgaaaattctatatatttagatcaatttaatggagtaaattcagcaagagataattgggtaacaaatttttcgaatgaaaaagcattagtaaatgcaaaattacttgtagataactataattctgaaatagatagattaattgatatcttagattcaagagaacgtataaatttagtgaacaaagatgaaacatttattagttggacacgaggacttacccaaaaattttctaaaggaaaaaatatttcaattaatccagagagaattgttaaatttatgcatagaccatttacaaaaaaatggatagtgtacgacaaaaatattatggaaatgccaagtagatattataatataatggagaatactggacaggtgatttatatacaaggacagggaatgaataaagaattctcggctatgatcacggacatattacctaatttccaatttattggtaatggcaaaggctttgctacatacaaaggtaaagatagtttgaggcttgtagataatatttctaattcttttaaaaagaaaataaatcttaattcagaagagatagtatattatatatatgcaattttgcatcataaatattatgtgaacaaatattcaagtgatttgagt

SEQ ID NO: 8620 - DNA, 546 bp, Staphylococcus aureus
  CDS (1)...(546)
atgatggggtatataaaaagaatggctttatacatgagtgtatttcttttaatcatttttattgttggatgtcgaaatatgaaagatgaacagaaaaaagaagaacaaacaaataaaacagattcaaaagaagaacaaatcaaaaagagttttgagaaaacattagatatgtatccaattaagaatctcgaggagttatacgacaaagaaggataccgagatggcgaatttaaaaagggtgataaagggatgtggacgatatatacagatttcgccaaaagtaataaacaaggtggattgagtaatgaaggtatggtcttatacttagatagaaatacacggactgcaaagggacattattttgttaagacattctataataagggcaaattcccagatagaaaaaattataaagttgaaatgaaaaataataaaattatcttattagataaagtagaagatacaaatctaaaaaagagaatagaaaactttaaattttttggacaatatgcaaaccttaaagaattgaaaaacttcaacaaggtg

SEQ ID NO: 8621 - DNA, 246 bp, Staphylococcus aureus
  CDS (1)...(246)
atgcgttatacaattttaactaaaggtgactccaagtctaatgccttaaagcataaaatgatgaactatatgagagattttcgcatgattgaggatagtgaaaatcctgaaattgttatttcagttggtggtgacggtacattactacaagcattccatcagtatagccacatgttatcaaaagtggcatttggttggagttcatacaggtcatttaggattttatgcggattggttacctcatga

SEQ ID NO: 8622 - DNA, 708 bp, Staphylococcus aureus
  CDS (1)...(708)
atgacaaatgatatattagaaattcatttaccgcgagaaataccgagtgttaatttaataccttatgctcgtaagctagaagtattgtatgaagatgcttttatcatcatagttactaaaccaaacaatcaaaattgtacgccttcgagagaacatcctcatgaaagtttaatcgaacaagtactatatcattgtcaggaacatggtgaaaatattaacccacatattgttacgcgtctagatcgtaatacaactggtattgtgatattcgctaaatatggacatatccatcatttattttctaaagtaaacttgaaaaaaatatatacttgccttgtatatggtaaaacccatacatctggtattattgaagctaatattagacggtcaaaggataggattataactagagaagttgcctcggatggtaaatacgctaaaacatcttatgaagtaataaatcagaatgataaatacagtttatgcaaagttcatttgcatacgggacgtacacatcaaattcgtgtacattttcaacatattgggcatccaattgtgggagattctttgtatgatggttttcatgacaaaattcatggtcaagtactgcaatgtacgcaaatatattttgttcatccaatcaataagaacaatatttatattacaattgattataagcaattacttaaattattcaatcaactctaa

SEQ ID NO: 8623 - DNA, 966 bp, Staphylococcus aureus
  CDS (1)...(966)
atgaacttaaaattaaatagaaagaaagtgatttctatgattaaaaataaaatattaacagcaactttagcagttggtttaatagcccctttagccaatccatttatagaaatttctaaagcagaaaataagatagaagatatcggccaaggtgcagaaatcatcaaaagaacacaagacattactagcaaacgattagctataactcaaaacattcaatttgattttgtaaaagataaaaaatataacaaagatgccctagttgttaagatgcaaggcttcattagctctagaacaacatattcagacttaaaaaaatatccatatattaaaagaatgatatggccatttcaatataatatcagtttgaaaacgaaagactctaatgttgatttaattaattatcttcctaaaaataaaattgattcagcagatgttagtcagaaattaggctataatatcggcggaaacttccaatcagcgccatcaatcggaggcagtggctcattcaactactctaaaacaattagttataatcaaaaaaactatgttactgaagtagaaagtcagaactctaaaggtgttaaatggggagtgaaagcaaattcattcgttacaccgaatggtcaagtatctgcatatgatcaatacttatttgcacaagacccaactggtccagcagcacgagactatttcgtcccagataatcaactacctcctttaattcaaagtggctttaatccatcatttattacaacattgtcacacgaaagaggtaaaggtgataaaagcgagtttgaaatcacttacggcagaaacatggatgctacatatgcttacgtgacaagacatcgtttagccgttgatagaaaacatgatgcttttaaaaaccgaaacgttacagttaaatatgaagtgaactggaaaacacatgaagtaaaaattaaaagcatcacacctaagtaa

SEQ ID NO: 8624 - DNA, 450 bp, Staphylococcus aureus; identical to SEQ ID NO: 8347
  CDS (1)...(450)

SEQ ID NO: 8625 - DNA, 1179 bp, Staphylococcus aureus
  CDS (1)...(1179)
atgttagaatttgaacaaggatttaatcatttagcgactttaaaggtcattggtgtaggtggtggcggtaacaacgccgtaaaccgaatgattgaccacggaatgaataatgttgaatttatcgctatcaacacagacggtcaagctttaaacttatctaaagctgaatctaaaatccaaatcggtgaaaaattaacacgtggtttaggagcaggagctaatcctgaaatcggtaaaaaagctgcagaggaatctcgtgaacaaattgaagatgcaatccaaggtgcagacatggtatttgttacttctggtatgggtggcggaactggtactggtgcagcaccagtcgttgctaaaattgcaaaagaaatgggcgcattaactgttggtgttgtaactcgtccatttagttttgaaggacgtaaacgtcaaactcaagctgctgctggagtagaagctatgaaagctgcagtagatacattaatcgttataccaaatgaccgtttattagatatcgttgacaaatctacgccaatgatggaagcatttaaagaagctgacaacgtgttacgccaaggtgtacaaggtatctcagacttaatcgctgtttctggtgaagtaaacttagactttgcagacgttaagacaattatgtctaaccaaggttctgcattaatgggtattggtgtttcttctggtgaaaatagagcggtagaagctgctaaaaaagcaatctcttctccattacttgaaacatctatcgttggtgcacaaggtgtgcttatgaatattactggtggcgagtcattgtcattatttgaagcacaagaggctgctgatattgtccaagatgctgcagatgaagacgttaatatgattttcggtacagttattaatcctgaattacaagatgagattgttgtaacagttattgcaactggttttgatgacaaaccaacatcacatggtcgtaaatctggtagcactggattcggaacaagcgtaaatacttctagcaatgcaacttctaaagatgaatcattcacttcaaattcatcaaatgcacaagcaactgatagtgtaagtgtaagacacatacaactaaagaagatgatattcctagcttcattagaaatagagaagaaagacgttcaagaagaacaagacgcgatcggttaa

SEQ ID NO: 8626 - DNA, 174 bp, Staphylococcus aureus
  CDS (1)...(174)
atggcagttaaaattcgtttaacacgtttaggttcaaaaagaaatccattctatcgtatcgtagtagcagatgctcgttctccacgtgacggacgtatcatcgaacaaatcggtacttataacccaacgagcgctaatgctccagaaattaaagttgacgaagcgttactttaa

SEQ ID NO: 8627 - DNA, 804 bp, Staphylococcus aureus; identical to SEQ ID NO: 4854
  CDS (1)...(804)

SEQ ID NO: 8628 - DNA, 1134 bp, Staphylococcus aureus
  CDS (1)...(1134)
atgatggaattcactattaaaagagattattttattacacaattaaatgacacattaaaagctatttcaccaagaacaacattacctatattaactggtatcaaaatcgatgcgaaagaacatgaagttatattaactggttcagactctgaaatttcaatagaaatcactattcctaaaactgtagatggcgaagatattgtcaatatttcagaaacaggctcagtagtacttcctggacgattctttgttgatattataaaaaaattacctggtaaagatgttaaattatctacaaatgaacaattccagacattaattacatcaggtcattctgaatttaatttaagtggcttagatccagatcaatatcctttattacctcaagtttctagagatgacgcaattcaattgtcggtaaaagtgcttaaaaacgtgattgcacaaacaaattttgcagtgtccacctcagaaacacgcccagtactaactggtgtgaactggcttatacaagaaaatgaattaatatgcacagcgactgactcacaccgcttggctgtaagaaagttgcagttagaagatgtttctgaaaacaaaaatgtcatcattccaggtaaggctttagctgaattaaataaaattatgtctgacaatgaagaagacattgatatcttctttgcttcaaaccaagttttatttaaagttggaaatgtgaactttatttctcgattattagaaggacattatcctgatacaacacgtttattccctgaaaactatgaaattaaattaagtatagacaatggggagttttatcatgcgattgatcgtgcctctttattagcgcgtgaaggtggtaataacgttattaaattaagtacaggtgatgacgttgttgaattgtcttctacatcaccagaaattggtactgtaaaagaagaagttgatgcaaacgatgttgaaggtggtagcctgaaaatttcattcaactctaaatatatgatggatgctttaaaagcaatcgataatgatgaggttgaagttgaattcttcggtacaatgaaaccatttattctaaaaccaaaaggtgacgactcggtaacgcaattaattttaccaatcagaacttactaa

SEQ ID NO: 8629 - DNA, 768 bp, Staphylococcus aureus; identical to SEQ ID NO: 4793
  CDS (1)...(768)

SEQ ID NO: 8630 - DNA, 600 bp, Staphylococcus aureus
  CDS (1)...(600)
gatgcattttatgtttttgcgactcaaaatggcatgattaagaaacgtacagtgcctctatttaaaacaacgcgttttaataaacctttaattgctactaaagttaaagaaaatgatgatttgattagtgttatgcgctttgaaaaagatcaattaattaccgtcattactaataaaggtatgtcattaacgtataatacaagtgaactatcagataccggattaagggcagctggtgttaaatcaataaatcttaaagctgaagatttcgttgttatgacagaaggtgtttctgaaaatgatactatattgatggccacacaacgcggctcgttaaaacgtattagttttaaaatcttacaagttgctaaaagagcacaacgtggaataactttattaaaagaattaaagaaaaatccacatcgtattgtagctgcacatgtagtgacaggtgaacatagtcaatatacattatattcaaaatcaaatgaagaacatggtttaattaatgatattcataaatctgaacaatatacaaatggctcattcattgtagatacagatgattttggtgaagtaatagacatgtatattagctaa

SEQ ID NO: 8631 - DNA, 984 bp, Staphylococcus aureus
  CDS (1)...(984)
atgaaaatgaaaaaattagtcaaatcatcagttgcttcatcaattgcactgcttttgctatcgaatacagttgatgcagctcaacatatcacacctgtaagcgagaaaaaagtagatgacaaaatcactttatacaaaacaacagcaacatctgataatgataaattgaatatttctcaaattttaacgtttaatttcattaaggataaaagttatgacaaagatacgttagtacttaaggcagccggaaacattaattcaggttataaaaagcctaatccaaaagattacaattactcacagttttattggggcggtaagtataatgtttcggttagttcagaatcaaatgatgctgtaaatgttgttgactatgcacctaaaaatcaaaatgaagaattccaagttcaacaaacattaggttattcttatggcggagatattaatatatctaatggcttatcaggtggattaaatggatcaaaatcattttcagaaacgataaattataaacaagaaagttacagaactacgattgatagaaaaacaaatcataaatcaattggctggggtgttgaggcgcacaaaattatgaataatggttggggaccatatggtagagatagttatgacccaacatatggtaatgaactgtttttaggcggtagacaaagtagttcaaatgctggtcaaaatttcttgccaacacatcaaatgcctttattggcgcgtggtaactttaacccagaatttataagcgtactttctcataaacaaaatgatacaaaaaaatctaaaatcaaagtaacttaccaaagagaaatggatagatatactaatcaatggaatcgactacactgggttggtaataactacaaaaatcaaaatacagtaacgtttacatctacttatgaagttgactggcaaaaccatactgttaaattaatcggtacggattctaaagaaactaatcctggagtataa

SEQ ID NO: 8632 - DNA, 1008 bp, Staphylococcus aureus
  CDS (1)...(1008)
atgtcatatataatcatcgtcactatagctgtagttattttctcgctgatatttgactttatcaatggattccatgatacagccaatgcagtagctactgctgtatctactagagcgttaacgcctaaaacggcaattttaatggcagcagtgatgaactttataggtgctttaacatttacgggcgttgcaggcaccattactaaagacattgtcgatccatttaaattggaaaatggattagttgttgtgttagctgcaatacttgcggctattatttggaatttagctacttggttttacggaattccaagttcgtcttcacatgcacttataggttcaattgcgggtgcagcaatcgcatctgaaggctcatttggagtgttacattaccaaggtttcacaaaaattattattgtattaatcgtttcaccgattatcgcattttgtgttggtttcttgatgtattcaatttttaaagttatctttaaaaatgcaaatttaacaagagcgaatcgtaactttagatttttccaaattttcacagcagcgttacaatcattctctcacggtacgaatgatgcgcaaaaatcaatgggtattattacgttggcattgattgtcgctaatgtacagaatgatggcagtgttgaaccacagttatgggtaaaatttgcctgtgcgacagcaatggggcttggtactgcaattggtggctggaaaattatcaaaactgtaggtggtaatattatgaaaatacgtccagcaaatggtgctgcggccgatttatcatctgcattaacaatttttgttgcatcatcgctacatttcccattatcaacaactcacgttgtgtcatcatcaatcttaggtgttggtgcttctaaccgagctaaaggtgtaaaatggagcactgcgcaacgaatgatcattacatgggtgattacattacctatttcagcattgttagcaggtttactattctatatacttaacttatttttctaa

SEQ ID NO: 8633 - DNA, 432 bp, Staphylococcus aureus
  CDS (1)...(432)
gctatactacatgcatgtatattaacattaattatcggaggtaattttatgaaagaacgtggctatatcgaacagctttggcgtgaggaaaaatatcatgtattgttacacagtcaacagtcttaccaaatgataaggaatgctttaaaaacggatttatcacttcatcaagttcaacaaatgattgatgttgctttgttaattgaaccgagtataggaagtgtatgtaatgcttttgatcatatgtggggatatttaaaaaaatgtgcgaatgaagaagaaagacaacaatcaaaactacttaaagctgattttattaatggtaaaatcgacacccaaactttattagattttttagcagaacttgctaataaatatgatgttcaatatttactacaaagtcgtgttttaaacacaaaaagaaagagatag

SEQ ID NO: 8634 - DNA, 1311 bp, Staphylococcus aureus
  CDS (1)...(1311)
atgactaaacctatagtagctattgtaggtaggcctaatgtaggtaaatctacaatttttaatagaatagttggagaacgtgtttcgattgtggaagacacgccaggtgtaacacgagatcgtatttattcttcaggtgaatggttaacacatgatttcaatattattgatacaggtggtattgaaattggtgatgcaccattccaaacacaaattagagcgcaggcagaaatcgccatagatgaagcggatgttattatttttatggttaacgtgcgtgaaggattgacacaaagcgatgaaatggtcgctcaaattttatacaaatctaaaaaaccggtcgtattagcggttaacaaagtagataatatggaaatgcgtacagacgtgtatgatttctattcattaggatttggtgaaccgtatccgatatcagggtcacatggtttaggtcttggtgacttgttagatgcagttgtttctcattttggtgaagaggaagaagatccttatgatgaagatacaattcgactatccattattggacgaccaaacgtaggtaaatcaagtttagtaaatgctattttaggtgaagatcgcgttatcgtttctaatgttgcagggacaacgagagacgctattgatacagagtatagttatgatggacaagattatgttttaatcgatactgctggtatgcgtaaaaaaggaaaagtatatgaatcaactgagaaatattcagtattaagagctttaaaagcgattgaacgttcaaatgttgttttagtggtcatagatgcagaacaaggcatcattgaacaagataaacgtgttgcaggatatgcacatgaacaaggtaaagcagtcgtgattgtcgtaaataaatgggatactgtggaaaaagatagtaaaacgatgaagaaatttgaagatgaagtacgtaaagaattccaatttttagattatgcacaaattgcttttgtgtctgctaaagaacgcacaagattacgtacattattcccttacatcaatgaagcaagtgaaaaccataaaaaacgtgttcaaagttcaactttaaatgaagttgttactgatgcaatttccatgaaccctacaccaacagacaaaggtagacgtttgaatgtcttttatgcaacacaagttgctatagaaccaccgacatttgttgtatttgttaatgatgtagaattaatgcatttttcttataaacgctatttagagaatcaaatccgtgccgcttttggttttgaaggtacaccaattcatattatagctcgaaagagaaattaa

SEQ ID NO: 8635 - DNA, 1209 bp, Staphylococcus aureus
  CDS (1)...(1209)
atggctcaagatcgtaaaaaagtacttgtacttggtgctggttatgcaggtttacaaactgtaactaaattgcaaaaagcgatatcaacagaagaagcagaaattacgcttattaataaaaatgaatatcactatgaagcaacatggttacatgaagcatcagcaggtacactaaactatgaagatgtattatatcctgtggaaagtgtcttgaagaaagacaaagtgaactttgttcaagcagaagtaacaaaaattgaccgtgatgctaaaaaggtagaaacaaatcaaggtatttatgactttgatattttagtagtagcattaggtttcgttagtgaaacattcggcatcgaaggtatgaaagatcatgctttccaaattgaaaatgttatcacagcacgtgaattatcacgtcatatcgaagacaaatttgctaactatgcagcatcaaaagaaaaagatgataacgatttatctatcttagttggtggtgctggattcactggtgttgaattcttaggtgaattaacagacagaattcctgaattatgtagcaaatatggtgtggatcaaaataaagttaaaatcacttgtgttgaagcagcacctaaaatgttaccaatgttctcagaagaattagttaaccacgcagttagctacttagaagaccgcggtgttgaatttaaaattgctacaccaatcgttgcttgtaacgaaaaaggttttgtagttgaagtagatggtgaaaaacaacaattaaatgcaggtacttcagtatgggcagctggtgtacgtggtagtaaattaatggaagaatcatttgaaggcgttaaacgtggacgtatcgttacaaagcaagatttaacaatcaatggttacgacaacatttttgttattggtgactgttcagcgtttatcccagctggagaagaacgtccattaccaactacagcacaaattgcaatgcaacaaggtgaaagtgttgctaaaaacattaaacgcatcttaaacggtgaatcaactgaagaattcgaatacgttgatcgtggaactgtttgttctttaggttcacatgacggtgtaggtatggtatttggtaaacctatcgctggtaaaaaagcagcattcatgaaaaaagtgattgatacacgtgcggtattcaaaatcggtggtatcggtttagcattcaaaaaaggtaaattctag

SEQ ID NO: 8636 - DNA, 2079 bp, Staphylococcus aureus
  CDS (1)...(2079)
atggcactattagaagcatttttaatttttatttttgctgtgattattagttcggttatcaataatcgattcccacaaattcctactgcctttattcaaattgcattaggtgtcgttattttcattattccaatacaagttgatttccaattcaattctgaagtatttatgtttgccgttatcgcgccactactttttgtggaaggtacccacgtctctcgaacaaaattattagaatatcgtaaacctatactattaatgtcaatggcactagtgtttgcaactgtagtcggtgttggctattttatacattggatttggcctgccttaccaatgccagccgcttttgcaatagcagcaattttatgtcctactgatgcagtagcagtatctgctattacacgcggaaaattattacctaaaggttctatgacgattttagaaggtgaatctttactcaatgatgcagcaggtatcatttcatttaaaattgctgttactgcattagtaactggtaccttttcattattccaagctgttgaacaatttatcatttcaacaatactaggtgtacttattggtgcaattattggattcgttgtcgttagaatacgtatagacttaaccgctaataaaggtttaaaagataacaataccttaacttttattcaattattaactccttttgtcgtatactttttagcagaagaagttcatgcttcaggtatcattgcagttgtaatcgcaggtctaatccatggtttagaacgcgaccgtttaattagagcacaaacggaactacaaatgaattaccatcaaatttggaacacatttagttatgccttaaatggttttgtatttgttgtattaggttttatgattcctactgtagtcatagatattttccaaacagagcctgacaacttttcatttttaatagtgatcactatattaatcgctattgcaatttatgcatgtcgatttgtttgggtttatttctggtacaaagatttttatttcccgaaaaatatacaatcttatctagacgaggaacatgattcacatgaaacaccaccttctcgagtgcgttacgcatttattatgaccatgtgtggtattcacggtacaatttcactttcaatggcacttacattaccatttatcattacaaaaggacaagcattcgaataccgtaatgatttattgtttattgcatctttcatggtattaattagtttaatcttagcgcaaattgttttacctttaattacaccatctgccgaagatactacttttaaaggtatgacttatcaatctgccaaaattttcattgttcaaaaagtgatccagcattttaaaaacgaaagtaaaaaagacaaaaacgatacaaattatcgcccagtattaaaccaatactatggagaattgttatttttattaaattcagaacctgataatcaaaatacaaaagaactcaaacgtttagaagatattgcacaagtaatcgaaacatctacacttgagcgtttaattgataaaggtaaggcaacatatcaggatattaataattaccgcaatattgtcgaattaacagagacacaccgtactgcatcatttgttgaaaaatttgcaaacttcttcaagatgttatggcttagacttaaagcgatgaagcactacaaagccttaaataaagaatctaagaagcaagaatttgaaaattcattcaaagatgttcaaaaaattatgcgtattgtgaatcacaatattattttacgcttaaaagaagaacaaaatagtacaaatgtacttgaggttagcttagtcattaatcattactatgatatgagtcgctcattaaagtggcgtgcacaacgtcgaaaagaacgtcaagaaaacagcaatcaaatcataccgcaagctatgttccataaccacaaattggaagcattgtacttacaacgtcatcttttagatgaattaattcgcaaaaataaaatcaacaatatcgttgcagctcaaattcgagaaaatatcaattacaacgaaattgtcttgtctttacagtccaaacattaa

SEQ ID NO: 8637 - DNA, 483 bp, Staphylococcus aureus
  CDS (1)...(483)
aggatttacattatgcctcgtaaaggatcagtacctaaaagagacgtattaccagatccaattcataactctaagttagtaactaaattaattaacaaaattatgttagatggtaaacgtggaacagcacaaagaattctttattcagcattcgacctagttgaacaacgcagtgttcgtgatgcattagaagtattcgaagaagcaatcaacaacattatgccagtattagaagttaaagctcgtcgcgtaggtggttctaactatcaagtaccagtagaagttcgtccagagcgtcgtactactttaggtttacgttggttagttaactatgcacgtcttcgtggtgaaaaaacgatggaagatcgtttagctaacgaaattttagatgcagcaaataatacaggtggtgccgttaagaaacgtgaggacactcacaaaatggctgaagcaaacaaagcatttgctcactaccgttggtaa

SEQ ID NO: 8638 - DNA, 2148 bp, Staphylococcus aureus
  CDS (1)...(2148)
atgcttagggcatcgccatatctatcgtatttattcagtaatataaactggaaggagaaaaaatacatggctagagaattttcattagaaaaaactcgtaatatcggtatcatggctcacattgatgctggtaaaacgactacgactgaacgtattctttattacactggccgtatccacaaaattggtgaaacacacgaaggtgcttcacaaatggactggatggagcaagaacaagaccgtggtattactatcacatctgctgcaacaacagcagcttgggaaggtcaccgtgtaaacattatcgatacacctggacacgtagacttcactgtagaagttgaacgttcattacgtgtacttgacggagcagttacagtacttgatgcacaatcaggtgttgaacctcaaactgaaacagtttggcgtcaggctacaacttatggtgttccacgtatcgtatttgtaaacaaaatggacaaattaggtgctaacttcgaatactctgtaagtacattacatgatcgtttacaagctaacgctgctccaatccaattaccaattggtgcggaagacgaattcgaagcaatcattgacttagttgaaatgaaatgtttcaaatatacaaatgatttaggtactgaaattgaagaaattgaaattcccgaagaccacttagatagagctgaagaagctcgtgctagcttaatcgaagcagttgcagaaactagcgacgaattaatggaaaaatatcttggtgacgaagaaatttcagtttctgaattaaaagaagctatccgccaagctactactaacgtagaattctacccagtactttgtggtacagctttcaaaaacaaaggtgttcaattaatgcttgacgctgtaattgattacttaccttcaccactagacgttaaaccaattattggtcaccgtgctagcaaccctgaagaagaagtaatcgcgaaagcagacgattcagctgaattcgctgcattagcgttcaaagttatgactgacccttatgttggtaaattaacattcttccgtgtgtattcaggtacaatgacatctggttcatacgttaagaactctactaaaggtaaacgtgaacgtgtaggtcgtttattacaaatgcacgctaactcacgtcaagaaatcgatactgtatactctggagatatcgctgctgcggtaggtcttaaagatacaggtactggtgatactttatgtggtgagaaaaatgacattatcttggaatcaatggaattcccagagccagttattcacttatcagtagagccaaaatctaaagctgaccaagataaaatgactcaagctttagttaaattacaagaagaagacccaacattccatgcacacactgacgaagaaactggacaagttatcatcggtggtatgggtgagcttcacttagacatcttagtagaccgtatgaagaaagaattcaacgttgaatgtaacgtaggtgctccaatggtttcatatcgtgaaacattcaaatcatctgcacaagttcaaggtaaattctctcgtcaatctggtggtcgtggtcaatacggtgatgttcacattgaattcacaccaaacgaaacaggcgcaggtttcgaattcgaaaacgctatcgttggtggtgtagttcctcgtgaatacattccatcagtagaagctggtcttaaagatgctatggaaaatggtgttttagcaggttatcctttaattgatgttaaagctaaattatatgatggttcataccatgatgtcgattcatctgaaatggccttcaaaattgctgcatcattagcacttaaagaagctgctaaaaaatgtgatcctgtaatcttagaaccaatgatgaaagtaactattgaaatgcctgaagagtacatgggtgatatcatgggtgacgtaacatctcgtcgtggacgtgttgatggtatggaacctcgtggtaatgcacaagttgttaatgcttatgtaccactttcagaaatgttcggttatgcaacatcattacgttcaaacactcaaggtcgcggtacttacactatgtacttcgatcactatgctgaagttccaaaatcaatcgctgaagatattatcaagaaaaataaaggtgaataa

SEQ ID NO: 8639 - DNA, 270 bp, Staphylococcus aureus
  CDS (1)...(270)
atggctaagaaatctaaaatagcaaaagagagaaaaagagaagagttagtaaataaatattacgaattacgtaaagagttaaaagcaaaaggtgattacgaagcgttaagaaaattaccaagagattcatcacctacacgtttaactagaagatgtaaagtaactggaagacctagaggtgtattacgtaaatttgaaatgtctcgtattgcgtttagagaacatgcgcacaaaggacaaattccaggtgttaaaaaatcaagttggtaa

SEQ ID NO: 8640 - DNA, 978 bp, Staphylococcus aureus
  CDS (1)...(978)
gtgaaaatatttgattacgaagatattcaattaatacctaataaatgcatagttgaaagtaggtctgaatgtgatacaactatccaatttggtccgaaaaaattcaagctacctgtagttcctgcaaatatgcaaacagttatgaatgagaaattagcgaaatggtttgctgaaaatgattacttttatatcatgcatcgttttgatgaagaagcaagaataccttttataaaacatatgcaaaattcaggcttatttgcatctatttcagttggtgtaaagaaagcggaatttgattttattgaaaagttagctcaagaaaaattaatccccgaatatattacaatagatattgcgcatggtcactcagattcagtgataaacatgattaaacatataaaaacccatatacctgatagttttgttattgctggtaatgttggtacgccagaaggtgttagagaattagaaaatgctggtgctgatgctaccaaagtcggtataggtcctggtagagtttgtattacaaagattaaaacaggttttggtactggtggttggcagttagcggcattaaacatatgtagtaaagcagctcgtaaacctttgattgccgatggtggtataagaacgcatggcgacattgctaaatcaattagatttggtgcatcaatggtcatgattggttcattatttgcggcacacgaagaatcacctggtgaaactgtagaacttgatggtaaacagtataaagaatattttggtagtgcatctgaatttcaaaaaggcgaacataaaaatgtagaaggtaaaaaaatgtttgtagaacataagggttcattaatggataccttaaaagaaatgcaacaagatttacaaagctcaatttcatatgccggtggaaaagacttgaaatcattacgtactgtagattatgttattgttagaaactctattttcaacggtgatagagattaa

SEQ ID NO: 8641 - DNA, 732 bp, Staphylococcus aureus
  CDS (1)...(732)
atgactgataaaaagtacactgcagccgatatggttattgatactttgaaaaataatggggtagaatatgtttttggtattccgggtgcaaagattgactatctatttaatgctttaattgatgatggtcctgaacttattgtcactcgtcatgaacaaaacgccgcaatgatggcgcaaggtattggaagattaacaggcaaaccgggtgtagtacttgttacaagtggtcctggtgtaagtaatttaactactggattattaaccgcaacatctgaaggggatcctgtattagcgttaggtggccaagtgaaacgtaatgatttattacgattaacgcatcaaagtattgataatgctgcgctattaaaatattcatcaaaatatagtgaagaagtacaagatcctgaatcattatcagaagttatgacaaatgcaattcgaattgctacttcaggaaaaaatggcgcaagttttattagtattccgcaagacgttatttcttcaccagttgaatctaaagctatatcactttgccaaaaaccaaatttaggagtaccgagtgaacaagatattaatgatgtcattgaagcgattaaaaatgcatcatttcctgttttattagctggtatgagaagttcaagtgcagaagaaacaaatgccattcgcaaattagttgagcgcacgaatttaccagttgtagaaacattccaaaggtgcaggtgtaattag

SEQ ID NO: 8642 - DNA, 903 bp, Staphylococcus aureus
  CDS (1)...(903)
gtgggcttattccgcaatcaagttggtgatgaattattacgtaaaagtgatttagttgctacaatcggttatgatccaattgaatacgaagctagtaactggaataaagaattagaaacacaaattatcaatattgacgaagttcaagctgaaattactaattatatgcaaccgaaaaaagagttgattggtaatattgctaaaacgattgaaatgatttctgaaaaagtggatgagccatttataaatcaacaacatttagacgaattagaacaattaagaacacatattgatgaagaaactggtattaaagcgacgcatgaagaaggaattctacatccagtggaaattattgaatctatgcaaaaggtattaactgatgatactactgtaacagttgatgttggaagtcactatatttggatggcacgtaatttcagaagttacaatccaagacatttattatttagcaatggtatgcaaacgcttggtgtagcattaccgtgggcaatttcagctgcacttgtgcgccctaatacgcaagttgtgtccgttgctggcgatggtggctttttattttcatcacaagatttagaaacggccgtacgtaaaaatttaaatatcatccagcttatttggaatgatggaaaatataacatggttgaattccaagaagaaatgaaatataaacgttcgtcaggtgtagacttcggtcctgtagattttgtaaaatatgcagaatcatttggcgcgaaaggtttacgagttactaatcaagaagaattagaagcggcaattaaagagggctatgaaacagatggtccagtattaattgatatacctgtaaattacaaagataatatcaaactttcaacaaatatgttacctgacgtatttaactaa

SEQ ID NO: 8643 - DNA, 555 bp, Staphylococcus aureus
  CDS (1)...(555)
atgagtgacattattaatgaaactaaatcaagaatgcaaaaatcaatcgaaagcttatcacgtgaattagctaacatcagtgcaggaagagctaattcaaatttattaaacggcgtaacagttgattactatggtgcaccaacacctgtacaacaattagcaagcatcaatgttccagaagcacgtttacttgttatttctccatacgacaaaacttctgtagctgacatcgaaaaagcgataatagcagctaacttaggtgttaacccaacaagtgatggtgaagtgatacgtattgctgtacctgccttaacagaagaacgtagaaaagagcgcgttaaagatgttaagaaaattggtgaagaagctaaagtatctgttcgaaatattcgtcgtgatatgaatgatcagttgaaaaaagatgaaaaaaatggcgacattactgaagatgagttgagaagtggtactgaagatgttcagaaagcaacagacaattcaataaaagaaattgatcaaatgattgctgataaagaaaaagatattatgtcagtataa

SEQ ID NO: 8644 - DNA, 882 bp, Staphylococcus aureus
  CDS (1)...(882)
atggcaactatttcagcaaaacttgttaaagaattacgtgaaaaaactggcgcgggtatgatggattgtaaaaaagcgctaactgaaactgatggtgacatcgataaagcgattgactacctacgtgaaaaaggtattgctaaagcagctaaaaaagcagaccgtattgcggctgaaggtttagtacatgtagaaactaaaggtaacgacgcagttatcgttgaaatcaactctgaaacagactttgttgctcgtaacgaaggtttccaagagttagttaaagaaatcgctaatcaagtattagatacaaaagctgaaactgttgaagctttaatggaaacaactttaccaaatggtaaatcagttgatgaaagaattaaagaagcaatttcaacaatcggtgaaaaattaagtgttcgtcgttttgctatcagaactaaaactgataacgatgctttcggcgcttacttacacatgggtggacgcattggtgtattaacagttgttgaaggttcaactgacgaagaagcagcaagagacgttgctatgcatatcgctgcaatcaaccctaaatatgtttcttctgaacaagttagcgaagaagaaatcaaccacgaaagagaagttttaaaacaacaagcattaaatgaaggtaaaccagaaaacatcgttgaaaaaatggtggaaggacgtttacgtaaatacttacaagaaatttgtgctgtagatcaagacttcgttaaaaaccctgatgtaacagttgaagctttcttaaaaacaaaaggtggaaaacttgttgacttcgtacgctatgaagtaggcgaaggtatggaaaaacgcgaagaaaactttgcggatgaagttaaaggacaaatgaaataa

SEQ ID NO: 8645 - DNA, 270 bp, Staphylococcus aureus
  CDS (1)...(270)
atgattgtagtggcggcggaagttgcacgtcgtcgtaaagcacgtggtttgaaactaaatcatcctgaggcattagctttaatcagcgatgaattattagaaggtgcacgcgatggtaagaccgttgcagagttaatgagttatggtagacaaattctaaacaaagaagatgtcatggatggtgtcgaacacatgattacagatatcgaaatcgaggctacgttccccgatggtactaagttaatcacagtacatcaccctattgtttaa

SEQ ID NO: 8646 - DNA, 615 bp, Staphylococcus aureus
  CDS (1)...(615)
gtggcaaatccgattaaaattggtattggtggtcctgtaggtgcaggtaaaacacaattaattgaaaaagttgtaaaacgtctttcaaaagaaatgagtatcggcgttattacaaatgatatatatacaaaagaagacgaaaagatattagtaaattcaggagttctacctgaaagtcgtatcattggtgttgaaactggtggatgtcctcatactgcgattcgtgaagatgcatctatgaactttgcagcaatagacgaattattagaacgtcatgacgatatagaactaattttcatagaatctggtggcgataacttagcagcaacatttagtccagaacttgttgacttttcaatatatattatcgatgttgctcaaggtgaaaagattccacgtaaaggtggtcaaggtatgattaagtcagatttctttgtaattaacaaaactgatttagctccctatgtaggtgcatcattagaacaaatggctgaagatactaaagtatttcgtggtaaacgtccatttacttttactaacttaaaaaccgacgaaggtttggatgaagttatcgattggattgaacgcgacactttactcaaaggattatcataa

SEQ ID NO: 8647 - DNA, 174 bp, Staphylococcus aureus
  CDS (1)...(174)
atggtaatgttgctaaagctggatcggatgatgaaagttgaagatgtgctgacgattcgctttggtcaaaaattagtaacagttaaagtaactgcattaaatgaacatgcatctaaagataacgcgaagggtatgtatgaaatcattgaagagcgtcgacttgaagaagcgtaa

SEQ ID NO: 8648 - DNA, 132 bp, Staphylococcus aureus
  CDS (1)...(132)
atgagattagataaatatttaaaagtatcacggttaataaagcgacgtacgctagcaaaagaagtaagtgatcaaggtagaattacaataaatggtaatgttgctaaagctggatcggatgatgaaagttga

SEQ ID NO: 8649 - DNA, 822 bp, Staphylococcus aureus
  CDS (1)...(822)
atgagtaaattacaagacgttattgtacaagaaatgaaagtgaaaaagcgtatcgatagtgctgaagaaattatggaattaaagcaatttataaaaaattatgtacaatcacattcatttataaaatctttagtgttaggtatttcaggaggacaggattctacattagttggaaaactagtacaaatgtctgttaacgaattacgtgaagaaggcattgattgtacgtttattgcagttaaattaccttatggagttcaaaaagatgctgatgaagttgagcaagctttgcgattcattgaaccagatgaaatagtaacagtcaatattaagcctgcagttgatcaaagtgtgcaatcattaaaagaagccggtattgttcttacagatttccaaaaaggaaatgaaaaagcgcgtgaacgtatgaaagtacaattttcaattgcttcaaaccgacaaggtattgtagtaggaacagatcattcagctgaaaatataactgggttttatacgaagtacggtgatggtgctgcagatatcgcacctatatttggtttgaataaacgacaaggtcgtcaattattagcgtatcttggtgcgccaaaggaattatatgaaaaaacgccaactgctgatttagaagatgataaaccacagcttccagatgaagatgcattaggtgtaacttatgaggcgattgataattatttagaaggtaagccagttacgccagaagaacaaaaagtaattgaaaatcattatatacgaaatgcacacaaacgtgaacttgcatatacaagatacacgtggccaaaatcctaa

SEQ ID NO: 8650 - DNA, 276 bp, Staphylococcus aureus
  CDS (1)...(276)
atggcgaaacaagcaacaatgaaaaatgcagctttgaaacaattgactaaagatgctgatgaaatcttgcatctgattaaagttcaactagataatttaacattaccttcatgcccattatatgaagaagtactagatacacaaatgtttggacttcaaaaagaagttgattttgctgttaaattaggtttagttgaccgcgaagatggcaaacaaattatgttacgtcttgagaaagaactttcaaaattacatgaagcttttacacttgtttaa

SEQ ID NO: 8651 - DNA, 567 bp, Staphylococcus aureus
  CDS (1)...(567)
atgaaacgaatcgcagtttattgtggtgcaagcaaaggtcatgacccttcatatgtacaaaaagcatacgatttaggtaaatattttgctgaacaaggttatgaattagtatttggtgcagggtcaattggcattatgggtgccattcaagatggtgtattagatcatggcggcaaagctattggcgtcatgcctaaaatgttagatgaacatgaaatcacaagccaacgtttaactgaattaattttagttgattctatgcatgaacgtaaaaataaaatggcagaacttgcagatgcatttgtcatggctcctggtggcgcaggttcactagaagaatttttcgaaatgtatagttgggctcaaataggtatccatgaaaagcctattgccatttataatattaatggctttttcaatccactacaaacaatgattgaccatatgattgaggaaggttttattgatcctaagtatcgtgctcttgcaccgttatgcgacactaaggaatcattaattgaatcaatattaaatttcaaacctctgggtactcgttcatacgattaa

SEQ ID NO: 8652 - DNA, 393 bp, Staphylococcus aureus
  CDS (1)...(393)
atgacttacagtggtctgaagatcaaagtttctaatgaggtggaaaaaatgtcagatgtttcattgaaattatcagcaaaagatatttatgaaaaagattttgaaaaaacgatggctcgtggctatagaagagaagaagtagatgcatttttagatgacattattgctgattatcaaaaaatggccgatatgaataatgaagttgtaaaattatcagaagagaatcataaacttaaaaaagaattagaagaattaagactacgtgtagcaacatcaagacctcaggacaataaaagtttttcttcgaataatacaacaacaaatacatcttcaaataatgtagatattttaaaacgtatttcaaacttagaaaaagctgtatttggtaaataa

SEQ ID NO: 8653 - DNA, 2526 bp, Staphylococcus aureus
  CDS (1)...(2526)
atgaataataaaaagacagcaacaaatagaaaaggcatgataccaaatcgattaaacaaattttcgataagaaagtattctgtaggtactgcttcaattttagtagggacaacattgatttttgggttaagtggtcatgaagctaaagcggcagaacatacgaatggagaattaaatcaatcaaaaaatgaaacgacagccccaagtgagaataaaacaactaaaaaagttgatagtcgtcaactaaaagacaatacgcaaactgcaactgcagatcagcctaaagtgacaatgagtgatagtgcaacagttaaagaaactagtagtaacatgcaatcaccacaaaacgctacagctaatcaatctactacaaaaactagcaatgtaacaacaaatgataaatcatcaactacatatagtaatgaaactgataaaagtaatttaacacaagcaaaagatgtttcaactacacctaaaacaacgactattaaaccaagaactttaaatcgcatggcagtgaatactgttgcagctccacaacaaggaacaaatgttaatgataaagtacatttttcaaatattgacattgcgattgataaaggacatgttaatcagactactggtaaaactgaattttgggcaacttcaagtgatgttttaaaattaaaagcaaattacacaatcgatgattctgttaaagagggcgatacatttacttttaaatatggtcaatatttccgtccaggatcagtaagattaccttcacaaactcaaaatttatataatgcccaaggtaatattattgcaaaaggtatttatgatagtacaacaaacacaacaacatatacttttacgaactatgtagatcaatatacaaatgttagaggtagctttgaacaagttgcatttgcgaaacgtaaaaatgcaacaactgataaaacagcttataaaatggaagtaactttaggtaatgatacatatagcgaagaaatcattgtcgattatggtaataaaaaagcacaaccgcttatttcaagtacaaactatattaacaatgaagatttatcgcgtaatatgactgcatatgtaaatcaacctaaaaatacatatactaaacaaacgtttgttactaatttaactggatataaatttaatccaaatgcaaaaaacttcaaaatttacgaagtgacagatcaaaatcaatttgtggatagtttcacccctgatacttcaaaacttaaagatgttactgatcaattcgatgttatttatagtaatgataataaaacagctacagtcgatttaatgaaaggccaaacaagcagcaataaacaatacatcattcaacaagttgcttatccagataatagttcaacagataatggaaaaattgattatactttagacactgacaaaactaaatatagttggtcaaatagttattcaaatgtgaatggctcatcaactgctaatggcgaccaaaagaaatataatctaggtgactatgtatgggaagatacaaataaagatggtaaacaagatgccaatgaaaaagggattaaaggtgtttatgtcattcttaaagatagtaacggtaaagaattagatcgtacgacaacagatgaaaatggtaaatatcagttcactggtttaagcaatggaacttatagtgtagagttttcaacaccagccggttatacaccgacaactgcaaatgtaggtacagatgatgctgtagattctgatggactaactacaacaggtgtcattaaagacgctgacaacatgacattagatagtggattctacaaaacaccaaaatatagtttaggtgattatgtttggtacgacagtaataaagatggtaaacaagattcgactgaaaaaggaattaaaggtgttaaagttactttgcaaaacgaaaaaggcgaagtaattggaacaactaaaacagatgaaaatggtaaatatcgtttcgataatttagatagcggtaaatacaaagttatttttgaaaagcctgctggcttaacacaaacagttacaaatacaactgaagatgataaagatgcagatggtggcgaagttgacgtaacaattacggatcatgatgatttcacacttgataacggatacttcgaagaagatacatcagacagcgattcagactcagatagtgactcagacagcgactcagactcagacagcgactcagactcagacagtgattcagattcagacagcgactcagattcagatagcgactcagattcggacagcgattcagactcagatagcgactcagattcagacagtgattcagacagcgattcagactcggatgcaggaaaacatacacctgttaaaccaatgagtactactaaagaccatcacaataaagcaaaagcattaccagaaacaggtagtgaaaataacggctcaaataacgcaacgttatttggtggattatttgcagcattaggttcattattgttattcggtcgtcgcaaaaaacaaaacaaataa

SEQ ID NO: 8654 - DNA, 570 bp, Staphylococcus aureus
  CDS (1)...(570)
atgtcattaattaacaaagaaatcttaccatttacagcgcaagctttcgatccaaaaaaagatcaatttaaagaagttacacaagaagatttaaaaggttcttggagcgtagtatgcttctatcctgctgacttctcattcgtttgtccaactgaattagaagacttacaaaaccaatatgaagaattacaaaaattaggcgtaaatgtattctcagtatcaactgatactcacttcgtacacaaagcatggcatgaccattcagatgcaattagcaaaatcacttacactatgattggtgacccatcacaaacaatcactcgtaattttgatgtattagatgaagctactggtttagctcaacgtggtacattcattatcgacccagacggtgttgtacaagcatctgaaattaacgctgacggaattggccgtgacgctagtacattagctcacaaaatcaaagcagctcaatatgttcgtaaaaaccctggcgaagtatgcccagctaaatgggaagaaggcgctaaaacattgcaacctggtttagatttagtaggtaaaatctaa

SEQ ID NO: 8655 - DNA, 900 bp, Staphylococcus aureus
  CDS (1)...(900)
atgacagaacataaatcaggatttgtttcaattataggtagaccaaatgtaggaaagtcaacatttgttaatagagtgatcggccataaaatagcaatcatgtccgataaagctcaaacaactagaaataaaattcaaggtgttatgacaagagatgacgcgcaaattatattcattgatacgccaggtattcataaacctaaacacaaattaggtgactatatgatgaaagtcgctaaaaatacattatctgagatagatgcaatcatgtttatggttaatgccaatgaggaaattggacgaggcgatgaatatattatagaaatgttgaaaaatgttaagacaccagtatttttagtattaaataaaatagatttagtgcatccagatgaattaatgccaaagattgaagaatatcaaagttatatggactttacagagattgtacctatttcagcattagaagggctaaatgtcgatcattttattgatgttttaaagacgtatttacccgaaggacctaaatattatccagatgatcaaatttcagaccatcctgaacaatttgtagtgggtgaaatcattcgtgaaaaaatccttcatcttacaagtgaagaaatccctcatgcgattggtgttaatgtggaccgtatggttaaagaaagcgaagatcgtgttcatatcgaagcaactatatatgttgaaagagattcgcaaaaaggaattgtcattggaaaaggcggtaaaaagttaaaagaagtaggaaaacgtgcgagacgtgatatagaaatgcttctaggctctaaagtttacttagaattatgggtcaaagttcaaagagactggcgaaacaaagttaactttattcgccaaattggttatgttgaagaccaagattaa

SEQ ID NO: 8656 - DNA, 1392 bp, Staphylococcus aureus
  CDS (1)...(1392)
atggcaaaagatatggatacaattgtttcattagcaaaacacagaggttttgtgttccctggtagtgatatttacggtggtttatcaaacacatgggattatggtcctttaggtgttgaattaaagaataatgttaaaaaagcttggtggcaaaaattcattacacaatcaccgtttaacgttggtatcgatgctgcaatcttaatgaatccaaaagtatgggaagcttcaggacacttaaacaacttcaacgacccaatgattgataataaagatagtaaaattcgatatcgcgctgataaattaattgaagattatatgcaagatgttaaaggtgatgaaaacttcattgccgatggtttaagttttgaacaaatgaaaaaaattattgacgatgaaggtattgtttgtcctgtaagtaaaactgctaactggactgaaattcgccaattcaatttaatgtttaaaacattccaaggtgtaactgaagattctacaaatgaaattttcttacgtcctgaaacagcacaaggtatttttgtaaactataaaaacgtgcaacgttcaatgcgtaaaaaattaccatttggtatcggtcaaattggtaaatcattccgtaatgaaatcactccaggtaacttcattttcagaacaagagaatttgaacaaatggaacttgaattcttctgtaaacctggagaagaaatcgaatggcaaaattattggaaaacttttgcaagtgactggttaacaagcttaaatatgagcagtgaaaatatgcgtttacgtgatcatgatgaagatgaattatctcattactcaaatgcaacaactgatattgaatataaattcccatttggttggggtgagttatggggtatcgcaagtcgtacagacttcgacttacgtaaacatgctgaacactctggtgaagatttcagataccatgatccagaaacgaacgaaaaatatattccatattgtatcgagccatcacttggtgcagatcgtgtaacattagctttcttatgtgatgcatatgatgaagaaggcgttgaaggtagtaaagatgcacgtacagttttacacttccatcctgcattagcaccatataaagcagcgattttacctttaagtaagaaattatctggcgaagcgattaagatttttgagcaattaagttctaaattctcaatcgatttcgatgaatcacaatctatcggtaaaagataccgtcgtcaagatgaaatcggtacaccttattgtgtaacattcgactttgattcattagaagataatcaagttacagtacgtgacagagattcaatggaacaagttcgtatgccaatctcagagttagaagctttcttaactgaaaaaacaaaattctaa

SEQ ID NO: 8657 - DNA, 1179 bp, Staphylococcus aureus
  CDS (1)...(1179)
atgcgactatttacattcattttaagtatttttatcgtaggaatggttgaaatgatggttgcaggaattatgaacttgatgagtcaggacttacatgtatcagaagctgtcgttggtcaattagtgacaatgtacgctttaacatttgcgatatgtggacctattctggttaaattaacgaaccgtttttcatcaaggcctgtattattatggacattacttatatttatcattggtaatggcattattgctgtagcgccaaatttttcaatattagtagttggtagaattatctcatctgcagcagcagcactaattatcgtaaaagtattagctattacagcgatgttatcagcacctaaaaatcgtggtaaaatgattggacttgtctatacagggtttagtggtgctaatgtttttggtgtaccaattggaacggttatcggcgatttagtaggttggcgctatacatttctattcttaattattgtgagtattattgttggcttcttgatgatgatctatttaccgaaggatcaggaaatacaacgaggccctgtgaatcatgagacaccatctcatgaaaatcatgttacttcgaaaatattaagacctgctgaagtagcaaaatatttaattattacgtttttagtattgattgcaaactcagtgacattcgtctttataaatccacttattttatctaatggtcatgatatgtcattcgtttcattagcacttctagtaaatggaatcgctggcgttattggaacatcattaggtggtatattctccgataaaattacaagtaagcgttggttaatgatttctgtttctatttttatcgtcatgatgttacttatgaatttaatcttacctggttcaggtctattgttagcaggactatttatttggaatatcatgcaatggagtactaatccagcagtgcaaagcggtgtgattcaacatgttgaaggcgacacaagccaagtaatgagttggaacatgtctagtttaaacgctggtattggtgttggaggcattattggaggcttggtcatgacacatgtttctgttcaagctatcacatatacgagtgccatcattggcgcattaggattaatcgttgttttcacattgaaaaataatcattatgctaaaacatttaaatcatcataa

SEQ ID NO: 8658 - DNA, 273 bp, Staphylococcus aureus; identical to SEQ ID NO: 8503
  CDS (1)...(273)

SEQ ID NO: 8659 - DNA, 276 bp, Staphylococcus aureus
  CDS (1)...(276)
atggaagcaagagatattcttaagcgccccgtaatcactgagaaatcttctgaagcaatggctgaagacaaatacactttcgacgttgatactcgtgttaacaaaacacaagtaaaaatggcagttgaagaaatcttcaacgtaaaagttgcaagtgttaatatcatgaattacaaacctaagaaaaaacgtatgggccgttaccaaggctatacaaacaaaagaagaaaagcgattgtaactcttaaagaaggatcaatcgacttatttaactaa

SEQ ID NO: 8660 - DNA, 624 bp, Staphylococcus aureus
  CDS (1)...(624)
atggctaattatgatgttttaaaattagacggaactaaatcaggttcaatcgaattaagcgatgcagtattcggtattgagccaaataatagcgttttattcgaagctattaatttacaacgtgcttcattacgtcaaggtacgcatgctgttaagaatcgttcagcagtaagcggtggcggacgtaaaccatggaagcaaaaaggaacaggtcgtgctcgtcaaggtacaatccgtgctccacaatggcgtggcggtggtatcgtattcggaccaactccaagaagttatgcatacaaaatgcctaagaaaatgcgtcgtttagctttacgctcagcattatctttcaaagctcaagagaatggcttaactgtagttgacgcattcaacttcgaagctccaaaaactaaagaattcaaaaatgtattatctacattagaacaacctaaaaaagtattagtagttactgaaaacgaagatgtaaatgttgaattatcagcacgcaacatccctggcgttcaagtgacaactgctcaaggtttaaatgttttagatatcactaatgctgacagcttagtaattactgaagctgctgctaaaaaagttgaggaggtgctcggataa

SEQ ID NO: 8661 - DNA, 603 bp, Staphylococcus aureus
  CDS (1)...(603)
gaattaatccctgtaacagtagtagaagctaaagaaaatgttgtattacaaaagaaaactgtagaagttgatggatacaacgcaatccaagttggatttgaagacaaaaaagcatacaaaaaagatgcaaaatctaataaatatgctaataaaccagctgaaggtcacgctaaaaaagctgacgcagcacctaagcgcttcattcgtgaattccgcaatgtagacgtggatgcttacgaagtaggtcaagaagtctcagtagatacttttgtagctggcgacgttattgacgtaacaggcgtatcaaaaggtaaaggtttccaaggtgcaattaaacgccacggacaatctcgtggacctatgtcacacggttctcatttccacagagcaccaggttctgtaggtatggcttcagatgcttctagagtatttaaaggccaaaaaatgccaggacgtatgggtggaaacactgtaactgttcaaaacttagaagtagttcaagttgacacagaaaacaaagttatcttagtaaaaggtaacgtacctggacctaaaaaaggtttagtagaaatcagaacttcaattaaaaaaggtaataaataa

SEQ ID NO: 8662 - DNA, 318 bp, Staphylococcus aureus
  CDS (1)...(318)
atgcatatcaaaaaaggtgacaacgttaaagttatcgcaggtaaagacaaaggtaaagaaggtaaagtaattgctactctacctaaaaaagaccgtgtcgttgtggaaggtgttaacattatgaaaaaacaccaaaaaccaactcaattaaatcctgaaggtggaatcttagaaacagaggcagcaatccatgtttctaatgtacaattattggaccctaaaacaaacgaaccaactcgtgtaggttacaaatttgttgatggtaaaaaagttcgtatcgctaaaaaatctggcgaagaaattagctctggtaattaa

SEQ ID NO: 8663 - DNA, 369 bp, Staphylococcus aureus
  CDS (1)...(369)
atgatccaacaagaaacacgcttgaaagtagcagacaactctggtgctcgtgaagttcttacaatcaaagtattaggtggatctggtcgtaaaacagcaaacatcggcgatgttatcgtatgtactgttaaaaatgcaacaccaggtggcgttgttaaaaaaggtgacgttgtcaaagctgtaatcgtacgtactaagtcaggtgttcgtcgtaatgacggttcatacatcaaatttgatgaaaatgcatgtgttatcatccgtgatgacaaaggcccacgtggtactcgtatcttcggacctgttgctcgtgaattacgtgaaggtaacttcatgaaaatcgtatcattagcaccagaagtactttaa

SEQ ID NO: 8664 - DNA, 234 bp, Staphylococcus aureus; identical to SEQ ID NO: 8116
  CDS (1)...(234)

SEQ ID NO: 8665 - DNA, 435 bp, Staphylococcus aureus; identical to SEQ ID NO: 8162
  CDS (1)...(435)

SEQ ID NO: 8666 - DNA, 654 bp, Staphylococcus aureus
  CDS (1)...(654)
gtgggtcaaaaaattaatccaatcggacttcgtgttggtattatccgtgattgggaagctaaatggtatgctgaaaaagacttcgcttcacttttacacgaagatttaaaaatccgtaaatttattgataatgaattaaaagaagcatcagtttctcacgtagagattgaacgtgctgcaaaccgtatcaacattgcaattcatactggtaaacctggtatggtaattggtaaaggcggttcagaaatcgaaaaattacgcaacaaattaaatgcgttaactgataaaaaagtacacatcaacgtaattgaaatcaaaaaagttgatcttgacgctcgtttagtagctgaaaacatcgcacgtcaattagaaaaccgtgcttcattccgtcgtgtacaaaaacaagcaatcactagagctatgaaacttggtgctaaaggtatcaaaactcaagtatctggtcgtttaggcggagctgacatcgctcgtgctgaacaatattcagaaggaactgttccacttcatacgttacgtgctgacatcgattatgcacacgctgaagctgacactacttacggtaaattaggcgttaaagtatggatttatcgtggagaagttcttcctactaagaacactagtggaggaggaaaataa

SEQ ID NO: 8667 - DNA, 354 bp, Staphylococcus aureus; identical to SEQ ID NO: 8160
  CDS (1)...(354)

SEQ ID NO: 8668 - DNA, 327 bp, Staphylococcus aureus; identical to SEQ ID NO: 8157
  CDS (1)...(327)

SEQ ID NO: 8669 - DNA, 834 bp, Staphylococcus aureus
  CDS (1)...(834)
atggctattaaaaagtataagccaataacaaatggtcgtcgtaatatgacttcgttagatttcgcagaaatcacgaaaactacacctgaaaagtcattattaaaaccgctaccgaaaaaagcgggacgtaacaaccaaggtaaattgactgtaagacaccatggtggtggacacaaacgtcaataccgtgttatcgatttcaaacgtaacaaagatggtatcaatgcaaaagttgattctattcaatatgatccaaaccgctcagcaaacatcgctttagttgtatatgcagacggtgaaaaacgatatatcattgctcctaaaggattagaagtaggtcaaatcgttgaaagtggtgctgaagctgacatcaaagttggtaacgcattaccattacaaaacattccagttggtacagtagtacacaacatcgagcttaaacctggtaaaggtggacaaatcgctcgttcagctggtgcaagtgctcaagtacttggtaaagaaggtaaatacgtattaatcagattaagatctggtgaagttcgtatgatcttatctacttgccgtgctacaatcggtcaagttggtaacctacaacacgaattagttaacgttggtaaagccggacgttcaagatggaaaggtatccgtccaacagttcgtggttctgtaatgaaccctaacgatcacccacacggtggtggtgaaggtcgtgctcctatcggtagaccatctccaatgtcaccatggggtaaacctacgcttggtaagaaaactcgtcgtggtaaaaaatcatcagacaaacttatcgttcgtggacgtaagaaaaaataa

SEQ ID NO: 8670 - DNA, 1101 bp, Staphylococcus aureus
  CDS (1)...(1101)
gtgtcaaaatttaagtctttgcttctattatttggcacactaattttacttagtggttgttcaaatatagaaattttcaacgcaaaagggccagtagcaagtagtcagaagttcttgattctttattcaatcgtcttcatgcttgttatttgtttcgttgtacttggcatgttcgccatttttatttacaagtatagttataataagaatgccgaatctggtaagatgcaccataatgccatcattgaaacaatatggtttgtaatacctatcataatcgttgctgctttagctattcctacagttaaaactttatacgattacgaaaaaccaccgaagagtgagaaagatccaatggttgtatatgcagtaagtgcaggatacaaatggttctttgcttatccagatgaacatatagagactgttaatacattaacaatccctaaagatcgtcctgttgtatttaagcttcaagctatggatacaatgacaagtttctggattccacaattaggtggtcaaaaatatgccatgactggcatgacaatgaattggacgttagaagcatctcaaactggtacgttcagaggtcgtaactctaacttcaatggtgaaggattctcacgtcaaacatttaaagtaaatgccgttagtcaaaaagactacgacaaatgggtgaaagaagttaaaggtaagaaaacgttagatcaagatacatttgataaacaattattaccaagcacacctaataaagctttagaatttaatggtacacatatggcgtttgttgatccagcagccgatccagaatacatcttctatgcatataaacgtttcaatttcgaattgaaagatccaaacttcactagtgaagaaaatatgtttaaagatgtatcagacaaaccattaatacctgctcgtaaagctcaaattacaaatgcgaactataaacgacatggtatgaagttgatgattcttggaaatgacgaaccatataacaatgagttcaagaaagatgaatcgaaaaatgcgaaagaaatgaagaaaatttcaaaagatgcgcaagatcaagacaatgatgatcatggaggtggacattaa

SEQ ID NO: 8671 - DNA, 2694 bp, Staphylococcus aureus
  CDS (1)...(2694)
atgtttactcaagggaatggccaagacttcttaaaccaaggtggtattttaagagacaaaggtatggcaaatgcatctggttttaaaattgatacggcatataataatgttaatggtaaagtcgataaactcgatgcagataaaacaaacaatctaagtcaaattggcgcagcaaaagttggttacggtacatttgttaaaaatggtgcagatggtgtgactaaccaagttggtcaaaatgccctaaatacaaaagataaacctgtaaataaaataatttatgcagataatacaactaatcatcttgatggtcaattccatggccaaagattaaatgatgtagtattaaattatgatgcagcaacaagtacaataactgctacatatgcaggaaaaacatggaaagctactacagatgatttaggaattgataaatcacaaaaatataatttcttaattacttcaagtcatatgcaaaatagatattctaatggaattatgagaacaaatcttgaaggtgtaacaattacaacgcctcaagctgatttaattgatgatgtggaagtaacgaaacaaccaattcctcataaaactattcgtgagtttgatccaactctagaaccaggctcacctgatgttattgtacaaaaaggtgaagatggagagaaaacaacaactacaccaactaaagttgaccctgatacaggagatgtagttgaacgtggtgaaccaacaacagaagttacaaaaaatccagttgacgagattgtacactttgcacctgaagaagtaccacaaggtcataaagatgagttcgatccaaacttaccaattgacggtacagaagaagtaccaggtaaaccaggcattaagaacccagaaacaggtaaagtggtaacacctccggttgacgatgtcacaaaacatggtccaaaagcaggcgaaccagaggttactaaagaagaaataccattcgagaaaaaacgtgagttcaatccagacttaaaaccaggtgaagagaaagtaacgcaagaaggacaaactggagagaaaacaacaacaacgccaacaacaattaatccattaacgggagaaaaagtaggcgaaggtgaaccaacaacagaagtaacaaaagaaccagtagatgaaatcacacaattcggtggagaagaagtaccacaaggtcataaagatgagttcgatccaaacttaccaattgacggtacagaagaagtaccaggtaaaccaggcattaagaacccagaaacaggtaaagtggtaacacctccggttgacgatgtcacaaaacatggtccaaaagcaggcgaaccagaggttactaaagaagaaataccattcgagaaaaaacgtgagttcaatccagacttaaaaccaggtgaagagaaagtaacgcaagaaggacaaactggagagaaaacaacaacaacgccaacaacaattaatccattaacgggagaaaaagtaggcgaaggtgaaccaacaacagaagtaacaaaagaaccagtagatgaaatcacacaattcggtggagaagaagtaccacaaggtcataaagatgagttcgatccaaacttaccaattgacggtacagaagaagtaccaggtaaaccaggcattaagaacccagaaacaggtaaagtggtaacacctccggttgacgatgtcacaaaacatggtccaaaagcaggcgaaccagaggttactaaagaagaaattccatatgaaactaaacgcgtattagatccaacaatggaaccaggtagtcctgataaagtagctcaaaaaggtgaaaatggtgaaaaaacaacaacaacaccaactacaattaatccattaacgggagaaaaagtaggcgaaggcgaaccaacaacggaagtaacgaaagaaccaatagacgaaattgttaactatgcacctgaaattattcctcatggtacacgtgaagaaattgatccaaacttaccagaaggtgaaactaaagttatcccaggtaaagatggcttgaaagatcctgaaactggagaaatcattgaagaaccacaagatgaagtaatcatccatggtgctaaagatgattcagattcagatgcggacagcgactcagacgcagatagcgattcagatgcggacagcgactcagattcagacagcgactcagacgcagatagcgactcagacgcagatagcgactctgatgcggacagcgactcagacgcagatagcgactcagacgcagatagcgactcagacgcagacagcgattcagacgcagatagcgactctgatgcggacagcgactcagattcagacagcgattcagacgcagatagcgattcagatgcggacagcgattcagacgcagacagcgattcagacgcagatagcgattctgatgcggacagcgattcagacgcagatagcgattcagattcagacagcgactcagacgcagatagcgattcagacgcagatagcgactctgatgcggacagcgactcagacgcagatagagatcataatgacaaaacagataaaccaaataataaagagttaccagatactggtaatgatgctcaaaataatggcacattatttggttcactaatccgtgcgcttggaggattattcttagttggcagacgtcgtaaaaacaaaaataatgaagaaaaataa

SEQ ID NO: 8672 - DNA, 1143 bp, Staphylococcus aureus
  CDS (1)...(1143)
atgaaaaagatagtactttacggcggtcagtttaaccctatccatactgcacatatgatagtagctagcgaagtatttcatgaattacagccagatgaattttattttttacctagttttatgtctccattgaaaaagcaccatgattttatagacgttcagcacagattaacaatgatacagatgattatcgacgagcttggttttggagatatttgtgacgatgaaattaaacgtggtggtcaaagttatacctatgacacgatcaaggcattcaaggagcaacacaaagacagtgagttgtactttgttattgggacggatcagtataaccaactagagaaatggtatcaaattgaatacttaaaagaaatggttacttttgtagttgtaaatcgagacaaaaatagtcaaaatgttgaaaatgctatgattgcaattcagatacctagggtagatataagttcgacaatgattcgacaaagagttagtgaagggaatctatccaagttcttgttcctaaatccgttgaaaactatattaagggggaaggattatatgaacattgaaaaagcaaaacggcttgcaaaagagaaactgccagagaaacgttataatcattctttaagagttgcagaaacagcgattaaattggcagaaatttatgatggagacactagtaaagtagaattagcaggtgtattacatgatttctgtaaatatgatgatttaggtaaaatgtatcaaattgttcgacaatacgaattaggtaatgatctactgagttatggtagtgaaatattgcatggccctgtgtgtgcagcaatcatggaacatgaatatggtatcaatgatgaggaagtattaatggctatcaaataccatactactggacgtcaacaaatgacaaaaactgaaaaactgatttttattgcagattacatcgaacctggaagaacaatcccaggagttgatgatattcgagatatggcatacaatcaaggtagtttagataagacaatttatgaaatttctaaacgcacagtactatttttaatacagaaagatattacggtatataataagacgattgactgtttaaattattataactatagtgacgaaagaataaaggatgattaa

SEQ ID NO: 8673 - DNA, 930 bp, Staphylococcus aureus
  CDS (1)...(930)
atggctaaaacatatattttcggacataagaatccagacactgatgcaatttcatctgcgattattatggcagaatttgaacaacttcgaggtaattcaggagccaaagcataccgtttaggtgatgtgagtgcagaaactcaattcgcgttagatacatttaatgtacctgctccggaattattaacagatgatttagatggtcaagatgttatcttagttgatcataacgaattccaacaaagttctgatacgattgcctctgctacaattaagcatgtaattgatcatcacagaattgcaaatttcgaaactgctggtcctttatgttatcgtgctgaaccagttggttgtacagctacaattttatacaaaatgtttagagaacgtggctttgaaattaaacctgaaattgccggtttaatgttatcagcaattatctcagatagcttacttttcaaatcaccaacatgtacacaacaagatgttaaagcagctgaagaattaaaagatattgctaaagttgatattcaaaagtacggcttagatatgttaaaagcaggtgcttcaacaactgataaatcagttgaattcttattaaacatggatgctaaatcatttactatgggtgactatgtgactcgtattgcacaagttaatgctgttgaccttgacgaagtgttaaatcgtaaagaagatttagaaaaagaaatgttagctgtaagtgcacaagaaaaatatgacttatttgtacttgttgttactgacatcattaatagtgattctaaaattttagttgtaggtgctgaaaaagataaagttggcgaagcattcaatgttcaattagaagatgacatggccttcttatctggtgtcgtttctcgaaaaaaacaaatcgtacctcaaatcactgaagcattaacaaaataa

SEQ ID NO: 8674 - DNA, 1824 bp, Staphylococcus aureus
  CDS (1)...(1824)
atggaggaaaatgtcgttatgtgtggaattgttggttatattggctatgataatgccaaagaattattattaaaaggtttagaaaaattagaatacagaggttatgactctgcaggtatcgcagtagtaaatgatgataatacaactgtatttaaagaaaaaggtcgtattgcagaattacgtaaagttgctgatagtagcgattttgatggacctgttggaatcggtcacacacgttgggcaacacacggtgtaccgaatcatgaaaactctcatccacatcaatcatcaaatggccgttttactctagttcataacggtgttattgaaaactatgaagagttaaaaggtgaatacttacaaggtgtatcattcatttcagaaacagatacagaagttatcgttcaattagttgaatacttttcaaatcaaggactttcaactgaagaagcatttacaaaagttgtgtcattattacatggttcatatgcattaggtttattagatgctgaagacaaagacacaatctatgttgctaaaaataaatcaccattattattaggtgttggtgaaggtttcaatgttatcgcatcagacgcacttgcaatgttacaagtgacaagcgaatataaagaaatccatgaccatgaaatcgttattgttaaaaaagatgaagttattattaaagatgcagatggaaacgttgtagaacgtgattcatatattgctgaaattgatgcatcagatgctgaaaaaggtgtttatgcacactacatgttaaaagaaattcatgaacaaccagcagtaatgcgtcgtattattcaagaatatcaagatgcagaaggtaacttgaaaattgatcaagacatcatcaatgatgttaaagaagcagaccgcatttacgttattgcagcaggtacaagctaccatgcaggtttagtaggtaaagaatttttagaaaaatgggctggcgtaccaactgaagtacacgttgcatcagagtttgtctacaacatgccattattatctgaaaaaccattgttcgtttatatttctcaatcaggtgaaactgcagatagccgcgccgtattagttgaaactaataaattaggtcataaatcattaacaatcactaatgttgcaggttcaactttatcacgtgaagcagaccacacattgttattacacgcgggtcctgaaatcgcagttgcatctacaaaagcatatactgcacaaattgcagtattatcaatcttgtctcaaatcgttgcaaaagagcatggtcgtgaagcagatattgatttattgagagaattagcaaaagtaacaacagcaatagaagcaattgttgacgatgcaccaattatggaacaaattgctacagatttcttagaaacaacacgcaatgcattctttatcggacgtactattgactataacgtaagtttagaaggtgcgttaaaacttaaagaaatttcttacattcaagcagaaggttttgctggtggagaacttaaacatggtacaattgccttaatcgaagaaggtacaccagttgtaggtttagcaacacaagagaaagttaatttatcaattcgtggtaacgttaaagaggtagtagcacgtggtgcacatccatgtattatttctatggagggtcttgaaaaagaaggcgacacttatgtcattcctcatgtacatgaattgttaacgccattagtatcagtggttgcattacaattaatttcatactatgcagcattacacagagatttagatgttgataaaccacgtaaccttgctaaatcagttactgtggaataa

SEQ ID NO: 8675 - DNA, 567 bp, Staphylococcus aureus
  CDS (1)...(567)
gtgctttgtgaaaattgtcaacttaatgaagcggaattaaaagttaaagttacaagtaaaaataaaacagaagaaaaaatggtgtgtcaaacttgtgctgagggacaccatccgtggaatcaagctaatgaacaacctgaatatcaagaacatcaagataatttcgaagaagcatttgttgttaagcaaattttacaacatttagctacgaaacatggaattaattttcaagaagtagcgtttaaagaagaaaaacgttgcccatcatgtcatatgactttgaaagatattgcacatgttggtaaatttgggtgtgctaattgttatgcaacatttaaagatgacatcattgatatcgtccgcagagttcaaggtggacaatttgagcacgttggaaagacaccacattcttcacataaaaagatagctttaaagcgaaaaatcgaagaaaagaatgaatatttgaaaaaacttattgaaatccaagattttgaggaagcagccattgttagagatgaaattaaagcactaaaagctgagagtgaggtgcaacatgatgacgcataa

SEQ ID NO: 8676 - DNA, 561 bp, Staphylococcus aureus
  CDS (1)...(561)
atgaaaataggtgtattagcattacaaggtgcagtacgtgaacatattagacatattgaattaagtggtcatgaaggtattgcagttaaaaaagttgaacaattagaagaaatcgagggcttaatattacctggtggcgagtctacaacgttacgtcgattaatgaatttatatggatttaaagaggctttacaaaattcaactttacctatgtttggtacatgcgcaggattaatagttctagcgcaagatatagttggtgaagaaggataccttaacaagttgaatattactgtacaacgaaactcattcggtagacaagttgacagctttgaaacagaattagatattaaaggtatcgctacagatattgaaggtgtctttataagagccccacatattgaaaaagtaggtcaaggcgtagatatcctatgtaaggttaatgagaaaattgtagctgttcagcaaggtaaatatttaggcgtatcattccatcctgaattaacagatgactatagagtaactgattactttattaatcatattgtaaaaaaagcatag

SEQ ID NO: 8677 - DNA, 1341 bp, Staphylococcus aureus
  CDS (1)...(1341)
atgccaaaacgtactttcactaaagacgacattcgtaaatttgcagaagaggaaaatgtaagatatttaagattacaattcactgatattttaggaacaattaaaaatgttgaagtgcctgtaagccaattagaaaaagtacttgataacgaaatgatgtttgacggttcttctatcgaaggtttcgtacgtatcgaagaatcagatatgtacttacatccagatttagatacttgggtaatcttcccatggactgctggacaaggtaaagttgcacgtttaatttgtgatgtatataaaacagatggaacaccatttgaaggggatcctcgtgcaaacttaaaacgtgtattaaaagaaatggaagatttaggcttcacagactttaacctagggcctgaaccagaattcttcttgtttaagttggatgaaaaaggggaaccaactttagaacttaatgatgatggtggatatttcgatttagcacctacagatttaggtgaaaactgtcgtcgtgatattgttttagaattagaggatatgggcttcgatattgaagctagtcaccatgaagttgcccctggtcaacatgaaattgactttaaatatgcagatgctgttacagcatgtgataatatccaaacatttaaattggttgttaaaacaatcgcacgtaaacataatttacacgcaacatttatgcctaaaccattattcggtgtgaatggtagcggtatgcactttaacgtttcattattcaaaggtaaagaaaatgcattctttgatccaaatactgaaatgggcttaacggaaactgcatatcaatttacagcaggtgtgcttaaaaatgcacgcggatttactgctgtatgtaacccgttagtaaactcatataaacgtttagtacctggttatgaagcaccatgttatattgcatggagtggtaaaaaccgttcaccattaatccgtgtaccatcttcaagaggattatctactcgtatcgaagtacgttcagtagatccagctgcaaacccatacatggcgttagctgcaatcttagaagctggactagatggtattaaaaataaattaaaagttccagaaccagttaaccaaaatatttacgaaatgaaccgtgaagaacgtgaagcagtaggcattcaagacttaccttcaacactttatactgcattaaaagcaatgcgtgaaaatgaagttattaaaaaagctttaggaaatcatatctataatcaatttattaattcaaaatcaattgaatgggattactacagaactcaagtctctgaatgggaaagagatcagtacatgaagcaatattaa

SEQ ID NO: 8678 - DNA, 966 bp, Staphylococcus aureus
  CDS (1)...(966)
atgttaaataatgaatataagaattcgtcattaaagattttttcattgaaaggaaacgaagcattagcgcaagaagttgctgaccaagtaggaattgaactaggtaaatgttcagttaaacgttttagtgatggagaaattcaaattaatatcgaagagagtattcgtggttgtgacgtatttattattcaaccaacatcatatcctgtgaatctacatttaatggaattattaattatgattgatgcttgtaaacgtgcttctgcagcaacaatcaatattgtagtgccatattatggatatgcaagacaagatagaaaagcccgtagccgtgagccaatcactgctaaattagttgcaaacttaatcgaaacagctggcgcaactcgtatgattgcgttagacttacatgcaccacaaattcaaggattctttgatattccaattgaccacttaatgggtgtgccaattcttgctaaacatttcaaagatgatccgaatattaacccagaagaatgtgtcgttgtttcaccagaccatggcggcgttacacgtgcacgtaaattagctgacattttaaaaactccaattgcaattatagataaacgtcgtcctagaccaaatgttgctgaagtgatgaacattgttggtgagattgaaggacgtacggcaattattattgacgatattattgatacagcaggtacaatcactttagctgcacaagcattaaaagataaaggtgctaaagaagtatatgcttgttgtacacaccctgttttatcaggaccggctaaagaacgtatcgaaaattctgctataaaagaattaatcgtaacaaactcaattcatttagatgaagatcgcaaaccatctaacactaaagaattatctgttgctggtttaatcgcacaagctatcattcgtgtatacgaaagagaatcagttagcgtattatttgactaa

SEQ ID NO: 8679 - DNA, 2184 bp, Staphylococcus aureus
  CDS (1)...(2184)
atgacggaaaacaaaggatcttctcagcttaagaaaaacggtaataatggtgggaaatccaactcaaaaaagaatagaaatgtgaagagaacgattattaagattattggcttcatgattattgcatttttcgttgttcttttactaggtatcttattgtttgcttattatgcttggaaagcacctgcttttaccgaagctaaattacaagatccgattcctgcaaagatatatgacaagaacggagaacttgttaaaacattagataatggccaaagacatgagcatgtaaatttaaaagacgtgccgaaatcaatgaaagacgcagtacttgcaactgaagacaatcgtttctacgaacatggcgcacttgattataaacgtttattcggtgcaattggtaagaacttgactggtggatttggttctgaaggtgcctcaacattaacacaacaagttgttaaagatgcatttttatcacaacataaatctattggacgtaaagctcaagaagcatacttatcatatcgtttagaacaagagtatagtaaagatgatatcttccaagtatatctaaacaaaatttactattctgatggcgtaacaggtattaaagctgctgctaagtattactttaataaagatttaaaagatttaaacttagcggaagaagcttatttagccggtttacctcaggttccaaacaactataatatttatgatcatccaaaagctgctgaagatcgtaaaaacactgttttatacttaatgcattatcataaacgcattacagataaacagtgggaagatgctaagaaaatcgatttaaaagcgaacttagtaaatcgtactcctgaagaacgtcaaaacattgatacaaatcaagattctgagtataattcatacgttaactttgtaaaatctgaattaatgaataataaagcattcaaagatgaaaatttaggtaatgtattacaaagtggtattaaaatttatacaaacatggataaagatgttcaaaaaacattacaaaatgatgttgataatggtagcttctacaagaataaagaccaacaagttggtgcaacaattcttgatagtaaaactggtggtttagttgctatatctggtggacgtgatttcaaagacgtcgttaacagaaaccaagcaacagatcctcaccctactggttcatctttaaaacctttcttagcgtatggacctgccattgaaaatatgaaatgggcaacaaaccatgcgattcaagatgaatcttcatatcaagttgatggttctacatttagaaactatgatacgaagagtcacggtactgtatctatttatgatgctttacgacaaagtttcaatatcccagctttaaaagcttggcaatcagttaagcaaaatgctggtaatgatgcacctaagaaattcgctgccaaacttggcttaaactacgaaggcgatattggtccatctgaagtacttggtggttctgcttcagaattctcaccaacacaattagcatcagcatttgctgcaatcgctaacggtggtacttataacaacgcgcattcaattcaaaaagtagttactcgtgatggtgaaacaatcgaatacgatcatactagccataaagcgatgagtgattacactgcatacatgttagctgagatgctaaaaggtacatttaaaccatatggttctgcatatggccatggtgtatctggagtaaatatgggtgctaagacaggtactggtacttacggtgctgaaacttattcacaatataatttacctgataatgcagcgaaagacgtgtggattaacggctttacacctcaatacactatgtcagtgtggatgggcttcagtaaagttaaacaatatggtgaaaactcatttgtgggacatagccaacaagaatatccacagttcttatatgaaaatgtgatgtcaaaaatttcatctagagatggcgaagactttaaacgtcctagctcagtaagtggtagtatcccatcaatcaatgtttctggtagtcaagataacaacactacaaatcgtagtacacacggtggtagtgacacatcagcaaacagcagtggtactgcacaatcaaataacaatactagatctcaacaatctagaaacagcggtggattaacaggtatattcaactaa

SEQ ID NO: 8680 - DNA, 603 bp, Staphylococcus aureus
  CDS (1)...(603)
atggctcgattcagaggttcaaactggaaaaaatctcgtcgtttaggtatctctttaagcggtactggtaaagaattagaaaaacgtccttacgcaccaggacaacatggtccaaaccaacgtaaaaaattatcagaatatggtttacaattacgtgaaaaacaaaaattacgttacttatatggaatgactgaaagacaattccgtaacacatttgacatcgctggtaaaaaattcggtgtacacggtgaaaacttcatgatcttattagcaagtcgtttagacgctgttgtttattcattaggtttagctcgtactcgtcgtcaagcacgtcaattagttaaccacggtcatatcttagtagatggtaaacgtgttgatattccatcttattctgttaaacctggtcaaacaatttcagttcgtgaaaaatctcaaaaattaaacatcatcgttgaatcagttgaaatcaacaatttcgtacctgagtacttaaactttgatgctgacagcttaactggtactttcgtacgtttaccagaacgtagcgaattacctgctgaaattaacgaacaattaatcgttgagtactactcaagataa

SEQ ID NO: 8681 - DNA, 978 bp, Staphylococcus aureus
  CDS (1)...(978)
atgaaaatgaataaattagtcaaatcatccgttgctacatctatggcattattattactttctggtactgctaatgctgaaggtaaaataacaccagtcagcgtaaaaaaagtcgatgacaaagttactttatacaaaacaacagccacagcagattctgataaatttaaaatttcacagattttaacatttaatttcatcaaagataaaagttatgataaagatactttagtacttaaagctactgggaatattaactcaggctttgtgaaacctaatcctaatgactatgacttttcaaaattatattggggagctaaatacaatgtatctataagctcacaatctaatgattcagtaaacgtcgttgattatgcaccaaaaaatcaaaatgaagagtttcaagttcaaaatactttaggctatacatttggtggtgacattagtatctctaatggtttatctggtggacttaatggaaatacagctttttctgaaacaattaattataaacaagaaagttacagaacaacattaagtcgcaacacaaattataaaaatgttggctggggagttgaagcacataaaattatgaataatggttggggaccttatggaagagatagcttccacccaacatatggtaatgaactcttcttagctggcagacaaagcagtgcatacgctggccaaaacttcatagcgcaacaccaaatgccattattatctagaagtaacttcaatccagaatttttaagcgtactatcacacagacaagatggcgctaaaaaatctaaaattacagtaacttatcaacgtgaaatggatttataccaaattcgttggaatggcttctactgggcaggcgcaaattataaaaactttaaaactagaacatttaaatcaacatatgaaattgattgggaaaatcacaaagtgaaattgttagatacaaaagaaactgaaaacaataaatag

SEQ ID NO: 8682 - DNA, 1008 bp, Staphylococcus aureus
  CDS (1)...(1008)
atgaatttggctaaacgcatattacaaggggaacaattaacaaaagagactgtattgaaaatttatgaggatactaatattgataccttagatttattaaatgaggcgtacattttaagaaaacattattttggtaaaaaagtaaaattaaacatgattttaaatgctaaaagtggtatatgtcctgaaaattgtgggtactgtggacaatcacgagatattaaacaaaaacagcgatatgctttaattccagaggaacaaattatcgatggagcaaaggtggcacatgataatcatattggaacatattgtattgttatgagtggtagaggaccgagcgataaagaagttgatcatattagtaatactgtaagaacgattaaatctcaacacccgcaactaaaaatctgtgcatgtttaggattaacgaatgacgaacaagctaagaaacttaagtcagctggtgtagacagatataaccacaatattaatacaagtgaaaattaccatgataacgtcgtgacaacgcatagttataaagatagaacagatacgatagaactaatgaaagcgaataatatatcaccatgttctggcgtgatttgtggtatgggagaatctaatcaagatattgttgatatggcatttgctttaaaagaaatggatgccgacagtattccgattaattttttgcatccaatcaaaggcacaaagtttggaagcatggatgatttaacaccaatgaaatgtttaagaatcgtagcattattccgattaatcaatcctacgaaagaaattcgtattgctggaggaagagaggtcaacttacgttcgttacagccattagcattaaaagcggcgaattcaatatttgtcggtgattatctaattactggtgggcaaccgaaccaattagactacgatatgattaatgatttaggctttgaaattgattatgacacttgtgaaaataaggaaaacaagaatgaagtttcaagagcaaattga

SEQ ID NO: 8683 - DNA, 1359 bp, Staphylococcus aureus
  CDS (1)...(1359)
atgaattacacacaacaacttaaacaaaaagactcagaatatgtttggcatccatttacacaaatgggtgtatatagcaaagaagaagcaatcatcattgaaaaaggaaagggtagttacctttacgatacgaatggcaataaatatttagatggttatgcatcgttgtgggtcaatgtgcatggtcataataacaaatacttaaataaggtaattaaaaagcaactcaataaaattgcccattctacgctgctaggatcatcaaatattccgtcaatagaacttgcggaaaaattaatcgaaatcacgccaagtaatctaagaaaagtattttattctgatacaggcagtgcgtctgttgaaatcgcaataaagatggcatatcagtattggaaaaatattgatagagaaaaatatgccaagaaaaacaagtttataacgctaaatcacggttatcatggggatacgattggtgcggtaagtgttggtggtatcaagacctttcataaaatatttaaagacttaatatttgagaatattcaagtagaaagcccatctttctatcgcagtaattacgatactgaaaatgaaatgatgacagctattttaacgaatatagagcaaattctaattgaaagaaatgatgaaatcgcagggtttatattggaaccgttgattcaaggtgcgacaggcttgtttgttcatcctaaaggctttttgaaagaagtcgagaaattgtgcaaaaaatacgatgtcttattaatttgtgatgaggtagcagttggttttgggagaactggaaagatgtttgcatgcaatcatgaagatgttcaaccggatattatgtgtttaggtaaggcgattactggtggctacttaccacttgcagctacattgacatctaaaaaaatatacaatgcatttttaagtgattcgcatggtgtgaatacctttttccatggtcatacatacaccggaaatcaaatcgtttgtacggttgcattagaaaatataagactttatgaaaaacgtaagttattgtcacatattgaaacgacatcatcaacacttgagaaacagttacatgcgctgaagcgtcatcgaaatgttggtgatgtaagaggacgaggcttaatgtttggagttgaattagttacagataaagatagtaaaacgccgttagaaattgaaaaagttgaacgtattgtacgtaattgtaaagaaaacgggctaatgattagaaatttagaaaatgtcattacgtttgtgccagtgttaagtatgtcaaataaagaagtgaaaacgatggtacgtatttttaaaaaggcagtacataacattttagataggaagtgttaa

SEQ ID NO: 8684 - DNA, 285 bp, Staphylococcus aureus
  CDS (1)...(285)
atgctaaaaccaattggaaatcgtgtgattattgagaaaaaagaacaagaacaaacaactaaaagtggtattgttttaactgatagtgctaaagaaaaatcaaacgaaggcgttatcgttgcagtaggaactggacgcctattaaatgatggtacaagagtgactcctgaagtgaaagaaggggaccgtgtcgtgttccaacaatatgctggtacagaagttaaacgagataatgaaacatatctggtattaaatgaagaagatattttagcagttattgaataa

SEQ ID NO: 8685 - DNA, 681 bp, Staphylococcus aureus
  CDS (1)...(681)
atgtatttacgtagttcaatcattgaggaggaaatgatcttgttaaaaagaatgagagacgatataaaaatggtatttgagcaggatccagcggcacgttcaacattagaagtcattacaacgtatgcaggtttacatgcagtttggagtcatttgattgcacataagttatacaaccaaaaaaaatatgttgcagcacgcgcgatatctcaaatttcaagatttttcacaggtatagaaatccatccaggtgctaaaattggaaagcgtctatttatagatcatggtatgggcgttgtaataggagaaacatgtacaattggtgataatgtgacaatctatcaaggcgtgacacttggtgggacagggaaagaaagagggaaaagacacccagatataggagacaatgttttaatagcagccggtgcgaaagttttaggaaatattaaaataaattcaaatgtaaatattggtgcaaattcagttgttttacaatcagttccaagttattcaacggttgttggtataccaggacatattgttaagcaagatggtgttcgagttggaaaaacatttgatcatcgccatctacctgatccaatttatgaacaaattaagcatttagaacgacaacttgaaaagactaggaatggagagattcaagatgattacattatataa

SEQ ID NO: 8686 - DNA, 693 bp, Staphylococcus aureus
  CDS (1)...(693)
atggctaaaaaaggtaaaaagtatcaagaagcagctagtaaagttgaccgtactcagcactacagtgttgaagaagcaattaaattagctaaagaaacaagcattgctaactttgacgcttctgttgaagttgcattccgtttaggaattgatacacgtaaaaatgaccaacaaatccgtggtgcagttgtattaccaaacggaactggtaaatcacaaagtgtattagtattcgctaaaggtgacaaaattgctgaagctgaagcagcaggtgctgactatgtaggtgaagcagaatacgttcaaaaaatccaacaaggttggttcgacttcgatgtagtagttgctacaccagacatgatgggtgaagttggtaaattaggtcgtgtattaggaccaaaaggtttaatgccaaaccctaaaactggaactgtaacaatggatgttaaaaaagctgttgaagaaatcaaagctggtaaagtagaatatcgtgctgaaaaagctggtatcgtacatgcatcaattggtaaagtttcatttactgatgaacaattaattgaaaacttcaatactttacaagatgtattagctaaagctaaaccatcatctgctaaaggtacatacttcaaatctgttgctgtaactacaacaatgggtcctggagttaaaattgatactgcaagtttcaaataa

SEQ ID NO: 8687 - DNA, 432 bp, Staphylococcus aureus
  CDS (1)...(432)
gtgcacatcgtggctaaaaaagtagataaagttgttaaattacaaattcctgcaggtaaagcgaatccagcaccaccagttggtccagcattaggtcaagcaggtgtgaacatcatgggattctgtaaagagttcaatgcacgtactcaagatcaagcaggtttaattattccggtagaaatcagtgtttatgaagatcgttcatttacatttattacaaaaactccaccggctccagtattacttaaaaaagcagctggtattgaaaaaggttcaggcgaaccaaacaaaactaaagttgctacagtaactaaagatcaagtacgcgaaattgctaacagcaaaatgcaagacttaaacgctgctgacgaagaagcagctatgcgtattatcgaaggtactgcacgtagtatgggtatcgttgtagaataa

SEQ ID NO: 8688 - DNA, 549 bp, Staphylococcus aureus
  CDS (1)...(549)
atgtctgaagaagttggcgcaaagcgttggtatgcagtgcatacatattctggatatgaaaataaagttaaaaagaatttagaaaaaagagtagaatctatgaatatgactgaacaaatctttagagtagtcataccggaagaagaagaaactcaagtaaaagatggcaaagctaaaacgactgttaaaaaaacattccctggatatgttttagtggaattaatcatgacagatgaatcatggtatgtggtaagaaatacaccaggcgttactggttttgtaggttctgcaggtgcagggtctaagccaaatccattgttaccagaagaagttcgcttcatcttaaaacaaatgggtcttaaagaaaagactatcgatgttgaactcgaagttggcgagcaagttcgtattaaatcaggtccatttgcgaatcaagttggtgaagttcaagaaattgaaacagataagtttaagctaacagtattagtagatatgtttggccgagaaacaccagtagaagttgaattcgatcaaatagaaaagctttaa

SEQ ID NO: 8689 - DNA, 525 bp, Staphylococcus aureus
  CDS (1)...(525)
atgaaagaacgttacttaatcattgatggatacaatatgataggacaatcaccaacgctaagcgccattgcaaaagagaatttagaagaagctagaatgcaattaatagatgcaattgcaaattataatgcagttatttcagatgaaattatttgtgttttcgatgcttatgaccaatcgggtgttgaaagagaatacatgtatcatggcgttaaaacgatttttaccaaggaaaaagaaacagctgatagtttcatagaacgttatgtttatgaactttatgacaagcatactaagcatattacagttgtaacaagtgatatgagtgagcaacatgctatctttggatcaggtgcatatagaatatcatctcgcgaaatgtggagagatttaaaagaaaatgaaattgatgtgagtaaatcattagatgatataagtgaaaacaagccaagaactcgaattccgttatcttctgaaatccttgcagaatttgaaaaaatacgaagaggacatcataagaaatga

SEQ ID NO: 8690 - DNA, 879 bp, Staphylococcus aureus
  CDS (1)...(879)
atgactgaatttgatttatcgacacgagaaggtcgttggaaacactttggttccgtagatcctattgaaggcacgaaacctactactaagaacgaaatgacagatttacaaagtacacataaagattttttatttgaaatagaagaagttggtattaaaaacttagtgtaccctgtacttgttgaccagtatcaaacagctggcacatttagtttttcaacaagtttaacaaaagacgaaaaaggtattaatatgagccgtataatcgaaagtgttgaaaagcactatgataatggtattgaacttgaatttaatacactttatcaggtgttacgcactttacaaacgaatatgaaacaaaatgcggcaggcgttgatgtttctgggaaatggttctttgatcgctatagtccaaccacaaatattaaagcagttggtaatgccgatgtcacttatggattagcaattgacggtgataaagttacacgtaaagaacttactattgaagcaactgtcacaacgctatgcccttgttcaaaagaaataagtgagtattcagcgcacaaccaacgtggtgttgtcactgttaaaacatatattaataaagatcaagacatagttgatgactataaaaataaaattttagatgcaatggaagctaatgcaagttcaattctataccctattttaaaacgtcctgatgaaaaacgtgtgacagagcgtgcatatgaaaatccacgttttgtcgaagacttaattcgtttaattgccgcggacttagttgaatttgattggttagacggtttcgatatcgaatgtcgtaatgaagagtctatccatcaacatgatgctttcgctaaattaaagtatcgcaaataa

SEQ ID NO: 8691 - DNA, 2457 bp, Staphylococcus aureus
  CDS (1)...(2457)
atgttatttggtagattaactgagcgtgcacagcgcgtattagcacatgcccaagaagaagcaattcgtttaaatcattcaaatataggaacagaacacctattattggggttaatgaaagaacctgaaggaattgctgcaaaagtattagaaagttttaatatcactgaagataaagtaattgaagaagttgaaaaattaatcggacatggtcaagatcatgttggtacattgcattatacacctagagctaaaaaagtcattgaattatcgatggatgaagctagaaaattacatcacaattttgttggaacggaacatattttattaggcttgattcgtgaaaatgaaggtgttgcagcaagagtttttgcaaatctagatttaaatattactaaagcacgtgcacaagttgtgaaagctttaggaaaccctgaaatgagtaataaaaatgcacaagctagtaagtcaaataatactccaactttagatagtttagctcgtgacttaacagtcattgccaaagacggtacattagatcctgttataggacgtgataaagaaattacacgtgtaattgaagtattaagtagacgtacgaaaaacaatcctgtgcttattggagagccaggtgttggtaaaactgctattgctgaaggtttagcgcaagccatagtgaataatgaggtaccagagacattaaaagataagcgtgttatgtctttagatatgggaacagtagttgcaggtactaaatatcgtggtgaatttgaagagcgtctgaaaaaggttatggaagaaatccaacaagcaggtaatgtcatcctatttattgatgagttgcatactttagttggtgctggtggtgctgaaggtgctatcgatgcttcgaatattttgaagccggcattagcacgtggtgaattacaatgtattggtgctactacattagatgaatatcgcaaaaatattgaaaaagacgcggctttagaacgtcgtttccaacctgtacaagttgatgaaccttcagtagtagatacagttgctattttaaaaggattaagagatcgttacgaagcacaccatcgtattaatatttcagacgaagctattgaagcagctgttaaattaagtaacagatacgtttcagatcgtttcttaccagataaagcaattgatttaattgatgaagcaagttctaaagtaagacttaagagtcatacgacacctaataatttaaaagaaattgaacaagaaattgaaaaagttaaaaatgaaaaagatgccgcagtacatgctcaagagtttgaaaatgctgctaacctgcgtgataaacaaacaaaacttgaaaagcaatatgaagaagctaaaaatgaatggaagaatgcacaaaatggcatgtcaacttcattgtcagaagaagatattgctgaagttattgcaggatggacaggtatcccattaactaaaatcaatgaaacagaatctgaaaaacttcttagtctagaagatacattacatgagagagttattgggcaaaaagatgctgttaattcaatcagtaaagcggttagacgtgcccgtgcagggttaaaagatcctaaacgaccaattggtagctttatcttccttggaccaactggtgttggtaaaactgaattagctagagctttagctgaatcaatgtttggcgatgatgatgcgatgatccgtgtagacatgagtgaatttatggaaaaacacgcagtgagccgattagttggtgctcctccaggatatgttggtcatgatgatggtggacaattaactgaaaaagttagacgtaaaccatattctgtaattttatttgatgaaattgaaaaagctcatccagatgtatttaatattctattacaagttttagatgatggacatttgacagatacaaaaggacgtacagttgatttcagaaatacaattatcataatgacatcaaacgttggggcacaagaattacaagatcaacgatttgctggattcggtggttcaagtgatggacaagattatgaaacaattcgaaaaacgatgttaaaagaattaaaaaattcattccgtccagaatttttaaaccgtgtagatgatatcattgtattccataaactaacaaaagaagaattaaaagaaattgtaacaatgatggttaataaattaacaaatcgattatctgaacaaaacataaatattattgtaactgataaagcgaaagacaaaatcgcagaagaaggatatgatccagaatatggtgcaagaccattaattagagcgatacaaaaaactatcgaagataatttaagtgaattaatattagatggtaatcaaattgaaggtaagaaagttacagtagatcatgatggtaaagagtttaaatatgacattgctgaacaaacttcagaaactaaaacaccatcgcaagcataa

SEQ ID NO: 8692 - DNA, 717 bp, Staphylococcus aureus
  CDS (1)...(717)
atgacacatgtggaagtagtagcgactatcgcgccacaattatctatcgaagaaactttaattcaaaaaattaatcatcgtattgatgcaatagacgtattagaattacgaattgatcaaattgaaaatgtcacagttgatcaagtggcagaaatgattacaaagctgaaggttatgcaagattcattcaaattattagttacgtatcgtacaaagttacaaggtggctatgggcaatttacaaatgactcgtatcttaatttaatatcagacttagcaaatatcaatggcatagatatgattgatatagaatggcaagcagatattgacattgaaaaacatcaacgaatcattacacatttgcaacagtataataaagaggtggttatatcacatcataatttcgaaagtacgcctccattagatgaattgcaatttatattttttaaaatgcaaaaattcaacccagaatacgttaaattagcagtaatgccacataataaaaatgatgtgttaaatttattgcaggcaatgtctacattttcagatactatggactgcaaagttgttggtatttcaatgtctaaacttggactaataagtagaacggctcaaggcgtttttggtggtgcgttgacttatggttgtatcggagtaccacaagctccaggacagattgatgttactgatttaaaagcacaagtgactttatactaa

SEQ ID NO: 8693 - DNA, 579 bp, Staphylococcus aureus
  CDS (1)...(579)
atgaatattccgaaccagattacggtttttagagtagtgttaataccagtttttatattgtttgcgttagttgattttggatttggcaatgtgtcatttctaggaggatatgaaataagaattgagttattaatcagtggttttatttttatattggcttcccttagcgattttgttgatggttatttagctagaaaatggaatttagttacaaatatggggaaatttttggatccattagcggataaattattagttgcaagtgctttaattgtacttgtgcaactaggactaacaaattctgtagtagcaatcattattattgccagagaatttgccgtaactggtttacgtttactacaaattgaacaaggattcgtaagtgcagctggtcaattaggtaaaattaaaacagcagttactatggtagcaattacttggttgttattaggtgatccattggcaacattgattggtttgtcattaggacaaattttattatacattggcgttatttttactatcttatctggtattgaatacttttataaaggtagagatgtttttaaacaaaaataa

SEQ ID NO: 8694 - DNA, 2247 bp, Staphylococcus aureus
  CDS (1)...(2247)
ttaatgttgttgggtgttttccaattaggaataataggtcgtctaattgacagcttctttaattatttatttgggtacagtagatatttaacatatattttagtactcttagcaactggttttattacatactctaaacgtattcctaaaactagacgaacggctggttcgattgtattgcaaattgcattgctatttgtatcacagttagtttttcattttaatagtggtatcaaagctgaaagagaacctgtactttcttatgtgtatcagtcataccaacacagtcatttcccaaattttggtggcggtgtattaggcttttatttattagagttaagcgtacctttaatttcattatttggtgtatgtattattactattttattattatgctcaagtgttattttattaacaaaccatcaacatcgtgaagttgcaaaagttgcactggaaaatataaaagcttggtttggttcatttaatgaaaaaatgtcggaaagaaaccaagaaaaacaattgaagcgtgaagaaaaagcaagacttaaagaagaacaaaaggcacgtcaaaatgaacagccacaaataaaagatgtgagtgattttacggaagtgcctcaagaaagagatattccaatttatgggcatactgaaaatgaaagtaaaagccagagtcaaccaagtcgaaaaaaacgagtgtttgatgcagagaatagttcgaataacatcgtaaatcatcatcaagcagatcagcaagaacaattaacagaacaaactcataacagtgttgaaagtgaaaacactattgaagaagctggtgaagttacgaatgtatcgtatgttgttccaccgttaactttacttaatcaacctgcaaaacaaaaagcaacatctaaagctgaagtgcaacgtaaaggacaagtactagagaatacattaaaagattttggggtaaatgcaaaagtgacacaaattaaaattggtcctgcagtaactcaatatgaaattcaaccagctcaaggggttaaagtgagtaaaattgtaaacttgcataatgatattgcattagctttagcagcaaaagatgttagaatcgaagcgccaatacctggtcgttctgcagtaggtattgaagtgccaaatgagaaaatttcattagtttcactaaaagaagttttagatgaaaaattcccgtctaataataaactagaagttggattaggaagagatatatcaggtgatccaattactgttccactaaatgaaatgccacacttattggtggcaggatcgacgggtagtggtaaatctgtttgtataaatggtattattacaagtattttattaaatgctaagccgcatgaagttaaacttatgttaatcgatccgaaaatggttgaactaaatgtttataacggaattccacacttattaattccggttgttacaaatcctcataaagctgctcaagctttagaaaaaattgtagctgagatggaaagacgttatgatttattccaacattcatcaactagaaacattaaaggttataacgaattaatccgtaagcaaaatcaagaattagatgagaagcaaccagaattaccttatatcgttgttattgtagatgagcttgcagatttaatgatggtagctggtaaagaagttgaaaatgcgattcaacgtattacacaaatggcacgtgcagcaggtatacatttaattgtagcgacacaaagaccttctgtggatgtaattacaggtatcattaaaaataatattccatctagaatagcttttgctgtgagttctcaaacagattcaagaactattattggtactggcggcgcagaaaagttacttggtaaaggtgacatgttatacgttggaaatggtgactcatcacaaacacgtattcaaggggcgtttttaagtgaccaagaggtgcaagatgttgtaaattatgtagtagaacaacaacaggcaaattatgtaaaagaaatggaaccagatgcaccagtggataaatcggaaatgaaaagtgaagatgctttatatgatgaagcgtatttgtttgttgttgaacaacaaaaggcaagtacatcattgttacaacgccaatttagaattggttataatagagcatctaggttgatggatgatttagaacgcaatcaggtaatcggtccacaaaaaggaagcaagcctagacaagttttaatagatcttaataatgacgaggtgtaa

SEQ ID NO: 8695 - DNA, 1350 bp, Staphylococcus aureus
  CDS (1)...(1350)
atgcttaattatacagggttagaaaataaaaatgtattagttgtcggtttggcaaaaagtggttatgaagcagctaaattattaagtaaattaggtgcgaatgtaactgtcaatgatggaaaagacttatcacaagatgctcatgcaaaagatttagaatctatgggcatttctgttgtaagtggaagtcatccattaacgttgcttgataataatccaataattgttaaaaatcctggaataccttatacagtatctattattgatgaagcagtgaaacgaggtttgaaaattttaacagaagttgagttaagttatctaatctctgaagcaccaatcatagctgtaacgggtacaaatggtaaaacgacagttacttctctaattggagatatgtttaaaaaaagtcgcttaactggaagattatccggcaatattggttatgttgcatctaaagtagcacaagaagtaaagcctacagattatttagttacagagttgtcgtcattccagttacttggaatcgaaaagtataaaccacacattgctataattactaacatttattcggcgcatctagattaccatgaaaatttagaaaactatcaaaatgctaaaaagcaaatatataaaaatcaaacggaagaggattatttgatttgtaattatcatcaaagacaagtgatagagtcggaagaattaaaagctaagacattgtatttctcaactcaacaagaagttgatggtatttatattaaagatggttttatcgtttataaaggtgttcgtattattaacactgaagatctagtattgcctggtgaacataatttagaaaatatattagcagctgtgcttgcttgtattttagctggtgtacctattaaagcaattattgatagtttaactacattttcaggaatagagcatagattgcaatatgttggtactaatagaactaataaatattataatgattccaaagcaacaaacacgctagcaacacagtttgccttaaattcatttaatcaaccaatcatttggttatgtggtggtttggatcgagggaatgaatttgacgaactcattccttatatggaaaatgttcgcgcgatggttgtattcggacaaacgaaagctaagtttgctaaactaggtaatagtcaagggaaatcggtcattgaagcgaacaatgtcgaagacgctgttgataaagtacaagatattatagaaccaaatgatgttgtattattgtcacctgcttgtgcgagttgggatcaatatagtacttttgaagagcgtggagagaaatttattgaaagattccgtgcccatttaccatcttattaa

SEQ ID NO: 8696 - DNA, 966 bp, Staphylococcus aureus
  CDS (1)...(966)
atgatttttgtatatgcgttattagcgctagtgattacatttgttttggtacctgttttaatacctacattaaaaaggatgaaatttggtcaaagtattcgagaagaaggtccacaaagccatatgaagaagactggtacaccaacgatgggtggactaacatttctattaagtattgtgataacgtctttggtggctattatatttgtagatcaagctaatccaatcatactgttattatttgtgacgattggttttgggttaattggttttatagatgattatattattgttgttaaaaagaataaccaaggtttaacaagtaaacagaagtttttggcgcaaattggtattgcgattatattctttgttttaagtaatgtgtttcatttggtgaatttttctacgagcatacatattccatttacgaatgtagcaatcccactatcatttgcatatgttattttcattgttttttggcaagtaggtttttctaatgcagtaaatttaacagatggtttagatggattagcaactggactgtcaattatcggatttacaatgtatgccatcatgagctttgtgttaggagaaacggcaattggtattttctgtatcattatgttgtttgcacttttaggatttttaccatataacattaaccctgctaaagtgtttatgggagatacaggtagcttagctttaggtggtatatttgctaccatttcaatcatgcttaatcaggaattatcattaatttttataggtttagtattcgtaattgaaacattatctgttatgttacaagtcgctagctttaaattgactggaaagcgtatatttaaaatgagtccgattcatcatcattttgaattgataggatggagcgaatggaaagtagttacagtattttgggctgttggtctgatttcaggtttaatcggtttatggattggagtgcattaa

SEQ ID NO: 8697 - DNA, 2235 bp, Staphylococcus aureus
  CDS (1)...(2235)
atggcgaagcaaaaaattaaaattaaaaaaaataaaataggggcagtcctacttgttggtttattcggactgctcttttttatattggttttaagaatttcatatatcatgattactggacattctaatggtcaagatttagtcatgaaggcaaatgaaaagtatttagttaagaatgcacaacaaccagaacgaggaaagatatatgatcgtaatggtaaagtgctagcagaagatgtagaaagatataaacttgttgcagtaatagataaaaaggcgagtgccaattctaaaaaacctaggcatgtagttgataaaaaagagactgcaaagaaattatctacagtcattaatatgaagccagaggaaattgaaaagagacttagtcaaaagaaagctttccaaattgaatttggacgcaaaggaacaaatttaacgtatcaggacaaattgaaaatagagaaaatgaatttgcctggtatttctttattgcctgaaacagaacgcttttatccaaatggcaattttgcatcacacttaattggtagagctcagaaaaatccggatactggtgaacttaaaggtgcacttggagttgaaaagatttttgatagttatttaagtggatctaaaggatcattgagatatattcatgatatttggggatatatcgcaccaaatactaaaaaagagaagcagcctaaacgtggtgatgatgtccatttaacaatcgattcaaatattcaagtatttgttgaagaagctttagatggcatggttgaaagataccagccgaaagatttatttgcggttgtcatggatgccaaaactggagaaattttagcatacagtcagcgaccaacatttaatcctgaaactggtaaagactttggtaaaaagtgggcaaatgacctttatcaaaacacatacgagcctggatcaacatttaaatcatatgggttagcagctgctattcaagaaggtgcttttgatcctgataagaaatataaatctggacatagagatattatgggttcacgtatttcagactggaatagagtcggttggggtgaaatcccaatgtcactcggatttacttattcatctaatacattgatgatgcatttacaagatttagttggtgcagacaaaatgaaatcttggtatgaacgatttggatttggaaaatcaactaaaggtatgtttgatggagaagcacctggtcaaattggatggagtaatgagttgcaacaaaaaacgtcatcatttggtcaatcgacaacagtaacacctgttcaaatgttacaagcgcaatcagcgttctttaatgatggtaatatgttaaaaccatggtttgtgaatagcgttgaaaatcctgttagtaaaagacaattttataaagggcaaaaacaaatcgcaggcaaaccaataacaaaagatactgctgaaaaagttgaaaagcaattggatttagttgtgaatagtaagaagagtcacgctgcaaactatcgtattgatggttatgaggtcgaaggtaagactggtacagcacaagtcgctgcacctaatggtggtggatacgttaaaggtccaaacccatattttgtaagttttatgggtgacgcgccgaagaaaaatcctaaagttattgtatacgctggtatgagcttggcacaaaaaaatgaccaagaagcttatgaattaggtgttagtaaagcgtttaaaccaataatggaaaatactttgaaatatttaaatgtaggtaaatcaaaagatgacacatctaatgcagagtatagtaaagtgccagatgttgaaggtcaagacaaacaaaaagctattgataatgtgagtgcaaaatcattagaaccagttactattggttctggcacacaaataaaagcacaatctataaaagcagggaataaagtcttacctcatagtaaagtactgttattaacagatggagacttaactatgcctgacatgtcaggatggacgaaagaagatgtcattgcttttgaaaacctaacaaatattaaagtaaatttaaaaggtagcggttttgtgtcccaccaatcaattagtaagggacaaaaacttactgaaaaagataaaatagacgtagaattttcatcagagaatgtagacagcaattcgacgaataattctgattcaaattcagatgataagaagaaatctgacagtaaaactgacaaggataagtcggactaa

SEQ ID NO: 8698 - DNA, 936 bp, Staphylococcus aureus
  CDS (1)...(936)
gtgtttcatcatatcagcgttatgttaaacgaaaccattgattatttaaatgtaaaagaaaatggtgtgtacattgactgtacgctaggtggagcgggacatgccctttatttactaaatcaattaaatgacgacggaagattaatagcaatcgatcaagaccaaactgcaattgataatgctaaagaggtattaaaggatcatttgcataaggtgacttttgttcatagcaacttccgtgaattaactcaaatattaaaagacttaaacattgaaaaagtagatggaatttattacgacttgggtgtttcaagcccacaactcgacattccagaacgaggattcagttatcaccatgacgcaacattagacatgcgtatggaccaaacacaagaactaacagcatatgaaattgttaacaattggtcatatgaagcgttagtgaagattttttatcgctatggcgaggagaaattttcaaaacagatagctcgaagaatcgaagcacatcgcgaacaacaaccaataacaacaacattagaattagttgacattataaaagaaggtattcctgcaaaagcaagaagaaaaggcggacatcctgcaaaacgagtatttcaagcactacgaattgcagtaaacgatgaattgtcagcttttgaagattcaatagaacaagcgattgaattagtgaaagtagatggcaggatttcggtaatcactttccattctttagaagatcgtttatgtaaacaggtgttccaagaatatgaaaaaggtccagaggtaccaagaggattaccagttataccagaagcatatacacctaagttaaagcgtgttaatcgtaaaccgattaccgctacagaagaagatttagatgacaataacagagcacgaagcgcgaaattacgtgtagctgaaatacttaaataa

SEQ ID NO: 8699 - DNA, 792 bp, Staphylococcus aureus
  CDS (1)...(792)
atgaattatctaaataaaatacgtattgaaaacccattaacaatttgttatacaaacgatgtagttaaaaattttacagcgaatggtttattaagtattggtgctagccctgcaatgagtgaagctcccgaagaagctgaagaattttacaaagttgcacaagcgctattaatcaatatcggtactttaacagcagaaaatgaacaagatattattgcgattgctcaaacggcaaatgaggcaggcttacctattgtatttgaccctgtagctgttggtgcttctacatatcgaaagcaattttgtaaattattattgaaatcagcgaaagtatcagtaattaaaggcaatgcatctgaaatattagcgttgattgatgatacagcaactatgaaaggtacagatagtgatgctaatcttgatgcggttgcaatagcgaaaaaggcttacgcaacatataaaactgcaatagtaatcacaggtaaagaggacgttattgttcaagataataaagccttcgtattagctaatggatctccattattagcacgagtaactggagctggttgtttattaggaggcgttattgctggatttttatttagagaaacagaaccagaaatagaagcgttaattgaagcggtaagcgtatttaatattgctgctgaggtagctgctgaaaatgaaaattgtggtggtcctggtacgttttcaccattgttgcttgatacgttatatcatttaaatgaaacaacctatcaacaacggattcgtattcaagaggtggaataa

SEQ ID NO: 8700 - DNA, 2094 bp, Staphylococcus aureus
  CDS (1)...(2094)
atgcagaaagcttttcgcaatgtgctagttatcgtaataataggcgttattatttttggtctattttcatatttaaacggtaatggaaatatgccgaaacagcttacatataatcaatttactgagaagttggaaaaaggtgaccttaaaactttagaaatccaaccacaacaaaatgtctatatggtaagtggtaaaacgaaaaatgatgaagactattcatcaactattttatataacaacgaaaaagaattacaaaaaattactgatgctgctaaaaagcaaaacggtgtaaaattaacgattaaagaagaagaaaaacaaagtgtctttgtgagtatactttcaacattaattccagttgtagtcatagcgttattatttattttcttcctaagccaagcacaaggtggcggtagtggcggtcgtatgatgaactttggtaaatctaaagcaaaaatgtacgataataataaacgtcgtgttcgtttctctgatgtagcaggggcagatgaagaaaaacaagaattaattgaaattgttgatttcttgaaagataataaaaaattcaaagaaatgggatctaggattcctaaaggtgtcttacttgttggacctccaggtactggtaaaacattacttgctagagcggttgcaggtgaagctggcgcaccattcttctctattagtggttcagactttgtagagatgtttgttggtgttggtgcgagccgtgttcgtgacttattcgataatgctaagaaaaacgcgccttgtatcatctttatcgatgagattgatgctgttggtcgtcaacgtggtgcaggtgttggtggcggtcatgatgaacgtgaacaaaccctaaaccaattattagttgaaatggatggtttcggtgaaaatgaaggtatcattatgatagctgctacaaaccgtcctgatatccttgacccagccttattacgtccaggtcgttttgatagacaaattcaagttggtcgtccagatgtgaaaggccgtgaagcaattcttcatgttcatgctaaaaacaaaccacttgatgaaacggttgatttaaaagcaatttcacaacgtacacctggtttctcaggtgctgatttagagaacttattaaatgaagcatctttaattgctgtacgtgaaggtaaaaagaaaattgacatgagagatatcgaagaggcaacggatagagttatagccggacctgctaagaaatctcgagttatttctaagaaagaacgtaatattgttgctcatcacgaagctggtcatacaattatcggtatggtacttgatgaggcagaagtagtgcataaagttactattgttccacgtggacaagcaggtggttatgcaatgatgctacctaaacaagatcgtttcttaatgactgaacaagagttattagataaaatctgtggtttacttggtggacgtgtatcagaagatattaactttaacgaagtatcaacaggtgcttcaaatgacttcgaacgtgcaacacaaatcgcacgctcaatggttacgcaatatggtatgagtaaaaaattaggaccattacagttcggtcatagcaatggtcaagtattcttaggtaaagatatgcaaggtgagcctaattattcaagccaaatcgcatatgaaattgataaagaagttcaacgaatcgttaaagaacaatacgaacgttgtaaacaaattttattagagcacaaagaacaattaattttaattgctgaaacattattaacagaagaaacattagttgctgaacaaattcaatcattattctacgaaggtaaattacctgaaattgattatgatgcagctaaagttgttaaagatgaagattctgaatttaatgatggtaaattcggtaaatcttatgaagagattcgtaaagagcaattagaagatggacaacgtgacgaaagtgaagatcgtaaagaagaaaaagatattgctgaggataaaaaagaagctgataaatctgatgaaaaagatgaaccagcacatcaacaagccccaaatatcgaaaaaccttacgatccaaatcacccagacaataaataa

SEQ ID NO: 8701 - DNA, 882 bp, Staphylococcus aureus
  CDS (1)...(882)
atgacacacgattatattgttaaagcattagcatttgatggagagattagggcttatgctgctttgacaactgaaactgttcaagaagcacaaacgagacattatacatggccgacagcatctgctgcaatgggaagaacaatgacagcaacagctatgatgggcgcaatgttgaaaggtgatcaaaaattaactgtcactgtagatggccaaggacctattggacgaattattgccgatgcaaatgctaaaggcgaggtgcgtgcttatgtagaccatccacaaactcattttccattaaatgagcaaggtaaacttgatgtaagacgagcggtagggacaaatggatctattatggttgttaaagacgttggaatgaaagactatttctctggagcaagtccaattgtttcaggagaacttggtgaagattttacttattattatgctacaagtgaacaaacaccttcatcggtaggtcttggtgtattggtaaatcctgataatacgattaaagcagcaggaggatttatcattcaagttatgccaggtgccaaagatgaaacaatttcaaaattagaaaaagcaattagtgaaatgacaccagtttctaaattaattgaacaaggattaacgccagaaggattactaaacgaaatcttaggtgaagaccatgtgcaaattttagagaaaatgcctgttcaatttgaatgtaattgtagtcatgagaaatttttaaatgctattaaaggattgggcgaggctgagattcaaaatatgattaaagaagatcatggtgctgaagcagtatgtcatttctgtggaaataaatataaatatactgaagaagaattaaacgtgttgctagaaagtttagcgtaa

SEQ ID NO: 8702 - DNA, 942 bp, Staphylococcus aureus
  CDS (1)...(942)
gtgttcttaatggcacaaaaaccagtagataatattactcaaattattggcggtacaccggtagtcaaattgagaaatgtagtagatgacaatgcagcagatgtttatgtaaaattggaatatcaaaatccaggtggttctgtaaaggatagaattgctttagcaatgattgaaaaagcagagcgagaaggcaaaattaaacctggcgatacaattgtagaaccaacaagtggtaatacaggtatcggtttagcatttgtatgtgctgctaaaggatataaagcagtatttactatgcccgaaacaatgagccaagagcgtcgtaatttattaaaagcatacggtgcggaattagttttaacgcctggatcagaagcgatgaaaggtgcaattaaaaaagctaaagaattgaaagaagaacatggttacttcgagccacaacaatttgaaaaccctgcgaaccctgaagttcatgagttaactacaggtcctgagttattacaacaatttgaagggaaaactatcgatgcgttcctagctggtgttggtactggtggtacgttatctggtgtaggtaaagttctgaaaaaagaatatcctaacatcgaaattgttgctatagagcctgaggcttctccagtattgagcggtggtgagccaggtccacataaattacaaggtttaggtgctggatttattccaggcactttgaatacagaaatctatgacagtattattaaagtaggaaatgatacagcgatggaaatgtctcgtcgagttgctaaagaggaaggtattttagcaggtatttcatcaggtgctgcgatttatgctgccattcaaaaagcaaaagaattaggaaaaggtaaaacagtagtaacagtattgccgagtaatggtgaacgctacttatcaacacctttatattcattcgatgactaa

SEQ ID NO: 8703 - DNA, 1092 bp, Staphylococcus aureus
  CDS (1)...(1092)
atgaaatttttaaaagatacttcaattgctgaaatatcgtctatactttatctgatttttcctattgccggtatattttttaatgaagtatatggtcccaaatggttgtatattatatcagtcattgtcttttcgttgtcgtatcttatattagttatagtaaataatagacttaatacattaatgttttacattttgttgattattcattattttattatttgttattttgttttcagtgtacatccaatgctaagtttgtttttcttttatagtgcttttgccgttccatttacttttaaaaataatgttaaaaaaacggcaactaatcttttcatactaacaatgattatatgtacaataataacgtacttattgtataacaactattttgttgcaatgatggtttattatgtcgttatatcgttaataatgctagataattttaaaaaaatgaaaaaccgtgaatatcaaaaagaaatagcagaaaaaaatagacatattaatacattaattgctgaacaagagcgacatagaattggtcaagacttacatgatacgttagggcatgtgtttgcaagtttatcattaaaatcagaattagcttataaactaatagatgctgatgtagaaaaagtaaaagctgaattattagcaattaataaattatctcgtgaatcattgaacaaagttcgagaaattattgatgatgtaaaattaccatcatttattgaagagattgatagtatacgtaaagttttaaaagatgctgatattgattttacatttgaaaataaagaattagcgcaagtattaagtcctactaaacaatctatgttagttatgattacgcgtgaagcgataaataatgttattaaacatgcaaatgcttcaaaagttcatggtaaattaaaaactgtaaacaatcataaattactgcttatgattgaagatgatggcaaaggtatcgatagtgattgtgaggtgaaaagtatttcacagcgtgtacaacatttaaatggaactttagcagtcgactcaacaaatggaactaaaataatcattgaaatctcaacaggaggaatagcatga

SEQ ID NO: 8704 - DNA, 234 bp, Staphylococcus aureus
  CDS (1)...(234)
gtggaaaatttcgataaagtaaaagatatcatcgttgaccgtttaggtgtagacgctgataaagtaactgaagatgcatctttcaaagatgatttaggcgctgactcacttgatatcgctgaattagtaatggaattagaagacgagtttggtactgaaattcctgatgaagaagctgaaaaaatcaacactgttggtgatgctgttaaatttattaacagtcttgaaaaataa

SEQ ID NO: 8705 - DNA, 741 bp, Staphylococcus aureus
  CDS (1)...(741)
atgaaaatgactaagagtgctttagtaacaggtgcatcaagaggaattggacgtagtattgcgttacaattagcagaagaaggatataatgtagcagtaaactatgcaggcagcaaagagaaagctgaagcagtagtcgaagaaatcaaagctaaaggtgttgacagttttgcgattcaagcaaatgttgccgatgctgatgaagttaaagcaatgattaaagaagtagttagccaatttggttctttagatgttttagtaaataatgcaggtattactcgcgataatttattaatgcgtatgaaagaacaagagtgggatgatgttattgacacaaacttaaaaggtgtatttaactgtatccaaaaagcaacaccacaaatgttaagacaacgtagtggtgctatcatcaatttatcaagtgttgttggagcagtaggtaatccgggacaagcaaactatgttgcaacaaaagcaggtgttattggtttaactaaatctgcggcgcgtgaattagcatctcgtggtatcactgtaaatgcagttgcacctggttttattgtttctgatatgacagatgctttaagtgatgagcttaaagaacaaatgttgactcaaattccgttagcacgttttggtcaagacacagatattgctaatacagtagcgttcttagcatcagacaaagcaaaatatattacaggtcaaacaatccatgtaaatggtggaatgtacatgtaa

SEQ ID NO: 8706 - DNA, 1674 bp, Staphylococcus aureus
  CDS (1)...(1674)
atgtacagaccccaaagtttcgaggatgtcgtcggacaagaacatgtcacgaagacattgcgcaatgcgatttcgaaagaaaaacagtcgcatgcttatatttttagtggtccgagaggtacggggaaaacgagtattgccaaagtgtttgctaaagcaatcaactgtctaaatagcactgatggagaaccttgtaatgaatgtcatatttgtaaaggcattacgcaggggactaattcagatgtgatagaaattgatgctgctagtaataatggcgttgatgaaataagaaatattagagacaaagttaaatatgcaccaagtgaatcgaaatataaagtttatattatagatgaggtgcacatgctaacaacaggtgcttttaatgcccttttaaagacgttagaagaacctccagcacacgctatttttatattggcaacgacagaaccacataaaatccctccaacaatcatttctagggcacaacgttttgattttaaagcaattagcctagatcaaattgttgaacgtttaaaatttgtagcagatgcacaacaaattgaatgtgaagatgaagccttggcatttatcgctaaagcgtctgaagggggtatgcgtgatgcattaagtattatggatcaggctattgcatttggtgatggtacgttaacattgcaagatgcgttgaatgtcacaggtagcgtacatgatgaagcgttggatcacttgtttgatgatattgtacaaggtgacgtacaagcatcttttaaaaaataccatcagtttataacagaaggtaaagaagtgaatcgcctaataaatgatatgatttattttgtcagagatacgattatgaataaaacatctgagaaagatactgagtatcgagcactgatgaacttagaattagatatgttatatcaaatgattgatcttattaatgatacattagtgtcgattcgttttagtgtgaatcaaaacgttcattttgaagtgttgttagtaaaattagctgagcagattaagggtcaaccacaagtgattgcgaatgtagctgaaccagcacaaattgcttcatcgccaaacacagatgtattgttgcaacgtatggaacagttagagcaagaactaaaaacactaaaagcacaaggagtgagtgtcgctcctgttcaaaaatcttcgaaaaagcctgcgagaggcatacaaaaatctaaaaatgcattttcaatgcaacaaattgcaaaagtgctagataaagcgaataaggcagatatcaaattgttgaaagatcattggcaagaagtgattgatcatgccaaaaataatgataaaaaatcactcgttagtttattgcaaaattcggaacctgtggcggcaagtgaagatcacgtacttgtgaaatttgaggaagagatccattgtgaaatcgtcaataaagacgacgagaaacgtagtagtatagaaagtgttgtatgtaatatcgttaataaaaacgttaaagttgttggtgtaccatcagatcaatggcaaagagttcgaacggaatatttacaaaatcgtaaaaacgaaggcgatgatatgccaaagcaacaagcacaacaaacagatattgctcaaaaagcaaaagatcttttcggtgaagaaactgtacatgtgatagatgaagagtga

SEQ ID NO: 8707 - DNA, 318 bp, Staphylococcus aureus
  CDS (1)...(318)
atgcgcggtggcggaaacatgcaacaaatgatgaaacaaatgcaaaaaatgcaaaagaaaatggctcaagaacaagaaaaacttaaagaagagcgtattgtaggaacagctggcggtggcatggttgcagttactgtaactggtcataaagaagttgtcgacgttgaaatcaaagaagaagctgtagacccagacgatattgaaatgctacaagacttagtgttagcagctactaatgaagcgatgaataaagctgatgagcttactcaagaacgtttaggtaaacatactcaaggcttaaacatccctggaatgtga

SEQ ID NO: 8708 - DNA, 597 bp, Staphylococcus aureus
  CDS (1)...(597)
atgcattatccagaacctatatcaaaacttattgatagctttatgaaattgccaggcattggtccaaagacagcccaacgtctggcttttcataccttagatatgaaagaagacgatgttgttcagtttgccaaagcattagtagatgttaagagagaattaacatattgtagcgtatgtggtcacattactgaaaatgatccatgttatatttgtgaagataagcaaagagatcgttcagttatttgtgttgtggaagatgacaaagatgtcatagctatggaaaaaatgagagaatacaaaggtttatatcacgttttacatgggtctatttcgcctatggatggcattggaccagaagatattaatattccttcattgattgaacgcttgaaaaacgatgaagttagcgaattaatcttagctatgaacccgaacttagagggggaatctacagccatgtatatttctagattagttaagcctataggtatcaaagtgacgagattagcacaagggttatcggtaggtggcgatttagagtatgctgacgaagtaacattatctaaagcaatcgcaggtagaacagaaatgtaa

SEQ ID NO: 8709 - DNA, 429 bp, Staphylococcus aureus
  CDS (1)...(429)
atgttaaacagagcagtattagtaggacgcttaacaaaagacccagaattaagaagcgcgccaaatggcgtaaatgtaggtacattcacattggcagtaaacagaacattcacgaatgctcaaggcgagcgtgaagcagattttataaacgtagtagtgttcaagaaacaagctgaaaatgttaaaaactacctttctaaagggtcgctggcaggtgtagacgggcgactacaaacacgtagctacgaaaataaagtcgggcaacgtgtatttgtgacagaagtagtagcggacagtgttcaattcttagaaccgaagaataacaaccaacaaccaaacaacaattatcatcaacaaagacaaactcaaactggtaataatccttttgataataccactgcgattactgatgatgacttaccgttctga

SEQ ID NO: 8710 - DNA, 702 bp, Staphylococcus aureus
  CDS (1)...(702)
atgagtcaagcttacatcggctatcaattacaagaaagcttacaaaatgaattgcattctattggaatggataaacaagtggtaacactagtgacacaagttgaagttgatgaaaatgatccggcatttaacaatccttcaaaaccaattgggttattttacaacaaagaagaagctgaacaaattcaaaaagaaaaaggatttatatttgttgaagatgctggaagaggatatagacgcgttgttccttcaccacaacccatctctattattgaattagagagtattaaaacacttattaaaaatgatacactcgttattgctgctggtggtggaggtataccagtaattagagagcaacatgatggttttaaaggtattgatgcagttatagacaaagataaaacaagtgcgttgttgggtgctaatattcaatgcgatcaattgattattttaacagcaattgattatgtatatattaattttaacactgaaaaccaacagcctttgaaaacaacaaatgttgatgaattaaaacgatatatagacgaaaatcaatttgcaaaaggaagtatgttaccaaaaattgaagcagccatatcatttattgaaaacaatccaaaaggaagtgtgcttataacatcattaaatgaattagatgctgccttagagggtaaagtaggtactgtgattaaaaagtaa

SEQ ID NO: 8711 - DNA, 1563 bp, Staphylococcus aureus
  CDS (1)...(1563)
atgatgactttacaaatacatacagggggtattaatttgaaaaagaaaaacatttattcaattcgtaaactaggtgtaggtattgcatctgtaactttaggtacattacttatatctggtggcgtaacacctgctgcaaatgctgcgcaacacgatgaagctcaacaaaatgctttttatcaagtcttaaatatgcctaacttaaatgctgatcaacgcaatggttttatccaaagccttaaagatgatccaagccaaagtgctaacgttttaggtgaagctcaaaaacttaatgactctcaagctccaaaagctgatgcgcaacaaaataacttcaacaaagatcaacaaagcgccttctatgaaatcttgaacatgcctaacttaaacgaagcgcaacgtaacggcttcattcaaagtcttaaagacgacccaagccaaagcactaacgttttaggtgaagctaaaaaattaaacgaatctcaagcaccgaaagctgataacaatttcaacaaagaacaacaaaatgctttctatgaaatcttgaatatgcctaacttaaacgaagaacaacgcaatggtttcatccaaagcttaaaagatgacccaagccaaagtgctaacctattgtcagaagctaaaaagttaaatgaatctcaagcaccgaaagcggataacaaattcaacaaagaacaacaaaatgctttctatgaaatcttacatttacctaacttaaacgaagaacaacgcaatggtttcatccaaagcctaaaagatgacccaagccaaagcgctaaccttttagcagaagctaaaaagctaaatgatgctcaagcaccaaaagctgacaacaaattcaacaaagaacaacaaaatgctttctatgaaattttacatttacctaacttaactgaagaacaacgtaacggcttcatccaaagccttaaagacgatccttcagtgagcaaagaaattttagcagaagctaaaaagctaaacgatgctcaagcaccaaaagaggaagacaataacaagcctggcaaagaagacaataacaagcctggcaaagaagacaacaacaagcctggtaaagaagacaacaacaagcctggcaaagaagacggcaacaagcctggtaaagaagacaacaaaaaacctggtaaagaagatggcaacaagcctggtaaagaagacaacaaaaaacctggtaaagaagacggcaacaagcctggcaaagaagatggcaacaaacctggtaaagaagatggtaacggagtacatgtcgttaaacctggtgatacagtaaatgacattgcaaaagcaaacggcactactgctgacaaaattgctgcagataacaaattagctgataaaaacatgatcaaacctggtcaagaacttgttgttgataagaagcaaccagcaaaccatgcagatgctaacaaagctcaagcattaccagaaactggtgaagaaaatccattcatcggtacaactgtatttggtggattatcattagccttaggtgcagcgttattagctggacgtcgtcgcgaactataa

SEQ ID NO: 8712 - DNA, 1245 bp, Staphylococcus aureus
  CDS (1)...(1245)
atgagtcaaaataaaagagtagttattacaggtatgggagccctttctccaatcggtaatgatgtcaaaacaacatgggagaatgctctaaaaggcgtaaatggtatcgataaaattacacgtatcgatactgaaccttatagcgttcacttagcaggagaacttaaaaactttaatattgaagatcatatcgacaaaaaagaagcgcgtcgtatggatagatttactcaatatgcaattgtagcagctagagaggctgttaaagatgcgcaattagatatcaatgaaaatactgcagatcgaatcggtgtatggattggttctggtatcggtggtatggaaacatttgaaattgcacataaacaattaatggataaaggcccaagacgtgtgagtccatttttcgtaccaatgttaattcctgatatggcaactgggcaagtatcaattgacttaggtgcaaaaggaccaaatggtgcaacagttacagcatgtgcaacaggtacaaattcaatcggagaagcatttaaaattgtgcaacgcggtgatgcagatgcaatgattactggtggtacagaagcaccaattactcatatggcaattgctggtttcagtgcaagtcgagcgctttctacaaatgatgacattgaaacagcatgtcgtccattccaagaaggtagagatggttttgttatgggtgaaggtgctggtattttagtaattgaatctttagaatcagcacaagctcgaggtgccaatatttatgctgagatagttggctatggtactacaggtgatgcttatcatattacagcgccagctccagaaggtgaaggtggttctagagcaatgcaagcagctatggatgatgctggtattgaacctaaagatgtacaatacttaaatgcccatggtacaagtactcctgttggtgacttaaatgaagttaaagctattaaaaatacatttggtgaagcagctaaacacttaaaagttagctcaacaaaatcaatgactggtcacttacttggtgcaacaggtggaattgaagcaatcttctcagcgctttcaattaaagactctaaagtcgcaccgacaattcatgcggtaacaccagatccagaatgtgatttggatattgttccaaatgaagcgcaagaccttgatattacttatgcaatgagtaatagcttaggattcggtggacataacgcagtattagtattcaagaaatttgaagcataa

SEQ ID NO: 8713 - DNA, 2004 bp, Staphylococcus aureus
  CDS (1)...(2004)
atggctgatttatcgtctcgtgtgaacgagttacatgatttattaaatcaatacagttatgaatactatgtagaggataatccatctgtaccagatagtgaatatgacaaattacttcatgaactgattaaaatagaagaggagcatcctgagtataagactgtagattctccaacagttagagttggcggtgaagcccaagcctctttcaataaagtcaaccatgacacgccaatgttaagtttagggaatgcatttaatgaggatgatttgagaaaattcgaccaacgcatacgtgaacaaattggcaacgttgaatatatgtgcgaattaaaaatcgatggcttagcagtatcattgaaatatgttgatggatacttcgttcaaggtttaacacgtggtgatggaacaacaggtgaagatattaccgaaaatttaaaaacaattcatgcgatacctttgaaaatgaaagaaccattaaatgtagaagttcgtggtgaagcatatatgccgagacgttcatttttacgattaaatgaagaaaaagaaaaaaatgatgagcagttatttgcaaatccaagaaacgctgctgcgggatcattaagacagttagattctaaattaacggcaaaacgaaagctaagcgtatttatatatagtgtcaatgatttcactgatttcaatgcgcgttcgcaaagtgaagcattagatgagttagataaattaggttttacaacgaataaaaatagagcgcgtgtaaataatatcgatggtgttttagagtatattgaaaaatggacaagccaaagagagtcattaccttatgatattgatgggattgttattaaggttaatgatttagatcaacaggatgagatgggattcacacaaaaatctcctagatgggccattgcttataaatttccagctgaggaagtagtaactaaattattagatattgaattaagtattggacgaacaggtgtagtcacacctactgctattttagaaccagtaaaagtagctggtacaactgtatcaagagcatctttgcacaatgaggatttaattcatgacagagatattcgaattggtgatagtgttgtagtgaaaaaagcaggtgacatcatacctgaagttgtacgtagtattccagaacgtagacctgaggatgctgtcacatatcatatgccaacccattgtccaagttgtggacatgaattagtacgtattgaaggcgaagtagcacttcgttgcattaatccaaaatgccaagcacaacttgttgaaggattgattcactttgtatcaagacaagccatgaatattgatggtttaggcactaaaattattcaacagctttatcaaagcgaattaattaaagatgttgctgatattttctatttaacagaagaagatttattacctttagacagaatggggcagaaaaaagttgataatttattagctgccattcaacaagctaaggacaactctttagaaaatttattatttggtctaggtattaggcatttaggtgttaaagcgagccaagtgttagcagaaaaatatgaaacgatagatcgattactaacggtaactgaagcggaattagtagaaattcatgatataggtgataaagtagcacaatctgtagttacttatttagaaaatgaagatattcgtgctttaattcaaaaattaaaagataaacatgttaatatgatttataaaggtatcaaaacatcagatattgaaggacatcctgaatttagtggtaaaacgatagtactgactggtaagctacatcaaatgacacgcaatgaagcatctaaatggcttgcatcacaaggtgctaaagttacaagtagcgttactaaaaatacagatgtcgttattgctggtgaagatgcaggttcaaaattaacaaaagcacaaagtttaggtattgaaatttggacagagcaacaatttgtagataagcaaaatgaattaaatagttag

SEQ ID NO: 8714 - DNA, 153 bp, Staphylococcus aureus; identical to SEQ ID NO: 4686
  CDS (1)...(153)

SEQ ID NO: 8715 - DNA, 369 bp, Staphylococcus aureus
  CDS (1)...(369)
atggctaatcatgaacaaatcattgaagcgattaaagaaatgtcagtattagaattaaacgacttagtaaaagcaattgaagaagaatttggtgtaactgcagctgctccagtagcagtagcaggtgcagctggtggcgctgacgctgcagcagaaaaaactgaatttgacgttgagttaacttcagctggttcatctaaaatcaaagttgttaaagctgttaaagaagcaactggtttaggattaaaagatgctaaagaattagtagacggagctcctaaagtaatcaaagaagctttacctaaagaagaagctgaaaaacttaaagaacaattagaagaagttggagctactgtagaattaaaataa

SEQ ID NO: 8716 - DNA, 3411 bp, Staphylococcus aureus
  CDS (1)...(3411)
atgtttagagacatttctccaattgaagattttactggtaatttgtcattagagtttgtggattaccgtttaggagaaccaaaatatgatttagaagaatctaaaaaccgtgacgctacttatgctgcacctcttcgtgtaaaagtgcgtctaatcattaaagaaacaggagaagttaaagaacaagaagtctttatgggtgatttcccattaatgactgatacaggtacgttcgttatcaatggtgcagaacgtgtaatcgtatctcaattagttcgttcaccatccgtttatttcaatgaaaaaatcgacaaaaatggtcgtgaaaactatgatgcaacaattattccaaaccgtggtgcatggttagaatatgaaacagatgctaaagatgttgtatacgtacgtattgatagaacacgtaaactaccattaacagtattgttacgtgcattaggtttctcaagcgaccaagaaattgttgaccttttaggtgacaatgaatatttacgtaatactttagagaaagacggcactgaaaacactgaacaagcgttattagaaatctatgaacgtttacgtccaggtgaaccaccaactgttgaaaatgctaaaagtctattgtattcacgtttctttgatccaaaacgctatgacttagcaagcgtgggtcgttataaaacaaacaaaaaattacatttaaaacatcgtttatttaatcaaaaattagctgagccaattgtaaatactgaaactggtgaaattgtagttgaagaaggtacagtgcttgatcgtcgtaaaatcgacgaaatcatggatgtacttgaatcaaatgcaaacagcgaagtgtttgaattgcatggtagcgttatagacgagccagtagaaattcaatcaattaaagtatatgttcctaacgatgatgaaggtcgtacgacaactgtaattggtaatgctttccctgactcagaagttaaatgcattacaccagcagatatcattgcttcaatgagttacttctttaacttattaagcggtattggatatacagatgatattgaccatttaggtaaccgtcgtttacgttctgtaggtgaattactacaaaaccaattccgtatcggtttatcaagaatggaaagagttgtacgtgaaagaatgtcaattcaagatactgagtctatcacacctcaacaattaattaatattcgacctgttattgcatctattaaagaattctttggtagctctcaattatcacaattcatggaccaagcaaacccattagctgagttaacgcataaacgtcgtctatcagcattaggacctggtggtttaacacgtgaacgtgctcaaatggaagtacgtgacgttcactactctcactatggccgtatgtgtccaattgaaacacctgagggaccaaacattggattgattaactcattatcaagttatgcacgtgtaaatgaattcggctttattgaaacaccatatcgtaaagttgatttagatacacatgctatcactgatcaaattgactatttaacagctgacgaagaagatagctatgttgtagcacaagcaaactctaaattagatgaaaatggtcgtttcatggatgatgaagttgtatgtcgtttccgtggtaacaatacagttatggctaaagaaaaaatggattatatggatgtatcgccgaagcaagttgtttcagcagcgacagcatgtattccattcttagaaaatgatgactcaaaccgtgcattgatgggtgcgaacatgcaacgtcaagcagtgcctttgatgaatccagaagcaccatttgttggtacaggtatggaacacgttgcagcacgtgattctggtgcggctattacagctaagcacagaggtcgtgttgaacatgttgaatctaatgaaattcttgttcgtcgtctagttgaagagaacggcgttgagcatgaaggtgaattagatcgctatccattagctaaatttaaacgttcaaactcaggtacatgttacaaccaacgtccaatcgttgcagttggagatgttgttgagtataacgagattttagcagatggaccatctatggaattaggagaaatggcattaggtagaaacgtagtagttggtttcatgacttgggacggttacaactatgaggatgccgttatcatgagtgaaagacttgtgaaagatgacgtgtatacttctattcatattgaagagtatgaatcagaagcacgtgatactaagttaggacctgaagaaatcacaagagatattcctaatgtttctgaaagtgcacttaagaacttagacgatcgtggtatcgtttatattggtgcagaagtaaaagatggagatattttagttggtaaagtaacgcctaaaggtgtaactgagttaactgccgaagaaagattgttacatgcaatctttggtgaaaaagcacgtgaagttagagatacttcattacgtgtacctcacggcgctggcggtatcgttcttgatgtaaaagtattcaatcgtgaagaaggcgacgatacattatcacctggtgtaaaccaattagtacgtgtatatatcgttcaaaaacgtaaaattcatgttggtgataagatgtgtggtcgacatggtaacaaaggtgtcatttctaagattgttcctgaagaagatatgccttacttaccagatggacgtccgatcgatatcatgttaaatcctcttggtgtaccatctcgtatgaacatcggacaagtattagagctacacttaggtatggctgctaaaaatcttggtattcacgttgcatcaccagtatttgacggtgcaaacgatgacgatgtatggtcaacaattgaagaagctggtatggctcgtgatggtaaaactgtactttatgatggacgtacaggtgaaccattcgataaccgtatttcagtaggtgtaatgtacatgttgaaacttgcgcacatggttgatgataaattacatgcgcgttcaacaggaccatattcacttgttacacaacaaccacttggcggtaaagcgcaattcggtggacaacgttttggtgagatggaggtatgggcacttgaagcatatggtgctgcatacacattacaagaaatcttaacttacaaatccgatgatacagtaggacgtgtgaaaacatacgaggctattgttaaaggtgaaaacatctctagaccaagtgttccagaatcattccgagtattgatgaaagaattacaaagtttaggtttagatgtaaaagttatggatgagcaagataatgaaatcgaaatgacagacgttgatgacgatgatgttgtagaacgcaaagtagatttacaacaaaatgatgctcctgaaacacaaaaagaagttactgattaa

SEQ ID NO: 8717 - DNA, 3321 bp, Staphylococcus aureus
  CDS (1)...(3321)
atgaaaataggattggcttcacctgaaaaaatccgttcttggtcttttggtgaagttaaaaaacctgaaacaatcaactaccgtacattaaaacctgaaaaagatggtctattctgtgaaagaattttcggacctacaaaagactgggaatgtagttgtggtaaatacaaacgtgttcgctacaaaggcatggtctgtgacagatgtggagttgaagtaactaaatctaaagtacgtcgtgaaagaatgggtcacattgaacttgctgctccagtttctcacatttggtatttcaaaggtataccaagtcgtatgggattattgcttgacatgtcaccaagagcattagaagaagttatttactttgcttcttatgttgttgtagatccaggtccaactggtttagaaaagaaaactttattatctgaagctgaattcagagattattatgataaatacccaggtcaattcgttgcaaaaatgggtgcagaaggtattaaagatttacttgaagagattgatcttgacgaagaacttaaattgttacgcgatgagttggaatcagctactggtcaaagacttactcgtgcaattaaacgtttagaagttgttgaatcattccgtaattcaggtaacaaaccttcatggatgattttggatgtacttccaatcatcccaccagaaattcgtccaatggttcaattagatggtggacgatttgcaacaagtgacttaaacgacttataccgtcgtgtaattaatcgaaataatcgtttgaaacgtttattagatttaggtgcacctggtatcatcgttcaaaacgaaaaacgtatgttacaagaagccgttgacgctttaattgataatggtcgtcgtggtcgtccagttactggcccaggtaaccgtccattaaaatctttatctcatatgttaaaaggtaaacaaggtcgtttccgtcaaaacttacttggtaaacgtgttgactattcaggacgttcagttattgcagtaggtccaagcttgaaaatgtaccaatgtggtttaccaaaagaaatggcacttgaactatttaaaccattcgtaatgaaagaattagttcaacgtgaaattgcaactaacattaaaaatgcgaagagtaaaatcgaacgtatggatgatgaagtttgggacgtattggaagaagtaattagagaacatcctgtattacttaaccgtgcaccaacacttcatagacttggtattcaagcatttgaaccaactttagttgaaggtcgtgcgattcgtctacatccacttgtaacaacagcttataacgctgactttgacggtgaccaaatggcggttcacgttcctttatcaaaagaggcacaagctgaagcaagaatgttgatgttagcagcacaaaacatcttgaaccctaaagatggtaaacctgtagttacaccatcacaagatatggtacttggtaactattaccttactttagaaagaaaagatgcagtaaatacaggcgcaatctttaataatacaaatgaagtattaaaagcatatgcaaatggctttgtacatttacacactagaattggtgtacatgcaagttcgttcaataatccaacatttactgaagaacaaaacaaaaagattcttgctacgtcagtaggtaaaattatattcaatgaaatcattccagattcatttgcttatattaatgaacctacgcaagaaaacttagaaagaaagacaccaaacagatatttcatcgatcctacaactttaggtgaaggtggattaaaagaatactttgaaaatgaagaattaattgaacctttcaacaaaaaattcttaggtaatattattgcagaagtattcaacagatttagcatcactgatacatcaatgatgttagaccgtatgaaagacttaggattcaaattctcatctaaagctggtattacagtaggtgttgctgatatcgtagtattacctgataagcaacaaatacttgatgagcatgaaaaattagtcgacagaattacaaaacaattcaaccgtggtttaatcactgaagaagaaagatataatgcagttgttgaaatttggacagatgcaaaagatcaaattcaaggtgaattgatgcaatcacttgataaaactaacccaatcttcatgatgagtgattcaggtgcccgtggtaacgcatctaactttacacagttagcaggtatgcgtggattgatggccgcaccatctggtaagattatcgaattaccaatcacatcttcattccgtgaaggtttaacagtacttgaatacttcatctcaactcacggtgcacgtaaaggtcttgccgatacagcacttaaaacagctgactcaggatatcttactcgtcgtcttgttgacgtggcacaagatgttattgttcgtgaagaagactgtggtactgatagaggtttattagtttctgatattaaagaaggtacagaaatgattgaaccatttatcgaacgtattgaaggtcgttattctaaagaaacaattcgtcatcctgaaactgatgaaataatcattcgtcctgatgaattaattacacctgaaattgctaagaaaattacagatgctggtattgaacaaatgtatattcgctcagcatttacttgtaacgcacgacatggtgtttgtgaaaaatgttacggtaaaaaccttgctactggtgaaaaagttgaagttggtgaagcagttggtacaattgcagcccaatctatcggtgaaccaggtacacagcttacaatgcgtacattccatacaggtggggtagcaggtagcgatatcacacaaggtcttcctcgtattcaagagattttcgaagcacgtaaccctaaaggtcaagcggtaattacggaaatcgaaggtgtcgtagaagatattaaattagcaaaagatagacaacaagaaattgttgttaaaggtgctaatgaaacaagatcataccttgcttcaggtacttcaagaattattgtagaaatcggtcaaccagttcaacgtggtgaagtattaactgaaggttctattgaacctaagaattacttatctgttgctggattaaacgcgactgaaagctacttattaaaagaagtacaaaaagtttaccgtatgcaaggtgtagaaatcgacgataaacacgttgaggttatggttcgacaaatgttacgtaaagttagaattatcgaagcaggtgatacgaagttattaccaggttcattagttgatattcataactttacagatgcaaatagagaagcatttaaacaccgtaaggtt

SEQ ID NO: 8718 - DNA, 1767 bp, Staphylococcus aureus
  CDS (1)...(1767)
atgagtaagagaacaacttattgtggattagttactgaggcatttttaggacaagaaattacattaaaaggatgggttaacaatcgtcgtgaccttggtggattgattttcgttgatttaagagatagagaaggaattgtacaagtcgtgtttaatcctgcattttcagaagaggcattgaaaattgctgaaacagtacgttctgaatatgttgtagaagttcaaggtacagttacgaagcgtgaccctgaaacagttaatcctaaaattaaaactggccaagttgaagtacaagttacaaatattaaagtgattaataaatctgagacaccaccattttctataaatgaagaaaatgttaacgttgatgaaaatattcgattaaaataccgttatttagatttacgtcgtcaagagttagcgcaaacatttaaaatgagacatcaaattacacgttctattcgtcaatatttggatgatgaagggttctttgacatcgaaacaccagtactaacgaagtcaacacctgagggtgcacgtgactatttagtaccatctcgtgttcatgatggtgaattttatgcattaccacaatcaccacaattatttaagcaattattgatgattagtggatttgacaaatactaccaaatcgtaaaatgcttccgtgacgaagatttacgtgcagatcgtcaacctgaatttacacaagtcgatattgaaatgagttttgtagaccaagaagatgtgatgcaaatgggtgaagaaatgcttaaaaaagttgttaaagaagttaaaggcgttgaaattaatggcgctttcccacgcatgacatataaagaagcgatgcgtcgctatggttctgataaaccagatacacgttttgaaatggaattaattgacgtttctcaattaggacgtgatatggactttaaagtatttaaagatactgttgaaaatgatggtgaaattaaagcaattgtcgctaaaggtgcagctgaacaatatactcgtaaagatatggatgctttaacagaatttgtaaacatctatggtgctaaaggattagcgtgggttaaagttgtggaagatggtttgacaggtccaattggacgtttctttgaaacagaaaatgttgaaacattacttacattaactggtgctgaagctggtgacttagtaatgtttgttgcagacaaaccaaatgtcgttgcacaaagtttaggtgcattacgtgtcaaattagctaaagaattaggtttaatcgatgaaacaaaattaaacttcttatgggtgacagattggccattattagaatatgatgaagatgcgaaacgttacgttgcagcacatcatccatttacatctccaaaagaagctgatattgctaagcttggcactgcgccagaagaagctgaggcaaatgcttatgacatagtattaaatggttatgaattaggtggcggttcaatcagaattcatgatggtgagttacaagaaaaaatgttcgaagttcttggatttactaaagaacaagcacaagaacagttcggcttcttactagatgcatttaaatatggtgcaccaccacatggcggtattgcattaggattagaccgattagtcatgttattgactaatagaacaaacttgagagatacaatcgcattccctaaaacagcatctgctacatgtttattaacgaatgcgcctggtgaagtttctgataaacaattagaagaactttctttgcgaattcgtcactaa

SEQ ID NO: 8719 - DNA, 1263 bp, Staphylococcus aureus
  CDS (1)...(1263)
atgattaaaatacctagagggacgcaggatattttacctgaagattcaaagaaatggcgttacattgaaaatcaattagatgaattaatgacattttataattataaagaaataagaacaccaatttttgaaagtacagatctttttgcaagaggtgttggtgattcaaccgatgtcgtacaaaaagaaatgtatacatttaaagataaaggcgatagaagtattacattaagacctgagggaacagctgcagttgtgcgttcatatattgaacataaaatgcaaggtaatccaaaccaaccaattaaactttattacaatggaccgatgtttagatatgaacgtaagcaaaaaggacgctatcgtcaatttaatcaatttggtgtagaagctattggtgctgaaaatcctagcgtagatgcagaagtattagctatggttatgcatatttatcaatcatttggattaaaacatttaaagcttgttattaatagtgtaggggatatggcgtctcgaaaagaatataacgaagcgttagtgaaacactttgaaccagtaattcatgaattttgttcagattgtcaatcacgtttgcatacaaatccgatgcgaattttggattgtaaagtagaccgtgataaagaagcgattaagactgcacctagaatcactgatttcttaaatgaggaatctaaggcatattatgaacaagtaaaagcttatttagatgatttaggtattccatatattgaagatcctaacttagttcgtggattggattattatacacatacagcatttgaattaatgatggataaccctaactatgatggtgccattacaacgctttgtggtggtggccgttataatggtttattagaattgctagatggtccaagtgaaacaggtattggttttgcgctaagtatagaacgattattgcttgcacttgaagaagaaggtatcgaattagatattgaagaaaacttagatttattcattgttacaatgggtgatcaagcagatcgatatgctgtgaagctattaaatcatttgagacataatggtattaaagcagataaagactatttacagcgtaaaattaaaggacaaatgaaacaagcagaccgtttaggtgccaagtttacaatcgttattggtgatcaagaattagaaaataataaaatcgatgttaaaaatatgacaactggtgaatctgaaacaattgaattagacgcattagtcgaatattttaagaagtag

SEQ ID NO: 8720 - DNA, 729 bp, Staphylococcus aureus
  CDS (1)...(729)
atggatcacaaatccccgctcgtgagttggaatttattcggttttgatatcgttttcaatttatcaagtatattgatgatacttgttacggcgtttcttgtttttctacttgctatcatttgtacgcgtaatttgaaaaaaagaccaactggcaaacaaaatttcgttgaatggatttttgatttcgtgaggggaatcattgaaggtaacatggcttggaaaaaaggtggtcaattccacttcttagcagtaacgctgattctgtacatttttatagctaatatgttaggtcttccgttttctatagtaacgaaagatcacacattgtggtggaaatcaccgacagctgatgcaacagtgactttaacgttgtctacaacgataatactgttaactcacttttatggaattaaaatgcgtggtacgaaacaatatcttaaaggttatgtacagccgttttggccattggcaattattaatgtttttgaagagttcacttcaacattaacgcttggtctgcgtttgtacggtaacatatttgcaggtgagatactattaacattacttgctggcttattctttaacgaaccagcatggggttggattattagtatcccaggattaattgtttggcaagcattttcaatatttgtaggaacaatccaagcatatatctttattatgctttcgatggtttatatgtcacataaagtggcagatgaacactaa

SEQ ID NO: 8721 - DNA, 441 bp, Staphylococcus aureus
  CDS (1)...(441)
atggaaacaatttttgattataaccaaattaaacaaattatacctcacagacagccatttttattaattgataaagtagttgaatatgaagaaggtcaacgttgtgtggctattaaacaagtatcaggaaacgaaccattctttcaagggcattttcctgagtatgcggtaatgccaggcgtattaattactgaagcgttagctcaaacaggtgcggtagctattttaaatagtgaagaaaataaaggtaaaatcgctttatttgctggtattgataaatgtcgttttaaacgtcaagtagtacctggtgatactttaacgttggaagtagaaatcactaaaattaaaggaccaataggtaaaggtaatgctaaagctactgtcgatggtcaacttgcttgtagttgtgaacttacatttgcaattcaagatgtaaaataa

SEQ ID NO: 8722 - DNA, 1266 bp, Staphylococcus aureus
  CDS (1)...(1266)
atggataaaatagtaatcaaaggtggaaataaattaacgggtgaagttaaagtagaaggtgctaaaaatgcagtattaccaatattgacagcatctttattagcttctgataaaccgagcaaattagttaatgttccagctttaagtgatgtagaaacaataaataatgtattaacaactttaaatgctgacgttacatacaaaaaggacgaaaatgctgttgtcgttgatgcaacaaagactctaaatgaagaggcaccatatgaatatgttagtaaaatgcgtgcaagtattttagttatgggacctcttttagcaagactaggacatgctattgttgcattgcctggtggttgtgcaattggaagtagaccgattgagcaacacattaaaggttttgaagctttaggcgcagaaattcatcttgaaaatggtaatatttatgctaatgctaaagatggattaaaaggtacatcaattcatttagattttccaagtgtaggagcaacacaaaatattattatggcagcatcattagctaagggtaagactttaattgaaaatgcagctaaagaacctgaaattgtcgatttagcaaactacattaatgaaatgggtggtagaattactggtgctggtacagacacaattacaatcaatggtgtagaatcattacatggtgtagaacatgctatcattccagatagaattgaagcaggcacattactaatcgctggtgctataacgcgtggtgatatttttgtacgtgatgcaatcaaagaacatatggcgagtttagtctataaactagaagaaatgggcgttgaattggactatcaagaagatggtattcgtgtacgtgctgaaggggaattacaacctgtagacatcaaaactctaccacatcctggattcccgactgatatgcaatcacaaatgatggcattgttattaacggcaaatggtcataaagtcgtaaccgaaactgtttttgaaaaccgttttatgcatgttgcagagttcaaacgtatgaatgctaatatcaatgtagaaggtcgtagtgctaaacttgaaggtaaaagtcaattgcaaggtgcacaagttaaagcgactgatttaagagcagcagccgccttaattttagctggattagttgctgatggtaaaacaagcgttactgaattaacgcacctagatagaggctatgttgacttacacggtaaattgaagcaattaggtgcagacattgaacgtattaacgattaa

SEQ ID NO: 8723 - DNA, 1509 bp, Staphylococcus aureus
  CDS (1)...(1509)
atggccataaaagctgaagaaatcagtgcattacttcgctcacaaattgaaaattatgagtcagaaatgtccgtaactgatgtaggtactgtattacaaattggtgatggtattgcattaattcacggattaaatgacgttatggctggtgagctagtagaattccataacggcgtacttggtttagcccaaaaccttgaagagtcaaacgtgggtgtggttattttaggaccatacacaggtattactgaaggtgacgaagttaaacgtactggtcgtatcatggaagtaccagtaggtgaagaactaatcggaagagttgttaatccattaggacaacctattgatggacaaggaccgattaacacaactaaaacacgtccagtagagaaaaaagctactggtgtaatggatcgtaaatcagtagatgagccattacaaacaggtatcaaagcaattgatgctttagtaccaattggtagaggtcaacgtgagttaatcatcggtgaccgtcaaacaggtaaaacaacaattgcaattgacacaattttgaaccaaaaagatcaaggtacgatttgtatctatgttgctattggtcaaaaagattcaacagtaagagcaaatgttgaaaagttaagacaagcaggcgctttagactacactattgttgtagcagcatcagcttctgaaccttctccattattatatattgcaccatattcaggtgtaacaatgggtgaagaattcatgtttaacggtaaacatgttttaatcgtttatgatgatttaactaaacaagcagcagcttatcgtgagttatcattattattacgtagacctccaggtcgtgaagcatacccaggtgacgtattctacttacatagtagattattagaaagagcagcaaaattaaacgatgacttaggtggcggttcaattactgcattaccaattatcgaaacacaagctggtgatatttcagcttatgtaccaacaaacgttatttcaattacagatggacaaatcttcttacaatctgatttattcttctcaggtgtaagaccagcgattaatgccggacaatctgtatctcgtgttggtggatctgcacaaattaaagcaatgaagaaagttgctggtacgttacgtcttgacttagcgtcatacagagaacttgaatcatttgcacaattcggttcagaccttgatgaatttactgcaagtaaattagaacgtggtaaacgtactgttgaagtcttaaaacaagatcaaaacaaaccattaccagtcgaacaccaagtgttgattatttatgcattaacaaaaggatatttagatgatattccagttgtagatatcacacgttttgaagacgagttaaaccactgggcagaatcaaatgctactgaactgttaaatgaaatcagagaaactggtggcttaccagatgctgagaagtttgacacagcaattaacgaattcaaaaaaagctttagcaaatctgaataa

SEQ ID NO: 8724 - DNA, 522 bp, Staphylococcus aureus; identical to SEQ ID NO: 8288
  CDS (1)...(522)

SEQ ID NO: 8725 - DNA, 219 bp, Staphylococcus aureus; identical to SEQ ID NO: 8130
  CDS (1)...(219)

SEQ ID NO: 8726 - DNA, 675 bp, Staphylococcus aureus
  CDS (1)...(675)
gtggtagataattttaggagggcacttatgaatatcattttgatgggtttacctggcgcaggtaaaggaactcaagcaagtgaaattgtcaagaaattcccaataccccacatttcaactggtgacatgttcagaaaagctataaaagaagaaactgaattaggtaaagaagctaagtcttatatggaccgtggcgaattagttcctgatgaagtgactgtaggtatcgttaaggaaagaatttctgaagacgatgcaaaaaaaggctttttattagatggcttcccaagaacaatcgagcaagctgaggcattaaataatattatgtctgagcttgacagaaacattgatgctgtcatcaatatcgaagttccggaagaagaattaatgaaccgtcttacaggtcgtcgaatctgtgagtcatgtggtacaacgtatcatcttgtatttaatcctccgaaggtcgaaggtatttgtgatatcgatggtggtaaattgtatcaacgagaagatgataatcctgaaacggtagctaatcgtttgagtgttaatattaaacaatctaagcctattttagatttctatgatcaaaaaggtgtattgaaaaatattgatggttcaaaagatattagcgacgttaccaaagatgtcattgatattttagatcatttgtaa

SEQ ID NO: 8727 - DNA, 1293 bp, Staphylococcus aureus
  CDS (1)...(1293)
atgattcaaacccttgtgaacttctttagaacaaaagaggttcgtaacaagattttcttcacactagcaatgttagtaatttttaaaatagggacttatataccagctccaggagtaaatcctgcagcttttgataatccccaaggttctcaaggtgccactgagttattaaatacttttggtggcggagccttgaaacgattttctatttttgcaatgggtattgtaccctacatcactgcatcaatcgtaatgcaattattacaaatggatattgtccctaaattctcagaatgggcaaaacaaggtgaagtaggtagaagaaagttaaataacgttactcgttatttagcaatttctttagcatttatccaatctataggtatggcattccaatttaataattatctcaaaggtgcgctgattatcaatcagtcaattatgagttatttattaatagcactagttttgacagcaggaactgctttcttaatatggcttggtgatcaaatcactcagttcggtgttggtaatggtatttctattatcatatttgcgggtattttatcaacgttgccagccagtctaattcaatttggacaaactgcgttcgttgggcaagaagatacatcattagcatggttgaaagtattaggacttttagtgtcactgatactattaactgtaggtgctatttatgtacttgaagccgttcgtaaaattccgattcaatatgctaagaaacaaactgctcaaagattaggttcacaggcaacttatctacctttaaaagtgaactcagccggtgttattcctgtaatctttgcaatggcgttcttcttactgcctagaacattaacgttgttctatccagataaagaatgggcacaaaacattgcgaatgctgcaaatccttcaagtaatgttggtatggttgtatatattgtactaattatactattcacatacttctatgcatttgtacaagttaatccggaaaaaatggctgataaccttaagaaacaaggtagctatgttccaggtattagacctggtgaacaaaccaaaaaatatattactaaagttttatatcgtttaacttttgtaggttctatcttcttagccgttatttcaattctaccgatattagcaactaagtttatgggattaccacaatcaattcagattggtggtacaagtttacttatcgttattggtgtagcgattgaaacaatgaaatctttagaagctcaagtatctcaaaaagaatataaaggctttggtggtagataa

SEQ ID NO: 8728 - DNA, 441 bp, Staphylococcus aureus
  CDS (1)...(441)
atgaaattacatgagttaaaaccggcagaaggttcacgtaaagaacgcaatcgtgttggacgtggtgttgcgacaggtaacggtaaaacaagtggtcgcggacacaaaggtcaaaaagctcgttcaggcggtggtgtaagaccaggatttgaaggtggtcaattaccattattccgtcgtttaccaaaacgtggttttactaacataaatcgtaaagaatatgctattgttaacttagaccaacttaataaatttgaagatggtactgaagtaactccagctttattagtagaatctggtgttgttaagaatgaaaaatctggtatcaaaatactaggtaatggttcacttgataagaaattgacagtgaaagctcataaattctcagcttcagcagcagaagctattgatgctaaaggtggagcacacgaggtgatctaa

SEQ ID NO: 8729 - DNA, 180 bp, Staphylococcus aureus; identical to SEQ ID NO: 8125
  CDS (1)...(180)

SEQ ID NO: 8730 - DNA, 501 bp, Staphylococcus aureus; identical to SEQ ID NO: 8124
  CDS (1)...(501)

SEQ ID NO: 8731 - DNA, 360 bp, Staphylococcus aureus; identical to SEQ ID NO: 8123
  CDS (1)...(360)

SEQ ID NO: 8732 - DNA, 537 bp, Staphylococcus aureus; identical to SEQ ID NO: 8122
  CDS (1)...(537)

SEQ ID NO: 8733 - DNA, 399 bp, Staphylococcus aureus
  CDS (1)...(399)
atgacaatgacagatccaatcgcagatatgcttactcgtgtaagaaacgcaaacatggtgcgtcacgagaagttagaattacctgcatcaaatattaaaaaagaaattgctgaaatcttaaagagtgaaggtttcattaaaaatgttgaatacgtagaagatgataaacaaggtgtacttcgtttattcttaaaatatggtcaaaacgatgagcgtgttatcacaggattaaaacgtatttcaaaaccaggtttacgtgtttatgcaaaagctagcgaaatgcctaaagtattaaatggtttaggtattgcattagtatcaacttctgaaggtgtaatcactgacaaagaagcaagaaaacgtaatgttggtggagaaattatcgcatacgtttggtaa

SEQ ID NO: 8734 - DNA, 807 bp, Staphylococcus aureus
  CDS (1)...(807)
atgaaaaataaattgattatagggcgatatttaccaattaattcttttgttcatcatcttgatccaagagcaaagttaatgtttgtttttctttttattatattaatatttttctgtcattcaccattaacatatctttgggtgtttgcacttatcttattcattatgagattagcaaaaattcaattatggttcctaatcaaaggtttaacaccaatatttttctttttaatcttcacattaatgatgcatatatttttaactaaaggtggatatgtattagttgaatggcatggcatcacgattgaaactaatggtattttagaagggctatatatatcactgcgtttaattgggattgtaatgattgcaacaattatgacactatctacaagtccaattgatttaacagatgcgtttgaaagattacttgcaccactaaagatgtttaaattaccagttcatcaattaagtatgataatgtccattgcgttacgattcatcccgacgttaatggatgagttagataaaatcattttggcgcaaaagtcgcgtggttctgaaataagttcagggaacattgcaacacgtattaaatcatttattccattactagtgccactattcatctcagctttccaacgcgccgaagaattagcggtcgcaatggaagttaggggttatgatgccaatgttaagagaacgagctacagacagcttaaatggcaattgagagatacgatatctttaaccatgattatcccaattgcaattattttattcgtattaaaatattcaggagtgtaa

SEQ ID NO: 8735 - DNA, 369 bp, Staphylococcus aureus; identical to SEQ ID NO: 8134
  CDS (1)...(369)

SEQ ID NO: 8736 - DNA, 945 bp, Staphylococcus aureus
  CDS (1)...(945)
atgatagaaatcgaaaaacctagaattgagacaattgaaattagtgaagatgctaaattcggtaagttcgttgttgaaccactagaacgtggctacggtactacactaggaaactccttacgtcgtatcctactatcttcattaccaggtgcagccgttaagtatattgaaattgagggagttttacatgaattctcagcagtagacaatgtagttgaagatgtttctacaattattatgaacattaaacaattagcattgaaaatttactctgaagaagataaaactttagaaattgatgtacgtgatgaaggcgaagtaacagcaagcgacattacacatgatagtgatgttgaaattttaaacccagagcttaaaattgcaacagtatctaaaggtggtcacttaaaaattcgtctagttgctaacaagggtagaggttacgcattagcagaacaaaataatactagtgatttaccaattggtgtaatccctgttgattcattgtattcacctgttgaacgtgtgaactatactgttgaaaatacacgtgtaggtcaaagcagtgattttgataaattaacattggatgtttggactaatggttcaatcacaccacaagaatcagtttcattagcagcaaaaataatgactgaacacttgaatatcttcgttggtcttactgatgaagcgcaaaacgctgaaatcatgattgaaaaagaagaagatcaaaaagaaaaagtattagaaatgtctattgaagaattagacttatctgtacgttcatataactgcttaaaacgcgcaggaatcaattctgttcaagagttagctgacaaatctgaagctgacatgatgaaagtgcgtaatttaggtcgtaaatctttagaagaagttaaatacaaattagaagatttaggattaggattaagaaaagaagattga

SEQ ID NO: 8737 - DNA, 390 bp, Staphylococcus aureus; identical to SEQ ID NO: 8132
  CDS (1)...(390)

SEQ ID NO: 8738 - DNA, 366 bp, Staphylococcus aureus
  CDS (1)...(366)
atggcacgtattgcaggagtagatattccacgtgaaaaacgcgtagttatctcattaacttatatatacggtatcggtacgtcaactgctcaaaaaattcttgaagaagctaacgtatcagctgatactcgtgtgaaagatttaactgatgacgaattaggtcgcatccgtgaagttgtagacggttataaagtcgaaggtgacttacgtcgtgaaactaacttaaatatcaaacgtttaatggaaatttcatcataccgtggtatccgtcaccgtcgtggtttaccagttcgtggtcaaaaaacgaaaaacaacgcgcgtactcgtaaaggaccagttaaaacggtagctaacaagaaaaaataa

SEQ ID NO: 8739 - DNA, 1554 bp, Staphylococcus aureus
  CDS (1)...(1554)
atgaaatatatgattggtgtcgacattggaacgacgagtaccaagtcagtcttatatgatgaaaatggaacttttatcatgaaacatcaaataggctatgatttacacacaccaaacgttgatgtctcagaagaaaacccagatgaattatttgatgcagtactaatgactattaaatatgttatgagagaatccaaagttaataaagacgacattaagtttgtgtcatttagtgcgcaaatgcatagcttgattgcgatggatcagcaacatcaaagattaacaaataatattacttgggcagataaccgcgctgcaaaatatgcaacagtaataaatgaagtgcatgatggcaatgcgatttaccagcgaacaggcacaccgattcatcctatgtcgccattagcgaagattttttggatgaaacatgaatggcaagatgtatttcaacgtactgctaagtttgcagatattaaaacatacattttctatcatttatttgatacatatatcattgattattcaatggcttccgcaacagggatgtttaatttagaaacattagattgggatgttgaggcattagaactgctgggtatttccaaggaaatgttgccggaattagttccaacaacgtatgtgatgaaaggtatgaaagaacgttatgcaacattaatggggcttaataaagatacaccgtttgttattggtgcgagtgatggggtcctttctaatttaggtgtcaatagtgttggtaaaggagaagttgctgtcacaatcggtacatctggggcgattcgtactgtgatagataaaccgcgtactgattaccaaggtagaatattttgttatgtcttagcagaggaccactacgtcatcggaggtcctgtaaataatggtggtgtcgtattgagatggttgcgcgacgagttgctagcgagtgaagtcgaaactgcgaaacgtctcggtgttgatccttatgatgtcttaactcaaattgcaaagcgtgttaaaccaggtgcagatggtttaatattccatccctatttagcaggagaacgtgcgccgctttggaacgcaaatgcaagaggttcattcttcggtttaactttatctcataaaaaagaacatatgattcgcgctgcattagaaggtgttctttacaatttgtataccgtctatcttgcgcttattgaagtaatgaatgaaacacctaagatgataaaagcaacaggtggttttgcgaaaagtgaagtatggcgtcaaatgatgtcagatatatttgacacagagttagtggttcctgaaagttatgaaagttcatgcttaggtgcctgcgtgctcggacttaaagctgtaggtgacattgaagatttttcaatcgtttcatcgatggtcggtgccacaaacaatcatacgccgattgaagaaaatgtcactgtttaccaagagatcgtatccatttttatcaatttaagtcgttctttaacagagaattatgaacaaattgcagattttcaacgccaacatatcgctgaaaataaaacacaataa

SEQ ID NO: 8740 - DNA, 3057 bp, Staphylococcus aureus
  CDS (1)...(3057)
gtgaaaaacaatcttaggtacggcattagaaaacataaattgggagcagcatcagtattcttaggaacaatgatcgttgttgggatgggacaagacaaagaagctgcagcatcagaacaaaagacaactacagtagaagaaaatgggaattcagctactgataataaaacaagtgaaacacaaacaactgcaactaacgttaatcatatagaagaaactcaatcatataacgcaacagtaacagaacaaccgtcaaacgcaacacaagtaacaactgaagaagcaccaaaagcagtacaagcaccacaaactgcacaaccagcaaatatagaaacagttaaagaagaggtagttaaggaagaagcgaaacctcaagttaaggaaacaacacaatctcaagacaatagcggagatcaaagacaagtagatttaacacctaaaaaggctacacaaaatcaagtcgcagaaacacaagttgaagtggcacagccaagaacggcatcagaaagtaagccacgtgtgacaagatcagcagatgtagcggaagctaaggaagctagtaacgcgaaagtggaaacgggtacagatgtaacaagtaaagttacagtagaaattggttctattgaggggcataacaatacaaataaagtagaacctcatgcaggacaacgagcggtactaaaatataagttgaaatttgagaatggtttacatcaaggtgactactttgactttactttatcaaataatgtaaatacgcatggcgtatcaactgctagaaaagtaccagaaattaaaaatggttcagtcgtaatggcgacaggtgaagttttagaaggtggaaagattagatatacatttacaaatgatattgaagataaggttgatgtaacggctgaactagaaattaatttatttattgatcctaaaactgtacaaactaatggaaatcaaactataacttcaacactaaatgaagaacaaacttcaaaggaattagatgttaaatataaagatggtattgggaattattatgccaatttaaatggatcgattgagacatttaataaagcgaataatagattttcgcatgttgcatttattaaacctaataatggtaaaacgacaagtgtgactgttactggaactttaatgaaaggtagtaatcagaatggaaatcaaccaaaagttaggatatttgaatacttgggtaataatgaagacatagcgaagagtgtatatgcaaatacgacagatacttctaaatttaaagaagtcacaagtaatatgagtgggaatttgaatttacaaaataatggaagctattcattgaatatagaaaatctagataaaacttatgttgttcactatgatggagagtatttaaatggtactgatgaagttgattttagaacacaaatggtaggacatccagagcaactttataagtattattatgatagaggatataccttaacttgggataatggtttagttttatacagtaataaagcgaacggaaatgggaaaaatggtccgattattcaaaataataaatttgaatataaagaagatacaattaaagaaactcttacaggtcaatatgataagaatttagtaactactgttgaagaggaatatgattcatcaactcttgacattgattaccacacagctatagatggtggaggtggatatgttgatggatacattgaaacaatagaagaaacggattcatcagctattgatatcgattaccatactgctgtggatagcgaagcaggtcacgttggaggatacactgagtcctctgaggaatcaaatccaattgactttgaagaatctacacatgaaaattcaaaacatcacgctgatgttgttgaatatgaagaagatacaaacccaggtggtggtcaggttactactgagtctaacttagttgaatttgacgaagagtctacaaaaggtattgtaactggcgcagtgagcgatcatacaacagttgaagatacgaaagaatatacaactgaaagtaatctgattgaattagtggatgaattacctgaagagcatggtcaagcacaaggaccagtcgaggaaattactgaaaacaatcatcatatttctcattctggtttaggaactgaaaatggtcacgggaattatgacgtgattgaagaaatcgaagaaaatagccacgttgatattaagagtgaattaggttatgaaggtggccaaaatagcggtaaccagtcattcgaggaagacacagaagaagacaaacctaaatatgaacaaggtggcaatatcgtagatatcgattttgatagtgtacctcaaattcatggtcaaaataaaggtaatcagtcattcgaggaagatacagaaaaagacaaacctaagtatgaacatggcggtaacatcattgatatcgacttcgacagtgtgccacatattcacggattcaataagcacactgaaattattgaagaagatacaaataaagataaaccaagttatcaattcggtggacacaatagtgttgactttgaagaagatacacttccaaaagtaagcggccaaaatgaaggtcaacaaacgattgaagaagatacaacacctccaatcgtgccaccaacgccaccgacaccagaagtaccaagtgagccggaaacaccaacgccaccaacaccagaagtaccaagtgagccggaaacaccaacaccaccgacaccagaagtgccgagtgagccagaaactccaacaccgccaacaccagaggtaccagctgaacctggtaaaccagtaccacctgccaaagaagaacctaaaaagccttctaaaccagtggaacaaggtaaagtagtaacacctgttattgaaatcaatgaaaaggttaaagcagtggcaccaactaaaaaaccacaatctaagaaatctgaactacctgaaacaggtggagaagaatcaacaaacaaaggtatgttgttcggcggattattcagcattctaggtttagcattattacgcagaaataaaaagaatcacaaagcataa

SEQ ID NO: 8741 - DNA, 195 bp, Staphylococcus aureus; identical to SEQ ID NO: 4421
  CDS (1)...(195)

SEQ ID NO: 8742 - DNA, 465 bp, Staphylococcus aureus; identical to SEQ ID NO: 8453
  CDS (1)...(465)

SEQ ID NO: 8743 - DNA, 762 bp, Staphylococcus aureus
  CDS (1)...(762)
atggcatcaacattagaaatcaaagacctacatgtgtctattgaggataaagaaatcttaaaaggtgttaacttgacaattaacactgatgaaatacatgcgattatgggaccaaacgggacaggtaaatcaactttatcatctgcaattatgggacacccaagctatgaagtaactaaaggagaagtacttttagacggtgtaaatattttagaattagaagttgatgaaagagcaaaagcaggattattcttggcaatgcaatatccatcagaaattacaggtgttacaaatgctgatttcatgcgttcagcaatcaatgcgaaacgtgaagaaggacaagaaatcaacttaatgcaatttattaagaaattagataaaaacatggattttctagacatagataaagacatggcacaacgttatttaaatgaaggtttctcaggtggagagaagaaacgtaacgaaatcttacaattaatgatgttagaacctaagtttgcaatcttagatgaaatcgattcagggttagacatcgatgcattaaaagttgtatctaaaggtattaaccaaatgcgtggggaaaactttggtgcattaatgattacacactatcaacgattattaaattacattactcctgataaagtacatgtaatgtatgctggtaaagtcgttaaatctggtggtccagaattagcaaaacgtcttgaagaagaaggatatgaatgggttaaagaagagttcggttcagctgaataa

SEQ ID NO: 8744 - DNA, 1272 bp, Staphylococcus aureus
  CDS (1)...(1272)
atgcgtatcattcgtcatattttttatgaggaaggagaaatgattatgttaagtattaagcatttaacgaaaatttattctggtaataaaaaggcagtagatgacatctctttagatattcaatctggggaatttatcgcatttattggaaccagtggaagtggcaaaacgactgctttaagaatgataaaccgtatgattgaagcgacagaaggacaaattgaaattgatggtaaagatgttcggagtatgaatcctgtcgaattgcgtagaaatattggctatgttattcaacaaattggcttaatgcctcatatgacgattaaagagaatattgtgttggtacccaaattgttgaaatggactaaagaggaaaaggataaacgtgcaaaggaattaattaaacttgtggatttaccggagtcatttttagagcgttatccagcagaactatcaggtgggcaacaacaacgtatcggtgttgtaagagcacttgcggccgaacaagatattattttaatggatgaaccttttggtgcattggatcctattacgagagatacgttacaagatttagttaaaacgttacaacgaaaattaggcaagacgtttatctttgtaacacatgatatggatgaagcgattaaattagcagacaaaatttgtattatgtcagaaggtaaggtggtgcaatttgatacgccagacaatattttaagacatcccgcaaatgattttgtacgtgattttataggacaaaatagactgattcaagaccgtcccaatgacaagactgtagaaggtgtaatgattaaaccaatcacgatacaagcagaagcaacactgaatgacgccgttcatattatgagacaaaaacgtgttgatgctatttttgtagtagatagtaataaccatttactaggtttcttagacattgaagatataaatcagggtatacgtggacacaaaagtttacgagacaccatgcaacaacatatttataccgttcaaattgattctaaattacaagattctgtacgtacgattttaaaaagaaacgttaggaatgtacctgtcgtagatgatcaacagcgtttagtaggactgattacgcgtgccaatgttgttgatattgtatatgacacgatttggggcgatagtgaggatacagtgcaaacagaacatgtgggggaagacactgcgtcctcaaaagtgcatgagcaacacactactaatgtcaaagtacgtgacataggagatgataaatcatga

SEQ ID NO: 8745 - DNA, 135 bp, Staphylococcus aureus
  CDS (1)...(135)
atgaaatatagtttagactttttaggtgccactttaaatggttatattattggaactgctgaaaagcctggtgacatcatgaaagacaactatgccttagcacgtgcaactgagtggaatagtatattgcaataa

SEQ ID NO: 8746 - DNA, 1380 bp, Staphylococcus aureus
  CDS (1)...(1380)
atggagaacaatgaactacaaaggggattgagtgcccgtcaaattcaaatgattgcacttggtggtacgattggcgtggggcttttcatgggtgcgacaagtacaattaaatggacaggcccatcagttatccttgcatatttaattgcgggtatctttttatttttaatcatgagagcaatgggggaaatgatttatttaaaccctacaacaggatcatttgcaacatttgcaagtgattatatacatcctgcagcaggttatatgacagcatggagtaatatattccaatggattgtagttggtatgagtgaggtcatcgcagtaggagaatatatgaagttttggttcccggaattgccaacttggattcctggtgttattgctattttattattaatggcagcgaatttattctcggtaaaagcgtttggagaatttgaattttggtttgctttaattaaagttgtaacaattattttaatgattattgctggttttggtcttattttctttggttttggaaatggtggccatgcggtaggtatttctaatctatggacaaatggcggatttatgccaaatggtattgttggtttcttctttgcattatcaattgtaattggttcataccaaggtgtggaactgataggtattacggcaggtgaaactaaagatcctcagaaaaatatcgttaaagcagtgaatggtgttatctggagaattttaattttctatttaggcgctatttttgttattgtttcagtgtatccttggaatcaattaggagacattggaagtccgtttgttgcaacatttgctaaaatcggtattacatttgcagctggattaattaactttgttgtattaactgcagcaatgtcaggatgtaactcaggtattttcagtgcgagtcgtatgatttatacacttgctcataaaggtgaaatgccgaaaatatttactaaaatcatgagaaatggtgtaccattgtacactgttgtagcagtatctcttggtattttaattggtgctttattaaacgtaattttacctttatatatcgatggagcgaagagtattttcgtatacgtttatagtgcgtctattttaccaggtatgattccttggtttatgattttattcagtcatttacgttttagaaaattacaccctgaagaattggaaggtcacccattcaaaatgcctggtggcgcagtaactaactatttaacaatcttattcttaatattagtattggttggtatggtatttaatgttgaaactagaatatcagtgcttattggtgtcatcttcttaacgattgtaacgatttattattttattagatataataaaaataatgtaaaagcaaaatag

SEQ ID NO: 8747 - DNA, 1266 bp, Staphylococcus aureus
  CDS (1)...(1266)
atggaaaagatgcatatcactaatcaggaacatgacgcatttgttaaatcccacccaaatggagatttattacaattaacgaaatgggcagaaacaaagaaattaactggatggtacgcgcgaagaatcgctgtaggtcgtgacggtgaagttcagggtgttgcgcagttactttttaaaaaagtacctaaattaccttatacgctatgttatatttcgcgtggttttgttgttgattatagtaataaagaagcgttaaatgcattgttagacagtgcaaaagaaattgctaaagctgagaaagcgtatgcaattaaaatcgatcctgatgttgaagttgataaaggtacagatgctttgcaaaatttgaaagcgcttggttttaaacataaaggatttaaagaaggtttatcaaaagactacatccaaccacgtatgactatgattacaccaattgataaaaatgatgatgagttattaaatagttttgaacgccgaaatcgttcaaaagtgcgcttggctttaaagcgaggtacgacagtagaacgatctgatagagaaggtttaaaaacatttgctgagttaatgaaaatcactggggaacgcgatggcttcttaacgcgtgatattagttactttgaaaatatttatgatgcgttgcatgaagatggagatgctgaactatttttagtaaagttggatccaaaagaaaatatagcgaaagtaaatcaagaattgaatgaacttcatgccgaaattgctaaatggcagcagaagatgaaaacatctgaaaagcaagctaaaaaagcgcaaaatatgattaatgatgcgcaaaataaaattgctaaaaatgaagatttaaaacgagacctagaagctttagaaaaggaacatcctgaaggtatttatctttctggtgcactattaatgtttgctggctcaaaatcatattacttatatggtgcgtcttctaatgaatttagagattttttaccaaatcatcatatgcagtatacgatgatgaagtatgcacgtgaacatggtgcaacaacttacgatttcggtggtacagataatgatccagataaagactcagaacattatggattatgggcatttaaaaaagtgtggggaacatacttaagtgaaaagattggtgaatttgattatgtattgaatcagccattgtaccaattaattgagcaagttaaaccgcgcttaacaaaagctaaaattaaaatatctcgtaaattaaaacgaaaatag

SEQ ID NO: 8748 - DNA, 1311 bp, Staphylococcus aureus
  CDS (1)...(1311)
atgaaaaataaatatatctcgaagttgctagttggggcagcaacaattacgttagctacaatgatttcaaatggggaagcaaaagcgagtgaaaacacgcaacaaacttcaactaagcaccaaacaactcaaaacaactacgtaacagatcaacaaaaagctttttatcaagtattacatctaaaaggtatcacagaagaacaacgtaaccaatacatcaaaacattacgcgaacacccagaacgtgcacaagaagtattctctgaatcacttaaagacagcaagaacccagaccgacgtgttgcacaacaaaacgctttttacaatgttcttaaaaatgataacttaactgaacaagaaaaaaataattacattgcacaaattaaagaaaaccctgatagaagccaacaagtttgggtagaatcagtacaatcttctaaagctaaagaacgtcaaaatattgaaaatgcggataaagcaattaaagatttccaagataacaaagcaccacacgataaatcagcagcatatgaagctaactcaaaattacctaaagatttacgtgataaaaacaaccgctttgtagaaaaagtttcaattgaaaaagcaatcgttcgtcatgatgagcgtgtgaaatcagcaaatgatgcaatctcaaaattaaatgaaaaagattcaattgaaaacagacgtttagcacaacgtgaagttaacaaagcacctatggatgtaaaagagcatttacagaaacaattagacgcattagttgctcaaaaagatgctgaaaagaaagtggcgccaaaagttgaggctcctcaaattcaatcaccacaaattgaaaaacctaaagtagaatcaccaaaagttgaagtccctcaaattcaatcaccaaaagttgaggttcctcaatctaaattattaggttactaccaatcattaaaagattcatttaactatggttacaagtatttaacagatacttataaaagctataaagaaaaatatgatacagcaaagtactactataatacgtactataaatacaaaggtgcgattgatcaaacagtattaacagtactaggtagtggttctaaatcttacatccaaccattgaaagttgatgataaaaacggctacttagctaaatcatatgcacaagtaagaaactatgtaactgagtcaatcaatactggtaaagtattatatactttctaccagaacccaacattagtaaaaccagctattaaagcacaagaaactgcatcatcaatcgtcaatacattaagtaatttggtatccgtctgggaatga

SEQ ID NO: 8749 - DNA, 957 bp, Staphylococcus aureus
  CDS (1)...(957)
gtggtgggattgaaacgttcgtctaaaagtaaaatgagcctaccgaaaaaaatatttttatgggtattcggtattttagtaatcttagcgattgtagctgttgtgtatgtagctgctaaaatttttattactggtaataagatacacaatccgttagatcgcaatcattcagaattaagagataaaaaagtgagtttaaacgatggtgatccattcacaatcgctttatttggtgtcgattcagatgctgatcgtaagaaaaagggtggcggagagcgtagtgatagtattatgattttatctatcaaccctaaaacgaagaaaactgaaatagtaagtataccgcgtgatacaagagcggaaattgttggccgtggtactactgaaaaaattgcacatgcctatgcatatggtggaccaaatatggctgttaaatcacttgaaaaattaatgaatgtgccaattgatcattatgcgacaatcgatatggatggtttgcataatatgatagatagcatcggcggtgttgatgtagtaagtaatgatacattcactgttgatggtgttcgttttacaaaaggacagcagacacatgtaaatggtgatcaagcattgaagtttattagaagtcgtaaagaagaaggtgctggtggtgactttggtcgacaacaacgtcagcaaattgtgcttgaagcgatggccaataagattgcaagcccatcatcgattacacattttaatagtctaatgaatgaaattcaaaataatgttaaaacagatttaacattaggtgatttgaatacgattagaagcaattataaagatgctaatgacacgattaataaacatcaattgagtggtcaaggcggcattcaaagtgacggattgtactacttcattcctagtgagcagtcaaaagctgaaagtactaagttattaaaagataatctagagtag

SEQ ID NO: 8750 - DNA, 474 bp, Staphylococcus aureus; identical to SEQ ID NO: 4800
  CDS (1)...(474)

SEQ ID NO: 8751 - DNA, 990 bp, Staphylococcus aureus
  CDS (1)...(990)
atggagacattattttcaggcatccaacctagtggaattcctactattggaaattatattggcgcactaaaacaatttgttgatgtgcaaaatgactatgattgttatttctgtatcgtagatcaacatgcaattacaatgccacaagatcgtttaaaattacgtaaacagaccagacaattagcagcgatttatttagcttctggtatagatccagacaaagcaacattgttcatacaatctgaagtccctgcacacgtacaagcaggatggatgttaactacgattgcttctgttggagaattagagcgtatgacgcaatacaaagataaagctcagaaagcagttgaaggtatacctgctggtctattaacatatccacctttaatggcagctgatattgttctttacaatactaatatcgttccagttggagatgaccaaaagcagcatatcgaattgactcgtaaccttgtagatagatttaatagtcgctataatgatgtgcttgtgaaacctgaaattcgtatgcctaaagttggtggacgtgtcatgagtttacaagacccaacaagaaaaatgagtaagagtgatgataatgctaaaaacttcatttcattattagacgagccgaatgttgcagctaaaaaaattaaaagcgcagtaactgattcagatggtattattaaatttgatcgtgacaacaagccaggtataacaaatttaatttcaatatacgctggattaacagacatgccaattaaagatattgaggcaaaatatgagggcgaaggttatggtaaatttaaaggtgaccttgctgaaatagttaaagcatttttagtagaattccaagaaaaatacgaaagtttctataactcagataaacttgatgatattttagatcaaggtagagataaagcacacaaagtttcatttaaaactgtcaaaaaaatggaaaaagcgatgggtttaggacgtaagagataa

SEQ ID NO: 8752 - DNA, 981 bp, Staphylococcus aureus
  CDS (1)...(981)
atggaaaatattttagaagtcaaccaaataaaaaaatactacaaaattaaaactggattattacaaaaaactcagtacgttaaagctgttgatgacgtatcgttttcaataaaaaaaggacaaacttttggattagtaggagaatcgggttgtggtaagtcaacgttaggtaaagtgattatcaggcttgaagatgcaacttcaggctcaataattgttaatggtgaagatataacaagattacaaggtaaaaaactcagaaaatcacgacaacaatatcagatgatatttcaagatccgtatgcatcattgaatccgatgcaaatggttggagatatcatttcagaacctattttaaattataaaaaattgccaaaagaagaaataaaaaaagaagtactatatttattaaaatgtgttggcctaagtgaagatgcatattataaatatgcacatgaattttcaggtggacagagacaaagagtgggaattgcaagagcattggctttgcgtccgagtttaattgttgctgatgagcctgtaagtgcattagatgtatctgttcaatctcaagtactgaatttattaaaagatttacaagaacaatttaacttaagctatttatttatcgcacatgatttaagtgtagtaaaacatataagtgatgtcattggagttatgtatttaggtcatatagttgaaatcgcatctgataaagaaatttatgaaaatcccaaacatccatatacaaaagcgttgatttcatcaataccacaaattgataaacataataacaatagaattatattaaaaggagaattaccttcgccaagtaatccgccgcaaggttgtccttttcatacaagatgtccaattgctcaagatatgtgcaaaaaaagtatgccagaattaaaggacattggtaatgaacatcaagttgcttgtttctacgtagataaagtaggtgatttaaatgattaa

SEQ ID NO: 8753 - DNA, 1467 bp, Staphylococcus aureus
  CDS (1)...(1467)
atggctatgtctaataattttaaagatgactttgaaaaaaatcgtcaatcgatagacacaaattcacatcaagaccatacggaagatgttgaaaaagaccaatcagaattagaacatcaggatacaatagagaatacggagcaacagtttccgccaagaaatgcccaaagaagaaaaagacgccgtgatttagcaacgaatcataataaacaagttcacaatgaatcacaaacatctgaagacaatgttcaaaatgaggctggcacaatagatgatcgtcaagtcgaatcatcacacagtactgaaagtcaagaacctagccatcaagacagtacacctcaacatgaagaggaatattataataagaatgcttttgcaatggataaatcacatccagaaccaatcgaagacaatgataaacacgatactattaaaaatgcagaaaataacactgagcattcaacagtttctgataagagtgaagctgaacaatctcagcaacctaaaccatattttacaacaggtgctaaccaatcagaaacatcaaaaaatgaacatgataatgattctgtaaaacaagatcaagatgaacctaaagaacatcataatggtaaaaaagcagcagctattggtgctggaacagcaggtgttgcaggtgcagctggtgcaatggctgcttctaaagctaagaaacattcaaatgacgctcaaaacaaaagtaattctggcaaggcgaataactcgactgaggataaagcgtctcaagataagtctaaagatcatcataatggcaaaaaaggtgcagcgatcggtgctggaacagcaggtttggctggaggcgcagcaagtaaaagtgcttctgccgcttcaaaaccacatgcctctaataatgcaagccaaaaccatgatgaacatgacaatcatgacagagataaagaacgtaaaaaaggtggcatggccaaagtattgttaccattaattgcagctgtactaattatcggtgcattagcgatatttggaggcatggcattaaacaatcataataatggtacaaaagaaaataaaatcgcgaatacaaataaaaataatgctgatgaaagtaaagacaaagacacatctaaagacgcttctaaagataaatcaaaatctacagacagtgataaatcaaaagaggatcaagacaaagcgactaaagatgaatctgataatgatcaaaacaacgctaatcaagcgaacaatcaagcacaaaataatcaaaatcaacaacaagctaatcaaaatcaacaacagcaacaacaacgtcaaggtggtggccaaagacatacagtgaatggtcaagaaaacttataccgtatcgcaattcaatactacggttcaggttcaccggaaaatgttgaaaaaattagacgtgccaatggtttaagtggtaacaatattagaaacggtcaacaaatcgttattccataa

SEQ ID NO: 8754 - DNA, 519 bp, Staphylococcus aureus
  CDS (1)...(519)
gtgacgtacatgatccgtctaggtaaaatgtcagatttagatcaaatcttaaatctagtagaagaagcaaaagaattaatgaaagaacacgacaatgagcaatgggacgatcagtacccacttttagaacattttgaagaagatattgctaaagattatttgtacgtattagaggaaaatgacaaaatttatggctttattgttgtcgaccaagaccaagcagaatggtatgatgacattgactggccagtaaatagagaaggcgcctttgttattcatcgattaactggttcgaaagaatataaaggagctgctacagaattattcaattatgttattgatgtagttaaagcacgtggtgcagaagttattttaacggacacctttgcgttaaacaaacctgcacaaggtttatttgccaaatttggatttcataaggtcggtgaacaattaatggaatatccgccatatgataaaggtgaaccattttatgcatattataaaaatttaaaagaatag

SEQ ID NO: 8755 - DNA, 1071 bp, Staphylococcus aureus
  CDS (1)...(1071)
atgacgaaaatcgcatttaccggagggggaacagttggacacgtatcagtaaatttaagtttaattccaactgcattatcacaaggttatgaagcgctttatattggttctaaaaatggtattgaaagagaaatgattgaatcacaactaccagaaattaagtattatcctatttcgagtggtaaattaagaagatatatttctttagaaaatgccaaagacgtatttaaagtattgaaaggtattcttgatgctcgtaaagttttgaaaaaagaaaaacctgatctattattttcaaaaggtggatttgtatctgtgcctgttgttattgcagccaaatcattaaatataccaactattattcatgaatctgacttaacaccaggattagcgaataagatagcacttaaatttgccaagaaaatatatacaacatttgaagaaacgctaaactacttacctaaagagaaagctgattttattggagcaacaattcgagaagatttaaaaaatggtaatgcacataatggttatcaattaacaggctttaatgaaaataaaaaagttttactcgttatgggtggaagcttaggaagtaaaaaattaaatagcattattcgcgaaaacttagatgcattattacaacaatatcaagtgatacatttaactggtaaaggattaaaagatgctcaagttaaaaaatcaggatatatacaatatgaatttgttaaagaggatttaacagatttattagcaattacggatacagtaataagtagagctggatcaaatgcgatttatgagttcttaacattacgtataccaatgttattagtaccattaggtttagatcaatcccgaggcgaccaaattgacaatgcaaatcattttgctgataaaggatatgctaaagcgattgatgaagaacaattaacagcacaaattttattacaagaactaaatgaaatggaacaggaaagaactcgaattatcaataatatgaaatcgtatgaacaaagttatacgaaagaagctttatttgataagatgattaaagacgcattgaattaa

SEQ ID NO: 8756 - DNA, 480 bp, Staphylococcus aureus
  CDS (1)...(480)
atgactttatccattctagttgcacatgacttgcaacgagtaattggttttgaaaatcaattaccttggcacctaccaaatgatttgaagcatgttaaaaaattatcaacaggtcatactttagtaatgggtcgtaagacatttgaatcgattggtaaaccactaccgaatcgtcgaaatgttgtacttacttcagatacaagtttcaacgtagagggcgttgatgtaattcactctattgaagatatttaccaactaccgggccatgttttcatatttggagggcaaacattatttgaagaaatgattgataaagtggacgacatgtatattactgttattgaaggtaaattccgtggtgatacgttctttccaccttatacatttgaagactgggaagttgcctcttcagttgaaggtaaactagatgagaaaaatacaattccacatacctttctacatttaattcgtaaaaaataa

SEQ ID NO: 8757 - DNA, 714 bp, Staphylococcus aureus
  CDS (1)...(714)
atggctaaactaaatgtagaagtatttgcggacggtgcagatattgaagaaatgaaagcagcttataaaaacaaacaagtggatggttttacaacaaatcctagtttaatggctaaagcgggcgtaacagattacaaagcttttgctgaagaagctgtgaaagaaattccagatgcttcaatttcatttgaagtatttgcagacgatttagaaactatggaaaaagaagcagcaattttaaaacaatatggcgaaaatgtatttgttaaaattcctattgtaaatacaagaggtgaatcaacgattcctttaattaaaaaactttcagctgacaatgtgagattaaacgttacggctgtttacacaattgaacaagttaaagaaataactgaagcagtaactgaaggtgtgccaacatatgtttcagtatttgcaggacgtattgcagatacaggcgtagatccattaccattaatgaaagaggctgtaaaagttacgcatagtaaagacggcgttaaattattatgggcaagttgccgcgaattattcaatgtgattcaagctgatgaaattggtgcagatattattacatgcccagcagatgttgtgaaaaaagtgaatacaaacttaggtcgcgatattaacgaattatcagtagatacagttaaaggctttgcgaaagatattcaatcttcaggtctttctattctataa

SEQ ID NO: 8758 - DNA, 1296 bp, Staphylococcus aureus
  CDS (1)...(1296)
atggacgtattaggccttctctctatattaatagttagaaggtcttttttatttagctcacagagagagaattttcgtaatataaatttaaaggagcaaactatgttaaataacaaacgattatttacttcagagtctgttacagaaggacacccagataaaatcgctgaccaagtgtcagatgcaatattagatgctattttaaaagacgatccaaatgcacgtgtagcttgtgaaacaactgttacaacaggtatggcattgatcgccggcgaaatttctacaacaacatatgttgatattccgaaagttgttagagaaacaattaaagaaattggatacacaagagcaaaatatggttatgattatgaaacaatggcaattttaactgcgattgatgaacaatcacctgacattgcacaaggcgtggataaagcattagagtatcgtgataaagatagcgaagaagaaattgaagcaacaggtgcaggtgaccaaggtttaatgtttggttacgcaacgaatgaaacagagacgtatatgcctctagcaatttatttatcacatcaattggcaaaacgtttatcagatgtgcgtaaagatggtacgttaaattatttacgaccagacggtaaagttcaggtcactgttgaatatgatgaaaatgataacccagtacgtattgatacgattgtcgtatcaacacaacatgctgaggatgtgacacttgaacaaattcaagaagacattaaagcacatgtcatttatccaactgttccagaaaacttgattaatgaacaaactaaattctacatcaatcctacaggacgctttgtaatcggtggacctcaaggtgatgcaggattaacaggacgtaaaatcattgttgatacgtacggtggctatgcacgtcatggtggcggatgcttcagtggtaaggatcctacaaaagtagaccgttcagctgcatacgctgcacgttatgtggctaaaaatattgttgcagcaggtttagcagatcaatgtgaagtacaattggcatatgcgattggtgttgcagaaccagtgtcaattgcaattgatacatttggaacaggtaaagtttctgaagggcaacttgtcgaagcagttagaaaacactttgacctaagacctgcaggtattattaaaatgcttgatttgaaacaaccgatttacaaacaaactgctgcttatggtcattttggacgtacagatgtcttattcccatgggaaaaattagacaaagtggaagaattaaaagacgcagtaaaataa

SEQ ID NO: 8759 - DNA, 972 bp, Staphylococcus aureus
  CDS (1)...(972)
atgaatttcgatataatgtttaaagatacacttaacaggagggtatgtgttgttatggcgacaaaaaacgaggaaatattacgtaaaccggattggttgaaaataaaattaaataccaacgaaaactatacaggacttaagaagatgatgagggaaaaaaatcttaatactgtatgtgaagaagctaaatgtcctaatatacatgaatgttggggtgcacgtcgtacagcgacatttatgattttaggtgccgtatgtacaagagcttgtcgtttttgtgcggttaagacaggtttacctaatgaacttgatttaaatgagcctgaacgtgtagctgaatcagttgaattaatgaatttgaaacacgttgttatcactgctgttgcgcgtgatgatttaagagatgctggttcaaatgtttatgctgagacagtacgtaaagttagagaaagaaatccatttacaacgattgaaattttaccatcagatatgggcggggactatgatgcgttagaaacattaatggcgtcaagacctgacattttaaaccataatattgaaactgttcgtcgcttaacaccgagagttcgtgcgcgtgcgacttacgacagaacattagagtttttacgtcgttcaaaagaattacaaccggatatcccaactaaatcaagtattatggttggattaggtgaaactatagaagaaatttatgaaacgatggatgatttacgtgcgaatgatgtagatattttaacgattggtcaatatttacaaccttcacgtaaacatttaaaggttcaaaaatattacacgcctttagagtttggtaaattaagaaaagtggcaatggataaagggtttaaacattgccaagctggacctttagtacgtagttcttatcatgcggatgagcaagtaaatgaagctgctaaagaaaagcaacgccaaggtgaggcacagttaaatagttaa

SEQ ID NO: 8760 - DNA, 546 bp, Staphylococcus aureus
  CDS (1)...(546)
atgagtaatacaacattacatgcaacaacaatttatgctgtaagacataatgggaaagcagctatggctggagatgggcaagtaacgcttggtcaacaagtcatcatgaaacaaacggcaagaaaagtgcgacgtttatatgaaggtaaagtgttagctggtttcgcaggtagtgtagcagatgcgtttacgttatttgaaaaattcgaaacaaaattacaacagtttagtggtaacttagaaagagctgctgttgaattggcacaagaatggcgaggcgataaacaattacgtcaattagaagctatgctaattgtaatggataaagatgctattttagttgtcagtggaactggcgaagttattgctccagatgatgaccttatcgctattggatcaggaggcaactacgcattaagcgcaggacgtgcattgaaacgccatgcatcgcatttgtctgctgaagaaatggcatatgagagcttgaaagtagcggctgatatttgtgtctttaccaacgataatattgttgtcgaaacactataa

SEQ ID NO: 8761 - DNA, 1308 bp, Staphylococcus aureus
  CDS (1)...(1308)
atgactcaaactgtaaatgtaataggtgctggtcttgccggttcagaagcggcatatcaattagctgaaagaggaattaaagttaatctaatagagatgagacctgttaaacaaacaccagcgcaccatactgataaatttgcggaacttgtatgttccaattcattacgcggaaatgctttaactaatggtgtgggtgttttaaaagaagaaatgagaagattgaattctataattattgaagcggctgataaggcacgagttccagctggtggtgcattagcagttgatagaaacgatttttcaggttatattactgaaacacttaaaaatcatgaaaatatcacagttattaatgaagaaattaatgccattccagatggatacacaattatcgcaacaggaccacttactacagaaacccttgcgcaagaaatagtggacattactggtaaagatcaactttatttctatgatgcggctgctccaattattgaaaaagaatctattgatatggataaagtttacttaaagtcccgttatgataaaggtgaagctgcatatttaaactgtcctatgactgaggatgaatttaatcgcttttatgatgcagtattagaagctgaagttgcgcctgtaaattcatttgaaaaagaaaaatatttcgagggttgtatgccttttgaagtaatggcagaacgcggacgcaagacattactatttggaccaatgaaaccagtaggattagaagatccaaagactgggaaacgtccttatgcggtggttcaattaagacaagatgacgctgctggtacactctacaatattgttggcttccaaacgcatttaaaatggggagctcaaaaagaagtcattaaattaattccaggcttagaaaatgttgatattgttagatatggtgtgatgcatagaaataccttcattaattcaccggacgtattaaacgagaaatatgaattgatttcacaaccaaacatacagtttgcgggacaaatgactggtgttgaaggttatgtagaaagcgcagctagcggcttagttgcaggtatcaatcttgcgcataaaatattaggcaagggtgaggtagtatttccgagagaaacaatgattggaagtatggcttactatatttctcatgctaaaaacaataagaatttccaacctatgaatgctaacttcgggttattaccatctttagaaactagaattaaagataaaaaagaacgctatgaagcacaagctaatagagctttggattacttagaaaatttcaaaaaaactttataa

SEQ ID NO: 8762 - DNA, 1245 bp, Staphylococcus aureus
  CDS (1)...(1245)
atgaaattttcaactttaagtgaagaagaatttaccaactacaccaaaaagcacttcaaacattatacacagtctatagaattatataattatagaaataaaataaatcatgaagcacatattgtgggagtgaagaatgataaaaatgaagttatagctgcatgtttattaacagaggcacgaatttttaaattctacaaatatttctactctcatagaggtcctttacttgattatttcgatgctaaattagtttgttacttttttaaagaattatctaaattcatttataaaaatagaggagtatttattcttgttgatccatatttaatagagaatttaagagatgcaaatggtaggataataaagaattataataattcagtgatagtaaagatgctagggaaaattgggtatctccatcaaggttatacaacaggatattcaaataaaagtcaaattaggtggatttctgtattggatttaaaagataaagatgagaatcaacttttaaaagaaatggaataccaaactagaagaaatataaaaaagactattgagattggtgttaaggttgaagatttatctattgaagaaacaaatcgattttataaattgtttcaaatggctgaagaaaaacatggttttcatttcatgaatgaagattattttaaacgaatgcaagaaatatataaagataaggcaatgttaaagatagcttgtataaatcttaatgaatatcaagataaattaaaaatacaattattgaaaatcgaaaatgaaatgatgactgtgaacagagcattaaatgaaaatccaaattctaaaaaaaataaatcaaaattaaatcagttaaatatgcaattatctagtattaataatagaattagtaaaaccgaagaactaatatttgaagatggacctgttttggatttagctgctgctttatttatatgtactgatgatgaagtttattatctatcaagtggatcaaatccgaaatataatcagtatatgggtgcatatcatctacaatggcatatgataaaatatgcaaaatcacataatattaataggtataatttttatggaataacaggcgtctttagtaatgaggcggatgattttggtgttcaacaatttaaaaagggttttaatgcacatgttgaagaattaattggtgatttcatcaaaccagtaagaccaattctatataaatttgcaaaacttatttataaggtttaa

SEQ ID NO: 8763 - DNA, 909 bp, Staphylococcus aureus
  CDS (1)...(909)
atgagtgtatttatagataagaatactaaagtaatggtacaaggtattacagggtctactgcccttttccatacaaaacaaatgcttgattatggtacgaaaatagtagcaggtgtgacgcctggtaaaggtggtcaagttgttgaaggcgttcctgttttcaacactgttgaagaagctaaaaatgaaactggggcaacggtttcagtcatttacgttccagcaccatttgctgcagactcaattttagaagcagctgatgcagacttagacatggttatttgtatcactgaacatattcctgtattagacatggttaaagttaaacgctacttacaaggtagaaaaacacgtttagttggtccgaactgtccaggtgtgattacagcagatgaatgtaaaattggtattatgcctggctatattcacaaaaaaggtcatgttggtgtagtatctcgttcaggtacattaacatatgaagcagtgcaccaattgactgaagaaggtattggtcaaactacagctgttggtattggtggagacccagtcaacggaacaaactttattgatgttttaaaagcattcaatgaagatgacgaaacgaaagcagttgttatgattggtgaaatcggtggtacggctgaagaagaagcagctgaatggattaaagcgaatatgacaaaaccagttgtaggctttatcggtggacaaacagcacctcctggaaaacgtatgggacatgctggtgcaatcatttcaggtggtaaaggtactgctgaagagaaaattaaaacattaaatagttgtggtgtgaaaacagcggcaacaccttcagaaattggttcaacattaattgaagctgctaaagaagcaggtatttatgaatcattattaactgttaataaataa

SEQ ID NO: 8764 - DNA, 948 bp, Staphylococcus aureus
  CDS (1)...(948)
atgaggaaacgtgctagaatcatttataacccgacatcaggtaaagagctatttaaaagagaattacctgatgccttaataaaattagaaaaagcgggatatgaaacgagtgcatatgcaaccgagaaaataggtgatgccacacttgaagcagaaagagctatgcatgaaaattatgatgtattaatcgctgcaggtggtgatggaacattaaatgaagtagttaatggtatcgcagaaaagcctaatcgtcctaagctaggtgtcattcctatgggtactgttaatgactttggacgtgcattgcatatacctaatgacatcatgggggcacttgatgtcatcattgaaggtcattctactaaagtagatattggtaaaatgaataatcgatactttattaatttagctgcaggcggacaattgacgcaagtctcttatgaaacaccgagtaaattgaaatctattgttggtccatttgcttattacatcaaaggtttcgaaatgttacctcaaatgaaagctgtagatttaagaattgaatatgatggtaatgttttccaaggagaagcattattattctttttaggtttaacaaattcaatggcaggatttgaaaaattagtgccggacgctaagttagatgacggctattttacgttaattatagttgaaaaatcaaaccttgcagaacttggtcatattatgactttagcttcaagaggagaacatactaagcatcctaaagttatttatgaaaaagcaaaggcaattaatatttcatcattcacagacttacaactaaatgtagatggagaatatggtggtaaattaccagcgaatttcttaaatctagaacgtcatatagatgtctttgcacctaatgatattgtaaatgaagagttaataaataatgatcatgttgatgacaatttaatcgaagaataa

SEQ ID NO: 8765 - DNA, 1437 bp, Staphylococcus aureus
  CDS (1)...(1437)
gtggaaatcatgcattttgaaacagttataggacttgaagttcacgtagagttaaaaacggactcaaaaatgttttctccatcaccagcgcattttggagcagaacctaactcaaatacaaatgttatcgacttagcatatccaggtgtcttaccagttgttaataagcgtgcagtagactgggcaatgcgtgctgcaatggcactaaatatggaaatcgcaacagaatctaagtttgaccgtaagaactatttctatccagataatccaaaagcatatcaaatttctcaatttgatcaaccaattggtgaaaatggatatatcgatatcgaagtcgacggtgaaacaaaacgaatcggtattactcgtcttcacatggaagaagatgctggtaagtcaacacataaaggtgagtattcattagttgacttgaaccgtcaaggtacaccgctaattgaaatcgtatctgaaccagatattcgttcacctaaagaagcatatgcatatttagaaaaattgcgttcaattattcaatacactggtgtatcagacgttaagatggaagagggatctttacgttgtgatgctaacatctctttacgtccatatggtcaagaaaaatttggtactaaagccgaattgaaaaacttaaactcatttaactatgtacgtaaaggtttagaatatgaagaaaaacgccaagaagaagaattgttaaatggtggagaaatcggacaagaaacacgtcgatttgatgaatctacaggtaaaacaattttaatgcgtgttaaagaaggttctgatgattaccgttacttcccagagcctgacattgtacctttatatattgatgatgcttggaaagagcgtgttcgtcagacaattcctgaattaccagatgaacgtaaagctaagtatgtaaatgaattaggtttacctgcatacgatgcacacgtattaacattgactaaagaaatgtcagatttctttgaatcaacaattgaacacggtgcagatgttaaattaacatctaactggttaatgggtggcgtaaacgaatatttaaataaaaatcaagtagaattattagatactaaattaacaccagaaaatttagcaggtatgattaaacttatcgaagacggaacaatgagcagtaaaattgcgaagaaagtcttcccagagttagcagctaaaggtggtaatgctaaacagattatggaagataatggcttagttcaaatttctgatgaagcaacacttctaaaatttgtaaatgaagcattagacaataacgaacaatcagttgaagattacaaaaatggtaaaggcaaagctatgggcttcttagttggtcaaattatgaaagcgtctaaaggtcaagctaatccacaattagtaaatcaactattaaaacaagaattagataaaagataa

SEQ ID NO: 8766 - DNA, 1476 bp, Staphylococcus aureus
  CDS (1)...(1476)
atgaggaggacgcgtaagatgagcattcgctacgaatcggttgagaatttattaactttaataaaagacaaaaaaatcaaaccatctgatgttgttaaagatatatatgatgcaattgaagagactgatccaacaattaagtcttttctagcgctggataaagaaaatgcaatcaaaaaagcgcaagaattggatgaattacaagcaaaagatcaaatggatggcaaattatttggtattccaatgggtataaaagataacattattacaaacggattagaaacaacatgtgcaagtaaaatgttagaaggttttgtgccaatttacgaatctactgtaatggaaaaactacataatgaaaatgccgttttaatcggtaaattaaatatggatgagtttgcaatgggtggttcaacagaaacatcttatttcaaaaaaacagttaacccatttgaccataaagcagtgccaggtggttcatcaggtggatctgcagcagcagttgcagctggcttagtaccatttagcttaggttcagacacaggtggttcaattagacaaccggctgcatattgtggcgttgtcggtatgaaaccaacatacggtcgtgtatctcgatttggattagttgcttttgcatcttcattagaccaaattggtccattgactcgaaatgtaaaagataatgcaatcgtattagaagctatttctggtgcagatgttaatgactctacaagtgcaccagttgatgatgtagactttacatctgaaattggtaaagatattaaaggattaaaagttgcattacctaaagaatacttaggtgaaggtgtagctgatgacgtaaaagaagcagttcaaaacgctgtagaaactttaaaatctttaggtgctgtcgttgaggaagtatcattgccaaatactaaatttggtattccatcatattatgtgattgcatcatcagaagcttcgtcaaacctttctcgttttgacggaattcgttatggttatcattctaaagaagctcattcattagaagaattatataaaatgtcaagatctgaaggtttcggtaaagaagtaaaacgtcgtattttcttaggtacatttgcattaagttcaggttactatgatgcttactataaaaaatctcataaagttagaacattgattaaaaatgactttgataaagtattcgaaaattatgatgtagtagttggtccaacagcgcctacaactgcgtttaatttaggtgaagaaattgatgatccattaacaatgtatgccaatgatttattaacaacaccagtaaacttagctggattacctggtatttctgttccttgtggacaatcaaatggccgaccaatcggtttacagttcattggtaaaccattcgatgaaaaaacgttatatcgtgtcgcttatcaatatgaaacacaatacaatttacatgacgtttatgaaaaattataa

SEQ ID NO: 8767 - DNA, 303 bp, Staphylococcus aureus
  CDS (1)...(303)
atgacaaaagtaacacgtgaagaagttgagcatatcgcgaatcttgcaagacttcaaatttctcctgaagaaacggaagaaatggccaacacattagaaagcattttagattttgcaaaacaaaatgatagcgctgatacagaaggcgttgaacctacatatcacgttttagatttacaaaacgttttacgtgaagataaagcaattaaaggtattccacaagaattagctttgaaaaatgccaaagaaacagaagatggacaatttaaagtgcctacaatcatgaatgaggaggacgcgtaa

SEQ ID NO: 8768 - DNA, 1077 bp, Staphylococcus aureus
  CDS (1)...(1077)
atgattcaggtcaaagcacccggaaaactttatattgctggagaatatgctgtaacagaaccaggatataaatctgtacttattgcgttagatcgttttgtaactgctactattgaagaaacagaccaatataaaggtaccattcattcaaaagcattacatcataacccagttacatttagtagagatgaagatagtattgtcatttcagatccacatgcagcaaaacaattaaattatgtggtcacagctattgaaatatttgaacaatacgcgaaaagttgcgatatagcgatgaagcattttcatctgactattgatagtaatttagatgattcaaatggtcataaatatggattaggttcaagtgcagcagtacttgtgtcagttataaaagtattaaatgaattttatgatatgaagttatctaatttatacatttataaactagcagtgattgcaaatatgaagttacaaagtttaagttcatgcggagatattgctgtgagtgtatatagtggatggctagcgtatagtacttttgatcatgaatgggttaagcatcaaattgaagatactacggttgaagaagttttaatcaaaaactggcctggattgcacatcgaaccattacaagcacctgaaaatatggaagtacttatcggttggactggctcaccggcgtcatcaccacactttgttagcgaagtgaaacgtttgaaatcagatccttcattttacggtgacttcttagaagattcacatcgttgtgttgaaaaacttattcatgcttttaaaacaaataacattaaaggtgtgcaaaagatggtgcgtcagaatcgtacaattattcaacgtatggataaagaagctacagttgatatagaaactgaaaagctaaaatatttgtgtgatattgctgaaaagtatcacggcgcatctaaaacatcaggcgctggtggtggagactgtggtattacaattatcaataaagatgtagataaagaaaaaatttatgatgaatggacaaaacatggtattaaaccattaaaatttaatatttatcatgggcaataa

SEQ ID NO: 8769 - DNA, 354 bp, Staphylococcus aureus; identical to SEQ ID NO: 8335
  CDS (1)...(354)

SEQ ID NO: 8770 - DNA, 1518 bp, Staphylococcus aureus; identical to SEQ ID NO: 4802
  CDS (1)...(1518)

SEQ ID NO: 8771 - DNA, 1560 bp, Staphylococcus aureus
  CDS (1)...(1560)
gtgaatttattaagcctcctactcattttgctggggatcattctaggagttgttggagggtatgttgttgcccgaaatttgttgcttcaaaagcaatcacaagctagacaaactgccgaagatattgtaaatcaagcacataaagaagctgacaatatcaaaaaagagaaattacttgaggcaaaagaagaaaaccaaatcctaagagaacaaactgaagcagaactacgagaaagacgtagcgaacttcaaagacaagaaacccgacttcttcaaaaagaagaaaacttagagcgcaaatctgatctattagataaaaaagatgagattttagagcaaaaagaatcaaaaattgaagaaaaacaacaacaagtagatgcaaaagagagtagtgttcaaacgttaataatgaagcatgaacaagaattagaacgcatctccggtctcactcaagaagaagctattaatgagcaacttcaaagagtagaggaagaactgtcacaagatattgcagtacttgttaaagaaaaagaaaaagaagctaaagaaaaagttgataaaacagcaaaagaattattagctacagcagtacaaagattagcagcagatcacacaagtgaatcaacggtatcagtagttaacttacctaatgatgagatgaaaggtcgaatcattggacgagaaggacgaaacatccgcacacttgaaactttaactggcattgatttaattattgatgacacaccagaagcggttatattatctggttttgatccaataagaagagaaattgctagaacagcacttgttaacttagtatctgatggacgtattcatccaggtagaattgaagatatggtcgaaaaagctagaaaagaagtagacgatattattagagaagcaggtgaacaagctacatttgaagtgaacgcacataatatgcatcctgacttagtaaaaattgtagggcgtttaaactatcgtacgagttacggtcaaaatgtacttaaacattcaattgaagttgcgcatcttgctagtatgttagctgctgagctaggcgaagatgagacattagcgaaacgagctggacttttacatgatgttggtaaagcaattgatcatgaagtagaaggtagtcatgttgaaatcggtgtagaattagcgaaaaaatatggtgaaaatgaaacagttattaatgcaatccattctcatcatggtgatgttgaacctacatctattatatctatccttgttgctgctgcagatgcattgtctgcggctcgtccaggtgcaagaaaagaaacattagagaattatattcgtcgattagaacgtttagaaacgttatcagaaagttatgatggtgtagaaaaagcatttgcgattcaggcaggtagagaaatccgagtgattgtatctcctgaagaaattgatgatttaaaatcttatcgattggctagagatattaaaaatcagattgaagatgaattacaatatcctggtcatatcaaggtgacagttgttcgagagactagagcagtagaatatgcgaaataa

SEQ ID NO: 8772 - DNA, 798 bp, Staphylococcus aureus
  CDS (1)...(798)
atgagaataatgtttataggggatatcgtaggtaaaattggacgagacgcaattgaaacgtacatacctcaactgaagcaaaagtataaaccaacagttacaattgtaaatgctgaaaatgcagcacatggtaaaggtttgactgaaaaaatatataaacaattactaagaaatggtgtagatttcatgactatgggtaatcacacatatggtcaacgtgaaatttatgattttatagatgaagcaaaacgactagtaagaccagcgaattttccggatgaagcgccgggaattggtatgagatttatacaaattaatgatattaaacttgcagttattaatctgcaaggaagagcgtttatgccagatattgatgatccttttaaaaaggcagatcaattagtcaaggaagcacaagaacaaactccgtttatatttgttgattttcatgcagaaacaacttctgaaaagtatgcaatgggatggcatttagatggtagagctagcgctgttgttggaacgcatacacacattcaaacagcagatgaacgtattttaccaaaggggacagggtatataacggatgttggtatgacaggtttttatgatggcattttaggaataaataaaacagaggtaattgagcgttttatcactagtttgccacaaagacatgttgttccaaatgaaggtagaagtgtattatctggtgttgttattgatttagacaaagaaggtaaaacaaagcacatcgaacgtatattgataaatgatgaccatccattttcaacattttaa

SEQ ID NO: 8773 - DNA, 810 bp, Staphylococcus aureus
  CDS (1)...(810)
gtgttaatgaagtattttgagaaacggtgggaatgtatgaaagcacataaaattttctggttaaacttagcagcaattattattatttcaattgtagtcagtggcgatatgtttttggcaatgaagtgggaacaaattcatttgaaagatggtcttaaaaaagtactaagtacgtatcctattaaaaacttagaaacgctttatgaaattgatggtcacgataatccccattatgaaaataatgatcaagacacatggtatatagaatcctcttattcagttgttggatcagatgagcttttaaaagaagaccgtatgttgttaaaggtagataagaacacacataaaataactggtgaatatgacacaactacaaacgataaaaaaaatgctactgactcgacatacaaaagttatccagtaaaagtagttaataataaaatcgttttcacaaaagacgtaaaagatcccgcgctgaaacaaaaaatcgaaaacaatcaatttttgattcaaagtggtgatttaacaagcattttaaatagcaatgatttgaaagtcacacatgatcctaccactgattattataatttatctggtaagttgtcgaacgataatccaaacgttaaacaattaaaacgtagatataatattcctaaaaacgcatcaacaaaggtggaattaaagggaatgagtgatttaaaaggcaataatcatcaagatcagaaactttatttttatttttcaagtcctggaaaagaccaaatcatttataaagaaagccttacttataataaaataagtgaacattaa

SEQ ID NO: 8774 - DNA, 996 bp, Staphylococcus aureus; identical to SEQ ID NO: 4857
  CDS (1)...(996)

SEQ ID NO: 8775 - DNA, 798 bp, Staphylococcus aureus
  CDS (1)...(798)
atgaatcgtttgcatggacaacaagttaaaattggttacggggataacacgattataaataaattagatgttgaaataccagatggcaaagtgacgtcaatcattggtcctaacggctgcgggaaatctactttgctaaaggcattgtcacgtttattggcagttaaagaaggcgaagtatttttagatggtgaaaatattcatacacaatctacgaaagagattgcaaaaaaaatagccattttacctcaatcacctgaagtagcagatggcttaactgttggggaattagtttcatatggtcgttttccacatcaaaaaggatttggtagattaactgctgaggataagaaagaaattgattgggcaatggaagttacaggaactgatacattccgacaccgttcaatcaatgatttaagtggtggtcaaagacaacgtgtttggattgcaatggcattagcacaaagaactgatattatctttttagacgaaccaacaacatatttagatatctgtcatcaattagaaatactagaattagttcagaagctaaatcaggaacaaggttgtacaattgtcatggttcttcatgatatcaaccaagcgattcgtttctcagatcatcttattgcgatgaaagaaggggatatcatcgctacaggttcaacagaagacgtattaacacaggaaatattagaaaaagtttttaatattgatgttgttttaagtaaagatcctaaaactggaaaacctttactggtaacttatgacttatgtcgcagagcttattcttaa

SEQ ID NO: 8776 - DNA, 816 bp, Staphylococcus aureus
  CDS (1)...(816)
gtgaataaggaaggtctacaaatgaacgtttcggtaaacattaaaaatgtaacaaaagaatatcgtatttatcgtacaaataaagaacgtatgaaagatgcgctcattcccaaacataaaaacaaaacatttttcgctttagatgacattagtttaaaagcatatgaaggtgacgtcatagggcttgttggcatcaatggttccggcaaatcaacgttgagcaatatcattggcggttctttgtcgcctactgttggcaaagtggatcgtaatggtgaagtcagcgttatcgcaattagtgctggcttgagtggacaacttacagggattgaaaatatcgaatttaaaatgttatgtatgggctttaagcgaaaagaaattaaagcgatgacacctaagattattgaatttagtgaacttggtgagtttatttatcaaccagttaaaaagtattcaagtggtatgcgtgcaaaacttggtttttcaattaatatcacagttaatccagatatcttagtcattgacgaagctttatctgtaggtgaccaaacttttgcacaaaaatgtttagataaaatttacgagtttaaagagcaaaacaaaaccatctttttcgttagtcataacttaggacaagtgagacaattttgtactaagattgcttggattgaaggcggaaagttaaaagattacggtgaacttgatgatgtattacctaaatatgaagctttccttaacgattttaaaaagaaatccaaagccgaacaaaaagaatttagaaacaaactcgatgagtcccgcttcgttattaaataa

SEQ ID NO: 8777 - DNA, 399 bp, Staphylococcus aureus; identical to SEQ ID NO: 8205
  CDS (1)...(399)

SEQ ID NO: 8778 - DNA, 1014 bp, Staphylococcus aureus
  CDS (1)...(1014)
gtgaaagacttattgcaagcacagcaaaagcttataccggatctcatagataaaatgtataaacgtttttctattcttactactatctcaaaaaatcagcctgtcggacgtcgaagtttaagcgaacatatggatatgactgaacgtgtactgcgttctgaaacagatatgcttaagaaacaagatttgataaaagttaagcctaccggaatggaaattacagctgaaggtgagcaactgatttcgcaattgaaaggttactttgatatctatgcagatgataatcgtctgtcagaaggtattaagaataaatttcaaattaaggaagttcatgttgttcctggtgatgctgataatagtcaatctgttaaaacagaattaggtagacaagcaggtcaattacttgaaggcatattacaagaagacgcgatagttgctgtaactggcggatccacgatggcatgtgttagtgaagcaattcatttattaccatataatgtattcttcgtaccagccagaggtggactaggcgaaaatgttgtctttcaggcaaacacaattgcagccagtatggcacaacaagctggcggttattatacgacgatgtatgtacctgataatgtcagtgaaacaacatataatacattgttgttagagccatcagtcataaacactttagacaaaattaaacaagcaaacgttatattacacggcattggtgatgcgctgaagatggcgcatcgacgtcaatcacctgaaaaggtcattgaacaacttcaacatcatcaagctgtcggagaggcatttggttattattttgatacacaaggtcaaattgtccataaggttaaaacaattggacttcaattagaagaccttgaatcaaaagactttatttttgcagttgcaggaggcaaatcgaaaggtgaagcaattaaagcatacttgacgattgcacccaagaatacagtgttaatcactgatgaagccgcagcaaagataatacttgaataa

SEQ ID NO: 8779 - DNA, 945 bp, Staphylococcus aureus
  CDS (1)...(945)
atgagctttgcatcagaaatgaaaaatgaattaactagaatagacgtcgatgaaatgaatgcaaaagcagagctcagtgcactgattcgaatgaatggtgcacttagtctttcaaatcaacaatttgttataaatgttcaaacggaaaatgcaacaacggcaagacgtatttattcgttgattaaacgtgtctttaatgtggaagttgaaatattagtccgtaaaaaaatgaaacttaaaaaaaataatatttatatttgtcgtacaaagatgaaagcgaaagaaattcttgatgaattaggaattttaaaagacggcatttttacgcatgaaattgatcattcaatgattcaagatgacgaaatgagacgcagttacttgagaggagcttttctggcaggtggctcagtgaataaccctgaaacatcttcgtaccatttggaaattttttctcaaaatgagagtcatgcagaaggcttaacgaaactaatgaatagttatgagttgaatgccaaacatttagagcgaaaaaaaggaagtattacgtatttaaaagaagcggaaaagatttcggattttcttagtttgataggtggctatcaagcgttattaaaatttgaagacgtacgtattgtaagagatatgcgtaattctgttaaccgactcgttaattgtgaaacggccaatctaaataaaacagttagtgctgcgatgaaacaagttgagagcattaaattgattgataaagaaattggtattgaaaatttaccagacaggttgagagagattgctagaattcgagtagaacatcaagaaatttcgttgaaagagcttggagaaatggtatcaactggtccaatttcaaaatcaggtgtaaatcaccgattaagaaaactgaatgatttagccgataagattagaaatggtgaacaaatagaattataa

SEQ ID NO: 8780 - DNA, 909 bp, Staphylococcus aureus
  CDS (1)...(909)
atgataatgaaacaatacttaattactggtgggactggtatggttggatctcaattagttaatgaaattaaaaaatcagattcacatatcacgatattaacgcgacacgaccaaatttcaaatgataagaaaatttcatatgtcaactgggctaaatctgggtgggaacacaaagttcctcaaaatatcgatgtggtcatcaacttagcaggtgctacattgaataaacgatggacaccggaatataaacaaacgctaatgctaagtagaattcaatctacgcaagctttatatgaattgtttaaatcacgtaataaagcacctaaagctttatttaatgctagtgccactggttactatcctcctgatttatttatgagttacacagaagtttataaaactttaccttttgatttcttatcagatattgtgtatcaatgggaacgtttcgcacaacaatttgaacaattaggtacacgagttgtcatcggtcgtttcggtataattttatcgaatgaaggcggtgcgttacaaacaatgaaactaccatacgaatattacattggtggtaaattaggttctggtcaacaatggtattcatggattcatatcaatgatttaattcaagctattttatttttaataaataacgagtcagctagtggtccgtttaatttaactgcacctatacctgaacgtcaaaatttatttggctacactttagcaagagctatgcataagcctcatgaaacttgggcaccaagtcttgcaatgcgtctcatacttggtcaaatgtcaacagtagtattggatactcaaaaagtattacctaataaaattcaagcattgggattccaatttaaatatagtaatttaaaaatggcacttgaagatttaattaaagaataa

SEQ ID NO: 8781 - DNA, 459 bp, Staphylococcus aureus
  CDS (1)...(459)
atgatggacaataaagattataaaaagttttatttaattagagaagatgtcttgcctgaatccgtggttaaaacattgaagattaaagatgccttaaaaagtgatccgacattgtccatttatgatgccgttaaacagtttgatctatctagaagtgctttttataaatatagagaaacgatatttccagtagacgataaaatgcttgaccatcgagaatttacattaattttatatgtaactgatattgttggtatgttggcacgtgtactagatgttatatcaaagttagaactatctgtattaacgattcatcaaagtattccaatggaagaaaaagcaacaataacattatcactgaatgctaaatctaaagaaacttcagtagaagatgttattggcgctttgagaaatttagattatgtatcaaaagtagaattaattagtatgagtatgtaa

SEQ ID NO: 8782 - DNA, 300 bp, Staphylococcus aureus; identical to SEQ ID NO: 8542
  CDS (1)...(300)

SEQ ID NO: 8783 - DNA, 321 bp, Staphylococcus aureus
  CDS (1)...(321)
atgattactgttgatattacagttaatgatgaaggcaaagtaacagacgttattatggatggccatgctgaccatggtgaatatggtcatgatatcgtttgtgctggagcttcagctgtattgtttggtagtgttaatgcgattataggattgacatctgagagaccagatatcaattatgacgacaatggtggtcattttcatataagaagcgttgatacaaacaacgatgaagcgcaactaattcttcaaacaatgcttgtgtctttacaaactattgaagaagaatataatgagaatattagattaaattataagtga

SEQ ID NO: 8784 - DNA, 318 bp, Staphylococcus aureus; identical to SEQ ID NO: 8540
  CDS (1)...(318)

SEQ ID NO: 8785 - DNA, 1155 bp, Staphylococcus aureus
  CDS (1)...(1155)
gtgaggattttgaatatgcctgcagtaacatacgaacacattaaaacttgtaaacaatcaggtgcgcgtttaggtatcgtgcacacaccacacggttcatttgaaacacctatgtttatgccagttggtactaaagcaaccgttaaaacaatgagtccagaagagttaagacaaattgaagcaaaaatcattttgggcaacacatatcatttgtggttacaacccggaaatgatattatcaaacacgctgggggattacataaattcatgaattgggatggtccgattcttacagattcaggcggtttccaagtgtttagtttaagtaatttacgtaaaattacagaagaaggcgtggaatttagacatcatactaatgggtctaaattatttttgagtcctgagaaatcaatgcaaattcaaaatgatttaggatctgatattatgatggcatttgatgaatgtccaccgatgcctgctgaatatgattatgtaaaaaaatctattgaacgtacaacacgttgggcgaaaagatgtctagatgcacaccaaagacctgaagatcaagcattgttcggcattatacaaggtggcgaatatgaagatttaagagaacaaagtgcaaaggatttagtagaattagattttcctggttatgcaatcggcggtttgtcagttggtgaacctaaaccggttatgtataaaatggttgaacatacagagcagtttatgcctaaagataaaccaagatatttaatgggtgtaggatctccagatgcgttaatcgaatgtagtattcgcggcatggatatgtttgattgtgtcttaccgacacgtattgccagaaatggtacttgtatgacatcgcaaggtcgtttagttattaaaaatgcaaaatttgcagatgatttaagaccgttagatgagaattgtgactgttatacatgtcaaaactattcaagagcgtatatacgtcatttaatcaaggcagaggaaacttttggtattcgtcttactactattcataatttacattttctgctaaaattaatggaagatataagacaagccattcgagaagatcgtcttttagatttcaaagaagaattcttcgagcaatatggattaaatgttgagaacccaaaaaacttttaa

SEQ ID NO: 8786 - DNA, 1065 bp, Staphylococcus aureus
  CDS (1)...(1065)
atgaacattttgcaaagtcgaatgaggagagagaataacgtgaatattgaagaatttgactatgacttaccagaatcattaattgctcaaacgcctttaaaagatcgtgatcatagtcgtttattagtcatggatagagaaactggtgaaatgaaacatttacatttcaaagatatcattgagtattttagacctggtgatacattagtgcttaacgatacgcgagtaatgccagctagactttttggtttaaaagaagaaactggtgcaaaagttgaaatgttaatgttaactcaaattgaaggtaatgattgggaagtcttactgaaaccagctaagcgtattaaagttggtaataaattgaattttggtaatggcaaaattatagctgaatgcataaaagaaatggatcaaggtggacgcatcatgcgtttacattatgaaggtattttacaagaaagattagatgaattaggggaaatgccactgccaccatacatcaaagaacgtttagatgatccagatcgttatcaaacagtttacgctaaagaaagtggttcagcggcagcaccaacagcaggattacattttactgatgagttattaattgaaattaaaaataaaggtgttaatatcgcatttgttacattacatgttgggttaggtacgtttagaccggtgagcgtagacgatgtgaatgaccacgaaatgcatagtgaatattatcaaatgacacaagaaacagctgatttattaaatgatactaagtccaaaggacatcgcattatatcagttggtacaacttcaacacgtacacttgaaacaattcgacgcgatcatgataaatttgttgaaacgagtggctggactaatatatttatttatccaggatttgattttaaagcaattgatggccagattactaattttcatttaccaaaatcaacattagttatgctagtatcagcgtttagtagtcgtgaaaatgttctgaatgcttataaaacggcagtaaatttagaatatagattctttagttttggcgatgcaatgttaattatataa

SEQ ID NO: 8787 - DNA, 456 bp, Staphylococcus aureus; identical to SEQ ID NO: 8557
  CDS (1)...(456)

SEQ ID NO: 8788 - DNA, 1914 bp, Staphylococcus aureus; identical to SEQ ID NO: 4803
  CDS (1)...(1914)

SEQ ID NO: 8789 - DNA, 663 bp, Staphylococcus aureus
  CDS (1)...(663)
gtgacaatgaagaacgcatttaaattatttaaaatggatctgaagaaagtagctaagacgccagctgtgtggattatcttagcaggcttagctattttgccatcgttctacgcttggtttaacttatgggcaatgtgggatccatatggcaacacgggacacatcaaggtcgcagtcgttaatgaagataaaggcgacacaatcagagggaaaaaagttaatgtcggtaatacgatggttaatacactcaagaaaaataaaagttttgattggcagtttgtaagtagagagaaagctgatcatgagataaaaatgggtaaatattttgcaggtatttacatcccatctaagtttacacatgaaattacagggacactacgtaagcagcctcaaaaagcagatgtagaatttaaggtgaatcagaagattaacgctgttgcgtctaagctaacagatactggttcgtcagttgtcgttgaaaaagcgaatgaacaatttaataaaacagtaactcgagcattattagaagaagctaacaaagcaggtttaactattgaagaaaatgtgccgacaattaacaagataacaaatgcgggatattcagcagataaagctttacctaagattaatgactttgcgaatagaatatgtatatttgaataa

SEQ ID NO: 8790 - DNA, 2169 bp, Staphylococcus aureus
  CDS (1)...(2169)
atgccgaaaattgaaaaagcgttaaattttgcagctgatgacgtgccagcgcagttccctaaaattaatcaaggacttaacattgcgagtcaaggtattgatcaagctaatggacagttaaatgatgccaaaggcttcgtcacacaagttagaagtagagtcggtgattatcaagatgcaattcgacgcgcgcaagatttaaatcgaagaaaccagcaacagattcctcaaaatagcgcggcgaacaacgaaacatcaaatagtgcacctgcagctggtaatggtgtagcatcaacgccaccaagtgcaccaagtggcgatactgcaccaaataataatgttacgcaaaataccgcaccaaatagtaataatgcgcctgtatcgactacaccacaaagtacaagcgggaaaaaagatggtcaaagttttgtagatataacaacaacacaagtcagcacagctaacgagaacacacaaaacattacagataaagatgttaaatcaatggaagcggcattaacgggctctttattatcattatcaaataatttagatacccaagcgaaagccgcacaaaaagatagtcaggcattacgtaatatttcgtatgggattttagcatcggacaagccttctgattttagagagtctttagataatgttaagtccggtttagaatacacaacgcaatataatcaacaatttatcgatacattaaaagagattgagaagaatgaaaatgttgatttatcaaaagaaattgataaggtaaaagcagctaataatcgaattaatgaatcattaaggttagttaatcaattaagcaatgcattaaagaatggtagttcaggaactgctgaagctactaaattactagatcaactttcaaaactagattcatcattatcatcatttagagattatgttaaaaaagatcttaacagctctttagtatcaatatcacaacgtattatggatgaattgaacaaagggcaaactgcattatccaatgttcagtctaaattaaatacaattgatcaagtcattaacagtggacaagctattttaaaaaatggtaaaacacgtattgatcgcttacaaacagtattaccaagtattgaacaacaatacattagtgctgttaaaaatgctcaagcaaacttctcgaaagtgaaaagtgatgtagctaaagctgctaactttgtgcgcaatgacttaccacagttagaacagcgattaactaatgcgacagcaagtgtgaataaaaatttaccaacgttattaaatggttatgatcaagcggtaggattactaaataaaaatcagccacaagcgaaaaaggctttatcagatttagctgatttttctcaaaataaattgcctgatgttgaaaaagatttgaaaaaagcgaataaaattttcaagaaattagacaaagatgatgcagtcgacaaattaatcgacacacttaagaatgatttgaaaaagcaagcgggtattattgcaaatcctattaataagaagactgttgatgttttcccagttaaggattatggttcaggtatgacaccattctatactgcactgtcagtatgggtaggtgcactcttgatggtaagtttattaacggttgataataaacataagagtctagagtcagtcttaacgacaagacaagtgttcttaggtaaggcaggattctttataatgcttggtatgttgcaagcactcattgtatcggttggagatttgttaatcctaaaagcaggagttgagtcacctgtattatttgtacttataacgattttctgttcgattattttcaactcaatcgtatatacgtgcgtatcattacttggtaacccaggtaaagccattgcaatcgtattgcttgtattacaaattgcaggtggtgggggaacattcccaattcaaactacgccacaatttttccaaaacatttcgccatacttaccatttacgtatgcaattgattcattacgtgaaacagtaggcggtattgttccggaaatcctaattacaaaattaattatattaacgttatttggtataggattcttcgttgtaggtttaattttaaaacctgtaacagatccattgatgaagcgcgtatctgaaaaagttgaccaaagtaacgttacagaataa

SEQ ID NO: 8791 - DNA, 939 bp, Staphylococcus aureus
  CDS (1)...(939)
atggcattatttttacaacccgtttttaaagacagaatttggggcggtcatgcattaaaagcatttaactatgatatccctaatgaaacaactggtgaatgctgggcaatttctgcacatccaaatggtcctaatacaattatcaatggtccatacaaggatatgaccctagatcaactttggtcacaacatcgtgaattattcgataatgattcacgagatagtttccctctgctaactaaagtattagatgccaatgataaattatctgttcaagttcacccagatgatgactacgctttaaaacacgaaggcgaactaggtaaaacagaatgttggtatattttagatgcagccccaggtgctgaaattatatatggcgtacatgcacataataaacagacgttaatagacatgattgataatcatgaatttgacagtcttttcaaacgtatacctgttaagcccggtgacttttattatgttcctgctggcactgtccatgccattggttcgggtattttaattttagagacacaacaatcctccgatacgacataccgtatttatgactatgatagacgagatcaaaatggtcaattgcgtgatttgcacttagagcaaagtaaagatgtgattgaattaggcaatcatgaaccaaatactactcctataacaactcacatcgacacacacactgtaactcaatttgtagataatcaatattttgcagtatataaatgggatattcatggagatttaaaattcaataaaccacatgcttattgcttagttacaattatcgatggtactggtactttaacagtaaacgataagcactatgacatccaaaaaggttctagctttattttaactacggaagacgaggatattcactttgtcggtaatattagtgctatagtaagtcatcctggataa

SEQ ID NO: 8792 - DNA, 984 bp, Staphylococcus aureus
  CDS (1)...(984)
atggataaagaaactaatgacaacgaatatagacgtcaaagtgaacatcgcacttcggcgcctaagcgaaaaaagaagaagaaaattaggaaattacctatcattcttctgattgttgtaattttacttatcgcattagttgtatatattgtacatagttacaatagcggtgtagaatatgccaagaaacatgcgaaagatgttaaagtacatcaatttaatggaccagtaaaaaatgatggtaaaatttctattcttgtactcggtgcagataaagcacaaggtggacaatcaagaacagattctatcatggttgttcaatatgactttatcaataaaaagatgaaaatgatgtctgtcatgcgtgatatttatgcagatattccaggatatggaaaacacaaaattaattcagcatacgctttaggtggtccagagctacttagaaaaacacttgataaaaatttaggaattaatcctgaatattatgcagtagttgattttactggatttgagaaaatgattgatgaattaatgcctgaaggtgtaccaattaatgtcgaaaaagatatgtcgaaaaatattggtgtatctttgaaaaagggtaaccataggttgaatggtaaagaattacttggttatgcaagattccgtcacgaccctgaaggtgacttcggacgcgtgcgacgtcagcaacaagtgatgcaaacattgaaaaaagaaatggttaattttagaacagttgttaaattaccaaaagttgcaggtattttaagaggctatgtgaatacaaacattcctgattcagggattttccaaacaggtttgagttttggtatccgaggtgaaaaagatgttaagtcattgactgtgccaatcaagaactcatacgaagatgtcaatacaaatactgatggtagtgcattacagattaataaaaacacaaataaacaagctattaaagactttttagatgaagattaa

SEQ ID NO: 8793 - DNA, 1290 bp, Staphylococcus aureus
  CDS (1)...(1290)
gtggtcaataaagaacaatcattaccagctaacgtaacacaagtggttgtgccggacacattaagagtagctagtattctagcacacacattatatgattatccgagtcatcagttagtgacatttggtgtaacgggtacaaatggtaaaacttctattgcgacgatgattcatttaattcaaagaaagttacaaaaaaatagtgcatatttaggaactaatggtttccaaattaatgaaacaaagacaaaaggtgcaaatacgacaccagaaacagtttctttaactaagaaaattaaagaagcagttgatgcaggcgctgaatctatgacattagaagtatcaagccatggcttagtattaggacgactgcgaggcgttgaatttgacgttgcaatattttcaaatttaacacaagaccatttagattttcatggcacaatggaagcatacggacacgcgaagtctttattgtttagtcaattaggtgaagatttgtcgaaagaaaagtatgtcgtgttaaacaatgacgattcattttctgagtatttaagaacagtgacgccttatgaagtatttagttatggaattgatgaggaagcccaatttatggctaaaaatattcaagaatctttacaaggtgtcagctttgattttgtaacgccttttggaacttacccagtaaaatcgccttatgttggtaagtttaatatttctaatattatggcggcaatgattgcggtgtggagtaaaggtacatctttagaaacgattattaaagctgttgaaaatttagaacctgttgaagggcgattagaagttttagatccttcgttacctattgatttaattatcgattatgcacatacagctgatggtatgaacaaattaatcgatgcagtacagccttttgtaaagcaaaagttgatatttttagttggtatggcaggcgaacgtgatttaactaaaacgcctgaaatggggcgagttgcctgtcgtgcagattatgtcattttcacaccggataatccggcaaatgatgacccgaaaatgttaacggcagaattagccaaaggtgcaacacatcaaaactatattgaatttgatgatcgtgcagaagggataaaacatgcaattgacatagctgagcctggggatactgtcgttttagcatcaaaaggaagagaaccatatcaaatcatgccagggcatattaaggtgccacatcgagatgatttaattggccttgaagcagcttacaaaaagttcggtggtggccctgttgattaa

SEQ ID NO: 8794 - DNA, 771 bp, Staphylococcus aureus
  CDS (1)...(771)
atgttaaatcttgaaaacaaaacatatgtcatcatgggaatcgctaataagcgtagtattgcttttggtgtcgctaaagttttagatcaattaggtgctaaattagtatttacttaccgtaaagaacgtagccgtaaagagcttgaaaaattattagaacaattaaatcaaccagaagcgcacttatatcaaattgatgttcaaagcgatgaagaggttattaatggttttgagcaaattggtaaagatgttggcaatattgatggtgtatatcattcaatcgcatttgctaatatggaagacttacgcggacgcttttctgaaacttcacgtgaaggcttcttgttagctcaagacattagttcttactcattaacaattgtggctcatgaagctaaaaaattaatgccagaaggtggtagcattgttgcaacaacatatttaggtggcgaattcgcagttcaaaactataatgtgatgggtgttgctaaagcgagcttagaagcaaatgttaaatatttagcattagacttaggtccagataatattcgcgttaatgcaatttcagctggtccaatccgtacattaagtgcaaaaggtgtgggtggtttcaatacaattcttaaagaaatcgaagagcgtgcacctttaaaacgtaatgttgatcaagtagaagtaggtaaaactgcggcttacttattaagtgatttatcaagtggcgttacaggtgaaaatattcatgtagatagcggattccacgcaattaaataa

SEQ ID NO: 8795 - DNA, 789 bp, Staphylococcus aureus; identical to SEQ ID NO: 4805
  CDS (1)...(789)

SEQ ID NO: 8796 - DNA, 798 bp, Staphylococcus aureus; identical to SEQ ID NO: 4804
  CDS (1)...(798)

SEQ ID NO: 8797 - DNA, 591 bp, Staphylococcus aureus
  CDS (1)...(591)
gtgatcgaagagccagtggatgatgtgattaaacacggaccaaaaacgggtacaccagaaacaaaaacagtagagataccgtttgaaacaaaacgtgagtttaatccaaaattacaacctggtgaagagcgagtgaaacaagaaggacaaccaggaagtaagacaatcacaacaccaatcacagtgaacccattaacaggtgaaaaagttggcgagggtcaaccaacagaagagatcacaaaacaaccagtagataagattgtagagttcggtggagagaaaccaaaagatccaaaaggacctgaaaacccagagaagccgagcagaccaactcatccaagtggcccagtaaatcctaacaatccaggattatcgaaagacagagcaaaaccaaatggcccagttcattcaatggataaaaatgataaagttaaaaaatctaaaattgctaaagaatcagtagctaatcaagagaaaaaacgagcagaattaccaaaaacaggtttagaaagcacgcaaaaaggtttgatctttagtagtataattggaattgctggattaatgttattggctcgtagaagaaagaattaa

SEQ ID NO: 8798 - DNA, 1809 bp, Staphylococcus aureus
  CDS (1)...(1809)
atgcattttcatacacatctattatataatacttgtgaaaagtattgtcttggggctgtgtttttttacttttggggcgtatttctttataattcattacataaatgtaagggctttagttttcatgttttattaagtctaactgagattttgaaaggatgtttagcaacaatggataaagaattatggatagaacgagctaatgatagtttagttaaacatttttatgagcagcaatctgacattgaacagcgagaaggttttgaaagtaaattaacatttggtactgcgggtatacgcggaaaattcggtcttggtgaaggtcgacttaataagtttactattgaaaaattggcattaggtttagcgcgttatttaaatgcccaaacaaacagtccaacaatagtcattcattatgatattagacatctttcaactgaattcgcccaaataattgctaatgtattagcaaaccatcaaataacagtttatttacctgatacatataaaacgacaccggaattatcgttcgcggtgcgcaatcttaatactactgctggcattatgattacagcaagtcataatccgaaagactataacggcatcaaagtatatggttctgatggtgcgcaattatcgactgatgcatctgagcttgcaagtcgttatatcgaagaagttggcgatccattacagattgatatacctatttctaaacaaaatacatcttatatcaagccttttccgaaatctgtaactgatgactatatgaaacacattcaaaatatgattggctatattcctaaatctgatttacaagttgtgttcactagtttgcatggtacaagtgttccgattgtacctgagttattacaatctttgaatttcaatcaatttaatcttgtagaagcacaatgtaaacctgatccgaatttcagctcagttcaaagtgctaatcctgaagatcatcgcgcttttgatcaagcagtcgaacttgcaaataaaagtcatgcagacttattaatatcaactgaccctgatgcagatcgacttggtattgctgaacgtgatgcacacggtcatatcacatattttaatggcaaccaaattggtgcgctgttacttaattatcgtattcaacaaacgtctcaattacgtcaccgcttaatgattcaatctattgtaagtagtgagttaacaaagtcattagcacgctataataatgttgaatacaaagaggtgctgacgggctttaaatttattgctcaggaaataagacaactggatgatcatcaaaatatgattttcgcatttgaagagagttacggttttctatcagagccttttgtacgtgataaagatgccgtacaaattgtgccactcattataaaatacgcttctgagttaaaattatatggcaaaacattgaaagatgaattagaacagatttatcaaactgttggtagacatgaggatacattattctcgcatacgctagaaggatttgaagggaaaaagaaaattaatgcaataatgaccaaattccgttcaaatccaccgcaagagattcaaggactcaaagtgaaagcaattgaagattatttaactagcgaggtttatcatttggataaagatacaacgtcgcagattaattctcctaaatcaaatgttattcgtgtcttatttgacgaaggatttatcgctttacgtccttctggtactgaacctaaaattaaattatatgtgtcgttaaaatgtccgaattttgatgatgtagctcaaaaaattaatgcgatgatttttagctaa

SEQ ID NO: 8799 - DNA, 720 bp, Staphylococcus aureus
  CDS (1)...(720)
atggtacaacatttaacagctgaagaaattattcaatatataagtgatgctaaaaagtctacaccaataaaagtatatttaaatggtaattttgaaggcatcacatatccagaaagttttaaagtatttggttcagaacaatctaaagtaatcttttgtgaagcggatgattggaaacctttttacgaagcatatggtagtcaattcgaagatatagaaattgaaatggatcgtcgcaattctgctattccattaaaagacttaacaaatacgaatgcacgaattgaaccaggtgcgtttattagagaacaagccattattgaagatggtgctgtcgttatgatgggcgcaacaattaatattggcgcagtcgttggcgaaggtacaatgattgatatgaatgctactctcggtggtcgtgctacaactggtaaaaatgtacatgtaggggctggcgcagtattagcaggtgtgattgaaccccctagtgcttcaccggttataatcgaggatgatgtattaatcggtgcaaatgcagttattttagaaggtgtacgtgttggtaaaggtgctattgttgcagctggcgcgattgtgacacaagatgtaccagctggtgcagttgttgctggtacacctgcaaaagtgattaagcaagcttctgaagtacaagatactaaaaaagagattgtagcagcattaagaaaactgaatgactag

SEQ ID NO: 8800 - DNA, 2532 bp, Staphylococcus aureus
  CDS (1)...(2532)
atgggatttttatcaaaaattcttgatggcaataataaagaaattaaacagttaggtaaacttgctgataaagtaatcgctttagaagaaaaaacggcaattttaactgatgaagaaattcgtaataaaacgaaacaattccaaacagaattagctgacattgataatgtcaaaaagcaaaatgattatttagataaaattttaccagaagcatatgcacttgttagagaaggctctaaacgtgtattcaatatgacaccatataaagttcaaattatgggtggtattgcaattcataaaggtgatatcgctgagatgagaacaggtgaaggtaaaacattaacagcgacaatgccaacatacttaaatgcattagctggtagaggtgttcacgttattacagtcaatgaatacttatcaagtgttcaaagtgaagaaatggctgagttatataacttcttaggtttgactgtcggattaaacttaaacagtaagacgacagaagaaaaacgtgaagcatacgcacaagacattacttacagtactaataatgagctaggttttgattacttacgagataacatggtgaattattctgaagatagagtaatgcgtccattacattttgcaatcattgatgaggttgactcaattttaatcgacgaggcacgtacgccattaattatttctggtgaagctgaaaagtcaacgtcactttatacacaagcaaatgtttttgcgaaaatgttaaaacaggacgaagattataaatacgatgaaaaaacgaaagctgtacatttaacagaacaaggtgcggataaagctgaacgtatgttcaaagttgaaaacttatatgatgtacaaaatgttgatgttattagtcatatcaacacagctttacgtgcgcacgttacattacaacgtgacgtagactatatggttgttgatggcgaagtattaattgtcgatcaatttacaggacgtacaatgccaggccgtcgtttctcggaaggtttacaccaagctattgaagcgaaggaaggcgttcaaattcaaaatgaatctaaaactatggcgtctattacattccaaaactatttcagaatgtacaataaacttgcgggtatgacaggtacagctaaaactgaagaagaagaatttagaaatatttataacatgacagtaactcaaattccgacaaataaacctgtgcaacgtaacgataagtctgatttaatttacattagccaaaaaggtaaatttgatgcagtagtagaagatgttgttgaaaaacacaaggcagggcaaccagtgctattaggtactgttgcagttgagacttctgaatatatttcaaatttacttaaaaaacgtggtatccgtcatgatgtgttaaatgcgaaaaatcatgaacgtgaagctgaaattgttgcaggcgctggacaaaaaggtgccgttactattgccactaacatggctggtcgtggtacagatatcaaattaggtgaaggcgtagaggaattaggcggtttagcagtaataggtacagagcgacatgaatctcgtcgtattgatgaccagttacgtggtcgttctggacgtcaaggtgataaaggggatagtcgcttctatttatcattacaagatgaattaatgattcgttttggttctgaacgtttacagaaaatgatgagccgactaggtttagatgactctacaccaattgaatcaaaaatggtatcaagagctgtagaatcagcacaaaaacgtgtagaaggtaataacttcgacgcgcgtaaacgtatcttagaatacgatgaagtattacgtaaacaacgtgaaattatctataacgaaagaaatagtattattgatgaagaagacagctctcaagttgtagatgcaatgctacgttcaacgttacaacgtagtatcaattactatattaatacagcagatgacgagcctgaatatcaaccattcatcgactacattaatgacatcttcttacaagaaggtgacattacagaggatgatatcaaaggtaaagatgctgaagatattttcgaagtcgtttgggctaagattgaagcagcatatcaaagtcaaaaagatatcttagaagaacaaatgaatgagtttgagcgtatgattttacttcgttctattgatagccattggactgatcatatcgacacaatggatcaattacgtcaaggtattcacttacgttcttatgcacaacaaaatccattacgtgactatcaaaatgaaggtcatgaattatttgatatcatgatgcaaaatattgaagaagatacttgtaaattcattttaaaatctgtagtacaagttgaagataatattgaacgtgaaaaaacaacagagtttggtgaagcgaagcacgtttcagctgaagatggtaaagaaaaagtgaaaccgaaaccaatcgttaaaggcgatcaagttggtcgtaacgatgattgtccatgtggtagtggtaaaaaattcaaaaattgccatggaaaataa

SEQ ID NO: 8801 - DNA, 3009 bp, Staphylococcus aureus
  CDS (1)...(3009)
gtgaggtgcttacaaatgaacactatttacgaaccgtcaagtatttgtatgattagaacacctttattatcagttgaatttttcaatttatttttaaatactgaacaaattaaatatagcgacttacaattaaatgctcagatgaaagaatcaatcctaacaacaacatttaacttatattgtactttacaagaaataaattttgatggcgataacaagaaggttagagatgctaaagaaagtttattaaaatatttaattagaatgtcaacacgtccaactccatttggattattaagtggtattaatttggggcattttgtaaatgaaccaacacgtcttaaagttggaaatagtattcaaaaatatgtgaaagtcgatggcgaatggttgtataaactggttagttatattgagagtattgatgaatattatcaaaatttgaaagttatttggaatagtaaagcacatattatcaatgatcgaatatatttaaatgaacaaagtgctatttatttaaacaacaataaagatacatctttttccattaaaaatagcgaattactcgtattcatcaaaaccactgtgacgaataataatattactttttcaaatttagctgaaaagataaatcaagaatttgaaattaatgatattactaaagtgaaagtatatatccataatcttgtctcaaaggaaattatatattcaacaatcagaccaccgttatcatatagcgataatttaaattatattttaaataaactttctttacataatgatgattttgtgaaaaaaattagagaaatccagaaattgatattagcttatgaaaaaactgaaattggatttggcgaggaattatataaagacattattcatcatatgaaggcactattcaaatgtaaaaactatcttcaaattgataccaaaattgacatgattaacaattatttacatcaagatatagcaacaaatatatctgaagcagcgtacttattgtggcttttatcaagaaataatattggattcacagatttgaaagttcttcacaaccgttttattgaaaagtatggatttgaacaactcgtgaatattaaagatttgatttcagatataacaggtttcgggacaacaatttttcaagaagaagaaaccgatggaaataatattgtaatgcttaagcaaaaatttttacatgccttgagaaataacgatgagatagtcataaatgaaaaagatgtagagtcattgattaacgataatgaaatcaatcattatcatgcgccaatgagtgcagatgtttatgctgaactttatttaggacgtttttacaatcagtacaatgagctcattgttattagtcctttaacggcgtcttttaatgctggcgctacatttgggcgatttcatcatttaattgatactgaaactttagcaaaattagaacatgaaaaaggacattattatcagaagatgatatgtgatgacaatgtagaaatgatttctataaataacataccgaaatatccgagaaatcataatgtattaactaatcatgactcatacgaatattcattgaatttaggaagtagtaatagttattcaaagtatgagcttaccttagatgatatttatgttggtgctacctttaacaaattatatttatattctagccaactaaataaaagggtactatttgaatcaaacaatatgtataactttttaaaagaatgtaatttatatcgattgttacgagaaatttcaatggaatctgtgaaatgcattgaacctatgaatgatgtgagtattgattcatttagttattcaccacgaatcagatataaaaatgtcattcttaaaccagcatattggaaaattaacgagatggtattacctttacctaaaaatgaagaatgggatcaacaatttttgaaatatcaagaacaattcaatatacctaatatcgtgaatttagtttatggagataacaagcttctactaaatttatcattagctaatcatagatatttattgatgaaagaatataagaagcataaacgtgtacgtttagtagaatcatttttacctcaatcaaagaatgatcatgtgtatgaaattgttacaccaatttataaaaaatcatcttatcgaggacccgaaatcgaaattccaaaatataaaaatacagatattgaatatgacaaagactggtttgcattacatattcatatcgataagccatcgcaagatacatttatcatcgacaatttgtatccatttgtaaaacatcttaaagataagggagatatagatcaatattttttaatgcgttatatcaaacaaggtgacattttaaagttgaggttattcaggaatgacgaaaattacgcagaaatatacagcatcttgaagaattggttaccacatgttcgacaaacgacagaagtttcagattatgaatttgtatcatacgagccagaattttttagatatggtggaaagaacacgattaatgaaatagaagccttctttgaatatgacacgaatttagctgtcaatattattgaaaatgattttaagtttgatcgaccatatattgttgctatttcaataatgtatttatttgagatgttttcaatttctaatgaagagcgtatggaaattgttaataactatgtacctacatcatttaaaagtaaagatattagaccttttaaaaatgaacttgtaactatatgtaatcctgctaataattttgaatatatggctaaacactatagtggtatttatcgaattttaaaagatggcaaccaaattttgagcaaattaaatgaagggcttaaaaaaactttaactactaaaaggtcaaggattattggcagcttaattcatatgcgctgcaatcgaatatttggcattgataaggatcaagaaacatttgttttatctattgtaaaagaaattgttaaaactcaaaagcattggtgtggtgacaaaaatgattga

SEQ ID NO: 8802 - DNA, 1191 bp, Staphylococcus aureus
  CDS (1)...(1191)
atggctaaaaaaattgtttctgatttagatcttaaaggtaaaacagtcctagtacgtgctgattttaacgtacctttaaaagacggtgaaattactaatgacaaccgtatcgttcaagctttacctacaattcaatacatcatcgaacaaggtggtaaaatcgtactattttcacatttaggtaaagtgaaagaagaaagtgataaagcaaaattaactttacgtccagttgctgaagacttatctaagaaattagataaagaagttgttttcgtaccagaaacacgcggcgaaaaacttgaagctgctattaaagaccttaaagaaggcgacgtattattagttgaaaatacacgttatgaagatttagacggtaaaaaagaatctaaaaatgatccagaattaggtaaatactgggcatctttaggtgatgtgtttgtaaatgatgcttttggtactgcgcatcgtgagcatgcatctaatgttggtatttctacacatttagaaactgcagctggattcttaatggataaagaaattaagtttattggcggcgtagttaacgatccacataaaccagttgttgctattttaggtggagcaaaagtatctgacaaaattaatgtcatcaaaaacttagttaacatagctgataaaattatcatcggcggaggtatggcttatactttcttaaaagcgcaaggtaaagaaattggtatttcattattagaagaagataaaatcgacttcgcaaaagatttattagaaaaacatggtgataaaattgtattaccagtagacactaaagttgctaaagaattttctaatgatgccaaaatcactgtagtaccatctgattcaattccagcagaccaagaaggtatggatattggaccaaacactgtaaaattatttgcagatgaattagaaggtgcgcacactgttgtatggaatggacctatgggtgtattcgagttcagtaactttgcacaaggtacaattggtgtatgtaaagcaattgcaaaccttaaagatgcaattacgattatcggtggcggtgattcagctgcagcagcaatctctttaggttttgaaaatgacttcactcatatttcaactggtggcggcgcgtcattagagtacctagaaggtaaagaattgcctggtatcaaagcaatcaataataaataa

SEQ ID NO: 8803 - DNA, 861 bp, Staphylococcus aureus
  CDS (1)...(861)
gtggcatgtttgtttaacattgttacgggaaaacagtcacaagatgacatcgtgtttcatcacttttcaaaaatatttacaaaacaaggagtgtctttaatgagaacaccaattatagctggtaactggaaaatgaacaaaacagtacaagaagcaaaagacttcgtcaatgcattaccaacattaccagattcaaaagaagtagaatcagtaatttgtgcaccagcaattcaattagatgcattaactactgcagttaaagaaggaaaagcacaaggtttagaaatcggtgctcaaaatacgtatttcgaagataatggtgcgttcacaggtgaaacgtctccagttgcattagcagatttaggcgttaaatacgttgttatcggtcattctgaacgtcgtgaattattccacgaaacagatgaagaaattaacaaaaaagcgcacgctattttcaaacatggaatgactccaattatatgtgttggtgaaacagacgaagagcgtgaaagtggtaaagctaacgatgttgtaggtgagcaagttaagaaagctgttgcaggtttatctgaagatcaacttaaatcagttgtaattgcttatgaaccaatctgggcaatcggaactggtaaatcatcaacatctgaagatgcaaatgaaatgtgtgcatttgtacgtcaaactattgctgacttatcaagcaaagaagtatcagaagcaactcgtattcaatatggtggtagtgttaaacctaacaacattaaagaatacatggcacaaactgatattgatggggcattagtaggtggcgcatcacttaaagttgaagatttcgtacaattgttagaaggtgcaaaataa

SEQ ID NO: 8804 - DNA, 1305 bp, Staphylococcus aureus
  CDS (1)...(1305)
atgccaattattacagatgtttacgctcgcgaagtcttagactctcgtggtaacccaactgttgaagtagaagtattaactgaaagtggcgcatttggtcgtgcattagtaccatcaggtgcttcaactggtgaacacgaagctgttgaattacgtgatggagacaaatcacgttatttaggtaaaggtgttactaaagcagttgaaaacgttaatgaaatcatcgcaccagaaattattgaaggtgaattttcagtattagatcaagtatctattgataaaatgatgatcgcattagacggtactccaaacaaaggtaaattaggtgcaaatgctattttaggtgtatctatcgcagtagcacgtgcagcagctgacttattaggtcaaccactttacaaatatttaggtggatttaatggtaagcagttaccagtaccaatgatgaacatcgttaatggtggttctcactcagatgctccaattgcattccaagaattcatgattttacctgtaggtgctacaacgttcaaagaatcattacgttggggtactgaaattttccacaacttaaaatcaattttaagcaaacgtggtttagaaactgcagtaggtgacgaaggtggtttcgctcctaaatttgaaggtactgaagatgctgttgaaacaattatccaagcaatcgaagcagctggttacaaaccaggtgaagaagtattcttaggatttgactgtgcatcatcagaattctatgaaaatggtgtatatgactacagtaagttcgaaggcgaacatggtgcaaaacgtacagctgcagaacaagttgactacttagaacaattagtagacaaatatcctatcattacaattgaagacggtatggacgaaaacgactgggatggttggaaacaacttacagaacgtatcggtgaccgtgtacaattagtaggtgacgatttattcgtaacaaacactgaaattttagcaaaaggtattgaaaacggaattggtaactcaatcttaattaaagttaaccaaatcggtacattaactgaaacatttgatgcaatcgaaatggctcaaaaagctggttacacagcagtagtttctcaccgttcaggtgaaacagaagatacaacaattgctgatattgctgttgctacaaacgctggtcaaattaaaactggttcattatcacgtactgaccgtattgctaaatacaatcaattattacgtatcgaagatgaattatttgaaactgctaaatatgacggtatcaaatcattctataacttagataaataa

SEQ ID NO: 8805 - DNA, 2790 bp, Staphylococcus aureus
  CDS (1)...(2790)
atggcataccaaagtgaatacgcattagaaaatgaaatgatgaatcaacttgaacaattgggttacgaaagagtaacgatacgtgataataagcaattgcttgataattttagaacgattttaaatgagcgtcatgcggacaaattagaaggcaatcccttaacagataaagaatttcaacgtctgttaacgatgattgatggaaaaagtattttcgagagtgcccgtattttacgtgataaattaccacttagacgtgatgatgagtctgagatttatttgtcgtttttagatacgaaaagttggtgtaaaaataagtttcaagtgacgaatcaagtatctgtcgaggatacatataaagcacgttatgatgtaacgatattaatcaacggactaccccttgtccaagttgaattgaaacgtcgaggtattgatattaatgaggcgtttaaccaagtaaaacgttaccgcaaacaaaattacacaggcttattccgctacatacaaatgtttatcattagtaatggtgttgaaacgcgatacttttctaataatgatagcgaactattgaagagtcacatgttttattggagtgataaacagaataaccgtatcaatacattgcaatcgtttgctgagtcatttatgagaccttgtcaattagctaagatgatatcgcgctatatgattattaatgaaacagatagaatactgatggcaatgcgtccgtatcaagtgtatgcggtagaagcacttattcaacaagcgactgagacagggaataatggatatgtatggcatacaactggaagtggtaagacgttgacttcttttaaagcgagtcagattttatcacagcaagatgacattaagaaagttatctttttggttgaccgtaaagacttggatagtcaaacagaagaggaatttaataaatttgctaagggtgctgtagacaaaacttttaatacctcgcaactggtacgccaactaaatgataaaagtttgccacttattgtaacgacgattcaaaaaatggctaaagcgattcaagggaatgcccctttattagaacagtataaaacgaataaagttgtatttattattgatgagtgtcatcgcagtcaatttggtgacatgcatcgtctagttaaacaacatttcaaaaatgcccaatactttggattcactggtacgccacgttttccagaaaatagtagtcaagatggtagaacaactgcagatattttcggtagatgcttacatacgtatttaattagagatgccattcatgatggtaatgtacttggtttctcagttgactatattaatacttttaaaaataaagctttaaaagcagaagataacagcatggttgaagcaattgatacggaagaagtatggttagcggataaacgtgtggaattagtaacacgacatatcatcaataatcatgataaatatacacgtaatcgtcaatattcaagtatatttacagtccaaagtattcacgcgcttattaaatattatgagacatttaagcgacttaacaaaaagttggaacaaccgttaacgatagctggtatatttacgtttaaacctaatgaagatgatcgtgatggtgaagtgccatatcattcacgtgaaaaattagagataatgattagtgattataataaaaagttcgagacgaatttttcaacagacacaactaatgagtattttaatcatatttcaaaaaacgttaaaaagggcgttaaagatagtaaaattgatatcttaatcgttgttaatatgttcttaactggttttgatagtaaagtactgaacactttatatgttgataagaatttaatgtatcatgatttaattcaagcgtattcacgtacaaatagggttgaaaaagaatcaaagccatttggtaaaattgtaaactatcgtgacttgaaaaaagagacagacgatgcactgagagtattctcacaaacaaatgatacggatacaattttaatgcgcagttatgaagagtataaaaaagaatttatggacgcttatcgtgagcttaaaatgattgtgccgacaccacacatggttgatgacattcaagatgaagaagagctaaagcgctttgttgaagcttatcgtttattagctaaaataatattacgtttaaaagcatttgacgagtttgagtttacaattgatgaaattggaatggatgaacaagagaatgaagactataaaagtaaatatttagctgtgtacgatcaagtaaaaagagcgacggctgagaaaaataaagtatccattttaaatgatattgatttcgaaatagaaatgatgcgtaatgatacgattaatgtgaattatattatgaatatattgagacaaattgatcttgaagacaaagcggaacaacgtcgtaaccaagaacaaattagacgcattttagatcatgcagatgatccgacattgaggttaaaacgagatctaattagagaattcatcgacaatgttgtaccttctttaaataaggatgatgatatcgatcaagaatatgttaatttcgaaagtattaaaaaagaagcggagttcaaaggatttgctggagagagatctatcgatgaacaagccctaaaaacaatttcaaatgactaccagtatagtggtgttgtaaacccacatcaccttaaaaaaatgattggtgatttgccattgaaagaaaagcgtaaagcaagaaaagccattgaatctttcgtggcagaaacaactgaaaaatacggtgtgtaa

SEQ ID NO: 8806 - DNA, 900 bp, Staphylococcus aureus
  CDS (1)...(900)
gtgatggaaaatagtacgaccgaagcgcgtaatgaagcgacgatgcatcttgatgaaatgactgtggaagaggctttaattacgatgaataaagaagatcagcaagtcccgttagcagttcgaaaggcaataccacaattgacaaaagtaattaaaaaaacaattgcacagtataaaaagggtggacgattgatttatatcggtgcaggtacaagtggaaggttgggtgtcttagatgcagcggagtgtgtacctacattcaatactgaccctcatgaaattataggtattattgctggtggacaacatgctatgacgatggctgtagaaggtgcggaagatcacaaaaaattagcggaagaagatttgaaaaatatagatttaacatcaaaagatgtcgttataggaattgccgcgagtggcaaaacgccatatgttataggcggtttaacatttgctaacacaatcggtgctacaacagtatctatttcatgcaatgaacatgcagttataagtgaaattgcgcagtatccagtagaagttaaagttggtccagaagtattaactggttcaacacgtttaaagtctggtacagcacaaaagttaattttaaatatgatttcaaccatcacaatggttggtgtcggaaaagtttacgataacctcatgattgatgttaaagcaaccaatcaaaaactgatcgaccgttcagtgcgtattattcaagaaatatgtgctatcacatatgatgaagcaatggcgttatatcaggtatctgagcatgatgtgaaagttgcgacagttatgggtatgtgtggcatttctaaggaagaagcaacaagacggttattaaacaatggtgacattgttaaacgagcaatcagagatagacaaccttag

SEQ ID NO: 8807 - DNA, 558 bp, Staphylococcus aureus
  CDS (1)...(558)
atgattaattttaataaaaccgctttagtgttaatcgacctgcaagaaggtattcttaaaatggattatgccccatatacagctgaaaatgtcgttcaaaacgctaataaattaatagatgtttttagaaaaaacaatggctttatcgcttttgttcgcgtgaatttctatgatggtaaagatgtattgcaaccaaatgcaatgatctcattaccaccaaaagaaggcgacgactacagtcgtttccatcatttattagacaagagagatgacgattttgtcatagacaaacgacattttagtgcatttgtaggaacagatttggacttacaattgcgacgtcgaggaattgatacgattgttcttggtggtgtcgcaacgcatattggcgtagatacgacagcgcgagatgcctatcaattaaactacaatcagttttttgttacagatatgatgagtgcacaaaacgaaacgctacatcaatttccaatagataatgtattcccattgatgggacaaacaataactacaaacgactttctaaatatattgaactaa

SEQ ID NO: 8808 - DNA, 1122 bp, Staphylococcus aureus
  CDS (1)...(1122)
atggcagaattacaaagaggtttagaaggggttatcgcagcggagactaaaataagttcaattattgaaagtcaattgacttatgccggctatgatattgatgatctagctgaaaatgcgcaatttgaagaagttattttcctattatggaactatagattgccaaacgaagaagagcttgctcatctaaaagggaaattaaatcaatacatgacattaaatcctcgtgtgtatacacattttgaggagtatgttacagatcacgtgcatccaatgacagcattacgtacgtcattatcatatattgcacatttcgatcctgatgctgaaaatgaatcagatgaaaatcgttatgaaagagcaatgcgtatacaggctaaagtagcatcattagttacagcgtttgctcgagtaagacaagataaagaaccacttaagcctaatcctgacttaagttatgcggcaaacttcctatatatgttacgtggggaattaccaacagatatagaagtagaagccttcaataaagcacttattttacacgctgatcatgagttgaacgcatctgcatttacggcacgttgtgcggtatcatcattgtcagatatgtactcaggtattgtagcagccgtaggttctctgaaagggccattacatggtggtgcaaacgaacaagttatgacgatgttatctgagattgggtcaattgaaaatgttgatgcttacttagatgaaaaatttgctaataaagataaagtaatgggcttcggtcatcgtgtatataaagatggtgatcctagagcgaaatatttaagagaaatgagccgtcaaattacgaaagacgctggtcgtgaagaattatttgaaatgtcagtgaaaatggaaaaacgtatggcagaagaaaaaggattaattcctaatgttgatttttatagtgcgagtgtttatcactgtatggaaatacctcatgacttattcacgccaatctttgctgtaagtcgttctgcaggatggattgctcatattttagaacaatataaagataatagaattatgcgtcctagagcgaaatatattggcgaaacgaatcgtaagtatatcccgcttgaagaaagaaaataa

SEQ ID NO: 8809 - DNA, 969 bp, Staphylococcus aureus
  CDS (1)...(969)
atgaagaaaattgcagttttaactagtggtggagattcacctggaatgaatgctgccgtaagagcagttgttcgtacagcaatttacaatgaaattgaagtttatggtgtgtatcatggttaccaaggattgttaaatgatgatattcataaacttgaattaggatcagttggggatacgattcagcgtggaggtacattcttgtattcagcaagatgtccagagtttaaggagcaagaagtacgtaaagttgcaatcgaaaacttacgtaaaagagggattgagggccttgtagttattggtggtgacggtagttatcgcggtgcacaacgcatcagtgaggaatgtaaagaaattcaaactatcggtattcctggtacgattgacaatgatatcaatggtactgattttacaattggatttgacacagcattaaatacgattattggcttagtcgacaaaattagagatactgcgtcaagtcacgcacgaacatttatcattgaagcaatgggccgtgattgtggagatctagcattatgggctggattatcagttggtgctgagacaattgtagttccagaagtgaaaacagatattaaagaaatagctgataaaattgaacaaggtattaaacgtggtaagaaacactcaatcgttcttgtagcagaaggttgtatgactgcgcaagattgtcaaaaagaattatcacaatacatcaatgttgataatagagtgtctgtgttaggtcacgttcaacgtggtggtagcccaacaggtgcggatagagttttagcatcacgtttaggtggatatgcggtagacttattaatgcaaggtgaaacagctaagggtgttggaattaagaacaataaaattgtagcaacatcttttgatgaaatttttgatggtaaagatcataaatttgattatagtctatatgaacttgctaacaagttatctatataa

SEQ ID NO: 8810 - DNA, 945 bp, Staphylococcus aureus
  CDS (1)...(945)
atgttagattttgaaaaaccactttttgaaattcgaaataaaattgaatctttaaaagaatctcaagataaaaatgatgtggatttacaagaagaaattgacatgcttgaagcgtcattggaacgagaaactaaaaaaatatatacaaatctaaaaccatgggatcgtgtgcaaattgcgcgtttgcaagaaagacctacgaccctagattatattccatatatctttgattcgtttatggaactacatggtgatcgtaattttagagatgatccagcaatgattggtggtattggctttttaaatggtcgtgctgttacagttattggacaacaacgtggaaaagatacaaaagataatatttatcgaaattttggtatggcgcatccagaaggttatcgaaaagcattacgtttaatgaaacaagctgaaaaattcaatcgtcctatctttacatttatagatacaaaaggtgcatatcctggtaaagctgctgaagaacgtggacaaagtgaatctatcgcaacaaatttgattgagatggcttcattaaaagtaccagttattgcgattgtcattggtgaaggtggcagtggaggtgctctaggtattggtattgccaataaagtattgatgttagagaatagtacttactctgttatatctcctgaaggtgcagcggcattattatggaaagacagtaatttggctaaaattgcagctgaaacaatgaaaattactgcccatgatattaagcaattaggtattatagatgatgtcatttctgaaccacttggcggtgcacataaagatattgaacagcaagctttagctattaaatcagcgtttgttgcacagttagattcacttgagtcattatcacgtgatgaaattgctaatgatcgctttgaaaaattcagaaatatcggttcttatatagaataa

SEQ ID NO: 8811 - DNA, 1248 bp, Staphylococcus aureus
  CDS (1)...(1248)
atggaacatgtcttctatcatagacatgatgttagtaatgaagaaagctatcaagaattactagattttagtaatgaattagatagccaatttgaattaaaaggtaatcgactattctatttagcaatggcaccacaattctttggcgttatttctgattatctaaaatcttctggtcttactgatacaaaaggatttaaacgccttgttatcgaaaaaccattcggtagtgatttaaaatcagccgaagcattaaacaatcaaattcgtaaatcatttaaagaagaagaaatttatcgtattgaccactatttaggaaaagacatggttcaaaatatcgaggtattacgttttgcgaatgcgatgtttgaaccattatggaataacaaatatatttcaaacatccaagttacatcttctgaaatactaggtgttgaagatcgtggtggttattatgaatcaagtggcgcgctaaaagatatggtgcaaaaccacatgttacaaatggttgcattattagctatggaagcacctattagtttaaatagtgaagatatccgtgctgagaaagtaaaagtacttaaatcactgcgtcatttccaatctgaagatgttaaaaagaactttgttcgtggtcaatatggcgaaggctatatcgatggtaaacaagttaaagcataccgtgatgaagatcgcgttgcagatgactctaacacacctacctttgtttcaggtaaattaacaattgataactttagatgggctggtgtaccattctatattcgtactggtaaacgtatgaaatctaaaacaattcaagttgtcgttgaatttaaagaagtaccaatgaacttatactatgaaactgataaactgttagattcaaacctattagtaatcaatatccaacctaatgaaggtgtatctttacatctaaatgctaagaaaaatacacaaggtatcgaaacagaacctgtccaattgtcttactcaatgagcgctcaagataaaatgaatactgtagatgcatatgaaaatctattatttgattgtcttaaaggtgatgccactaacttcacgcactgggaagaattaaaatcaacatggaaatttgttgatgcaattcaagatgaatggaatatggttgatccagaattccctaactatgaatcaggtactaatggtccattagaaagtgatttactacttgctcgtgatggtaaccattggtgggacgatattcaataa

SEQ ID NO: 8812 - DNA, 738 bp, Staphylococcus aureus
  CDS (1)...(738)
atgactaaagaattagaacgattacaaaaacgtatagctaatagcggttatacttcaagacgtaaggcagaaactttaatttctgaaggaaaagtgaaagtgaatggtacgactgtcactgaattaggaacaaaagtgaagccatcagatacgattgaagttgaaggtattaaaatagaactagaagacaaaatttacattttattccataaaccaactcaagtgataacaagtgtatctgatgatagaggacgtacagtggttacagattactttaaagatatagaagcacgtatttatcctgttggtcgtttagactatgatacttctggattgttattactcacaaatgatggtgaatttactaatttaatgacacatccaagatatcaaattaagaaaaaatatgttgcgaaattaaaaggttatttaatgagagaagaagtgaaagcgctagaaaaaggtattgaattagaagatggtatgacgcaaccggctgaagtgaaagttaagaaacaagataaagataaaaacacaacattggttgaaattacaattacagaaggtcgtaatcgccaagtcagaagaatgttcgaacattttggtcatcaagtgacgaaactgtctcgtattgaatatgggcctttaaatgttgtcggtttgaatgctggtgaaggacgtgtattgacgcctcatgaagtaaaagtgatgcgtcatttagcagaacatgggaaataa

SEQ ID NO: 8813 - DNA, 942 bp, Staphylococcus aureus
  CDS (1)...(942)
atgagaaatatagagaatctaaatcccggagattcagttgatcactttttcttagtgcataaagctacacagggtgtaacagcacaaggtaaagattatatgacattacatttgcaagataaaagtggtgaaattgaagcgaaattttggacggctacaaaaaatgatatggcaacaatcaagcctgaagaaattgtacatgttaaaggtgacatcataaactatcgcggaaataaacagatgaaagtcaaccaaattagactagcgacaactgaagatcaattaaaaacagaacaatttgtagatggtgcacctttatcaccggcagaaatacaagaagagatttctcattatttgctagatattgaaaatgctaatttacaacgtatcacacgtcatttattgaaaaaatatcaagaacgattttacacatatccagctgctagttctcatcatcataactttgcgagtggcttaagctatcatgtattaacgatgttacgtattgcaaaatcaatttgtgacatttatccattgttaaacaaaagtttgttatatagtggtattattttgcatgatattggtaaagttagagaattgagtggtcctgttgcgacgtcgtatacagtcgaaggtaacttattaggacacatctcgattgcgagtgatgaagtagttgaagcagctcgtgaattgaacattgaaggagaagaaatcatgttgttaagacatatgattttatctcatcatggtaagttagagtatggttctccaaaactgccatacttaaaagaagcagaaattttatgctatatcgataatatcgatgctagaatgaatatgtttgaaaaggcatataaaaaaactgacaagggtcagtttacagataaaatatttggtcttgaaaatcgtagattctacaatcctgaatcactcgattaa

SEQ ID NO: 8814 - DNA, 1197 bp, Staphylococcus aureus
  CDS (1)...(1197)
atggttaaatttattcattgttcggatttacatttagatagtcctttcaaatctaagagtcatataagccctaaaatttttgaggatgttcaaaaaagtgcttatgaaagttttaaaaatattgtagatattgcattacaacaagatgttgattttgtaattatcgcgggtgatttatttgatagtgaaaacagaacattacgtgctgaaattttcttaaaacagcaatttgaacgtttacaaaatgaacaaatctttgtttatgtttgtcatggtaatcacgatcctttatcatcaaagatttcatcaaactggccagataatgtttctgtattttcaaataaagttgagacgtatgaagcaattactaaatctggtgaaacaatttatattcacggatttagttatgaaaatagagcaagttatgagaacaagattgatgaatatccatcaagtcaaggccaaaaaggcatacatattggtgtcttgcatggtacgtatagtaaatcttcagttaacgaaagatataccgagttcattttagaagatttaaacagtaaattgtatcattattgggctttaggtcatatacatgaacgtcaacaattaagtgatatgcctgtaattaactattcaggtaatattcaaggtagacattttaatgagcaaggtgaaaaaggttgcttattaatcgagggtgaccacttaaaattaaagactaaattttatcctacacagtatattagatttgaagaagcaactattgaaacggataagacatctaagcaaggtttatacgaggtcattcaaaattttaaagaacaagtgagagaagaaggaaaagccttttatcgtttaacgcttgttattaatagtgagacattaatttcacctcaagatttattacaagttgaagaaatgattacagattatgaagaaaacgaaaatcaatttgtatatattgatgagttaaaaatacaatatgcacaaaatgatgagtcacctttagttaatgaattttcagcggaattattagtcgatcaaactgtttttgataaagcgatgtcagatttatatttaaatccaagggcatctaagttcctagacgattatggaacattcgaccatacagcattagttaatcgtgctgaagaaatattaaaagctgaaatgagaggtgaacaaaatgataattaa

SEQ ID NO: 8815 - DNA, 6561 bp, Staphylococcus aureus
  CDS (1)...(6561)
atgaatttgttaaagaaaaataaatatagtattaggaagtataaagtaggcatattctctactttaatcggaacagttttattactttcaaacccaaatggtgcacaagccttaactacggataataatgtacaaagcgatactaatcaagcaacacctgtaaattcacaagataaagatgttgctaataatagaggtttagcgaatagtgcgcagaatacacctaatcaatctgcaacaaccaatcaagcaacgaatcaagcattggttaatcataataatggtagtatagtaaatcaagctacgccaacatcagtgcaatcaagtacgccttcagcacaaaacaataatcatacagatggcaatacaacagcaactgagacagtgtcaaacgctaataataatgatgtagtgtcgaataataccgcattaaatgtaccaactaaaacaaatgaaaatggttcaggaggacatctaactttaaaggaaattcaagaagatgttcgtcattcttcaaataaaccagagctagttgcaattgctgaaccagcatctaatagaccgaaaaagagaagtagacgtgcggcaccggcagatcctaatgcaactccagcagatccagcggctgcagcggtaggaaacggtggtgcaccagttgcaattacagcgccatatacgccaacaactgatcctaatgccaataatgcaggacaaaatgcacctaacgaagtgctgtcatttgatgacaatggtattagacaaagtaccaaccgttctgtgccaacagtaaacgttgttaataacttgccgggcttcacactaatcaatggtggcaaagtaggggtgtttagtcatgcaatggtaagaacgagcatgtttgattcaggagataataagaactatcaagcacaaggaaatgtaattgcattaggtcgtatacatggaactgatacgaatgaccatggcgattttaatggtatcgagaaagcattaacagtaaatccgaattctgaattaatctttgaatttaatacaatgactacgaaaaacggtcaaggcgcaacaaatgttattatcaaaaatgctgatactaatgatacgattgctgaaaagactgttgaaggcggtccaactttgcgtttatttaaagtacctgataatgtgagaaatctcaaaattcaatttgtacctaaaaatgacgcaataacagatgcgcgtggcatttatcaactaaaagatggttacaaatactatagctttgttgactctatcggacttcattctgggtcacatgtttttgttgaaagacgaacaatggatccaacagcaacaaataataaagagtttactgtaacaacatcattaaagaataatggtaattctggtgcttctctagatacaaatgactttgtatatcaagttcaattacctgaaggtgttgaatatgtgaacaattcattgactaaagattttccaagtaacaattcaggcgttgatgttaatgatatgaatgttacatatgatgcagcaaatcgtgtgataacaattaaaagtactggaggaggtacagcaaactctccggcacgacttatgcctgataaaatactcgatttaagatataaattacgtgtaaataatgtgccgacaccaagaacagtaacatttaacgagacattaacgtataaaacatatacacaagatttcattaattcagctgcagaaagtcatactgtaagtacaaatccatatactatcgatatcatcatgaataaagatgcattacaagccgaagttgacagacgtattcaacaagctgattatacatttgcgtcattagatatctttaatggtctgaaacgacgcgcacaaacgattttagatgaaaatcgtaacaatgtaccattaaataaaagagtttctcaagcatatattgattcattaactaatcaaatgcaacatacgttaattcgaagtgttgatgctgaaaatgcagttaataaaaaagttgaccaaatggaagatttagttaatcaaaatgatgaattgacagatgaagaaaaacaagcagcaatacaagttatcgaggaacataaaaatgaaataattggtaatattggtgaccaaacgactgatgatggcgttactagaatcaaagatcaaggtatacagaccttaagtggggatactgcaacaccggttgttaaaccaaatgctaaaaaagcaatacgtgataaagcaacgaaacaaagggaaattatcaatgcaacaccagatgttactgaagacgagattcaagatgcactaaatcaattagctacggatgaaacagatgctattgataatgttacgaatgctactacaaatgctgacgttgaaacagctaaaaataatggcatcaatactattggagcagttgttcctcaagtaactcataaaaaagctgcaagagatgcaattaaccaagcaacagcaacgaaaagacaacaaataaatagtaatagagaagcaactcaggaagagaaaaatgcagcattgaacgaattaactcaagcaaccaaccatgctttagaacaaatcaatcaagcaacaacaaatgctgatgttgataacgccaaaggagatggtctaaatgccattaatccaattgctcctgtaactgttgttaagcaagctgcaagggatgccgtatcacatgatgcacaacaacatatcgcagagatcaatgctaatcctgatgcgactcaagaagaaagacaagcagcaattgacaaagtgaatgctgctgtaactgcagcaaacacaaacattttaaacgctaataccaatgctgatgttgaacaagtaaagacaaatgcgattcaaggaatacaagcaattacaccagctacaaaagtaaaaacagatgcaaaaaatgccatcgataaaagtgcggaaacgcaacataatacgatatttaataataatgatgcgacgctcgaagaacaacaagcagcacaacaattacttgatcaagctgtagccacagcgaagcaaaatattaatgcagcagatacgaatcaagaagttgcacaagcaaaagatcagggcacacaaaatatagtagtgattcaaccggcaacacaagttaaaacggatactcgcaatgttgtaaatgataaagcgcgagaggcgataacaaatatcaatgctacaactggcgcgactcgagaagagaaacaagaagcgataaatcgtgtcaatacacttaaaaatagagcattaactgatattggtgtgacgtctactactgcgatggtcaatagtattagagacgatgcagtcaatcaaatcggcgcagttcaaccgcatgtaacgaagaaacaaactgctacaggtgtattaaatgatttagcaactgctaaaaagcaagaaattaatcaaaacacaaatgcaacaactgaagaaaagcaagtggctttaaatcaagtggatcaagagttagcaacggcaattaataatataaatcaagctgatacaaatgcggaagtagatcaagcgcaacaattaggtacaaaagcaattaatgcgattcagccaaatattgttaaaaaacctgcagcattagcacaaatcaatcagcattataatgctaaattagctgaaatcaatgctacaccagatgcaacgaatgatgagaaaaatgctgcgatcaatactttaaatcaagacagacaacaagctattgaaagtattaaacaagctaacacaaatgcagaagtagaccaagctgcgacagtagcagagaataatatcgatgctgttcaagttgatgtagtaaaaaaacaagcagcgcgagataaaatcactgctgaagtggcgaagcgtattgaagcggttaaacaaacacctaatgcaactgacgaagaaaagcaggctgctgttaatcaaatcaatcaacttaaagatcaagcaattaatcaaattaatcaaaaccaaacaaatgatcaggtagacacaactacaaatcaagcggtaaatgctatagataatgttgaagctgaagtagtaattaaaccaaaggcaattgcagatattgaaaaagctgttaaagaaaagcaacagcaaattgataatagtcttgattcaacagataatgagaaagaagttgcttcacaagcattagctaaagaaaaagaaaaagcacttgcagctattgaccaagctcaaacgaatagtcaggtgaatcaagcagcaacaaatggtgtatcagcgattaaaattattcaacctgaaacaaaagttaaaccagctgcacgtgaaaaaatcaatcaaaaagcgaatgaattacgtgctaagattaatcaggataaagaagcaacagcagaagaaagacaagtagcactagataaaatcaatgaatttgtaaatcaagccatgacagatattacgaataatagaacaaatcaacaagttgatgatacaacaagtcaagcgcttgatagcattgctttagtgacgcctgaccatattgttagagcagctgctagagatgcagttaagcaacaatatgaagctaaaaagcgcgaaattgagcaagcggaacatgcgactgatgaagaaaaacaagttgctttaaatcaattagcgaataatgaaaaacgtgcattacaaaacatcgatcaagcaatagcgaataatgatgtgaaacgtgttgaaacaaatggcattgctacactaaaaggtgtacaacctcatattgtaattaagcctgaagcacaacaagcaataaaagcaagtgcagaaaatcaagtagaatcaataaaagatacaccacatgcaacagttgatgaattagatgaagcgaatcaattaattagcgacacactcaaacaagcgcaacaagaaatagaaaatacaaatcaagatgctgctgttactgatgttagaaatcaaacaatcaaggcaatagagcaaataaaacctaaagtaagacgtaaacgagctgcgcttgatagcattgaagaaaataataaaaatcaactcgatgcaatccgaaatacgttggatactactcaagatgaaagagatgttgctattgatactttaaataaaattgtaaatacaattaaaaatgacattgcacaaaacaaaacgaatgcagaagtggatcgaactgagactgatggcaacgacaacatcaaagtgattttacctaaagttcaagttaaaccagcagcgcgtcaatctgttggtgtaaaagccgaagctcaaaatgcactaatcgatcaaagcgatttatcaactgaagaagaaagactagctgctaaacatttagtagaacaagcacttaatcaggctattgatcagatcaatcatgcagataagactgcccaagttaatcaagatagtataaatgctcaaaatattatttcaaaaattaaaccagcgacaacagttaaagcaacagcattacaacaaattcaaaatatcgctacaaataaaattaatttaattaaagcaaataacgaagcgacagatgaagaacaaaatattgcaatagcacaagttgaaaaagagttaattaaagctaaacaacaaattgctagtgcagtgactaatgcagatgtggcatatttattgcatgatgagaaaaacgaaattcgtgaaatcgaacctgttattaacagaaaggcgtctgctcgagaacaattgacaacattattcaacgataaaaaacaagcaattgaagcgaatattcaagcaacggtagaagaaagaaatagtatattagcacagttacaaaatatttatgacactgctattggacaaattgatcaagatcgtagcaatgcacaagttgataaaacagcatcattaaatctacaaacaatacatgatttagatgtacatcctattaaaaagccagatgctgaaaaaacgattaatgatgatcttgcacgcgtcactgctttagtgcaaaattatcgaaaagtaagtaatcgtaataaggctgatgcattaaaagctataactgctttaaaattacaaatggatgaagaattaaaaacagcacgcactaatgctgatgttgatgcagttttaaaacgatttaatgttgcattaagcgatatagaagcagtaattactgaaaaagaaaatagcttactgcgaattgataacattgctcaacaaacatatgcgaaattcaaagcgatcgcaacaccagaacaattagctaaagtaaaagtattaattgatcaatatgttgcagatggcaatagaatgattgatgaagatgcgacattaaatgacatcaaacaacacacgcaattcattgttgatgaaattttagcaattaaattaccagctgaagcgacgaaagtatcaccaaaagaaattcagccagctccaaaagtttgtacgcctattaaaaaagaagagacacatgaatcgcgcaaagttgaaaaagaacttccaaatacaggttctgaaggaatggatttaccattgaaagaatttgcactgattacaggtgcggctttgttagctagaagacgtactaaaaacgaaaaagaatcataa

SEQ ID NO: 8816 - DNA, 972 bp, Staphylococcus aureus
  CDS (1)...(972)
atgatagctgttaattggaacacacaagaagatatgacgaatatgttttggagacaaaatatatctcaaatgtgggttgaaacagaatttaaagtatcaaaagacattgcaagttggaagactttatctgaagctgaacaagacacatttaaaaaagcattagctggtttaacaggcttagatacacatcaagcagatgatggcatgcctttagttatgctacatacgactgacttaaggaaaaaagcagtttattcatttatggcgatgatggagcaaatacacgcgaaaagctattcacatattttcacaacactattaccatctagtgaaacaaactacctattagatgaatgggttttagaggaaccccatttaaaatataaatctgataaaattgttgctaattatcacaaactttggggtaaagaagcttcgatatacgaccaatatatggccagagttacgagtgtatttttagaaacattcttattcttctcaggtttctattatccactatatcttgctggtcaagggaaaatgacgacatcaggtgaaatcattcgtaaaattcttttagatgaatctattcatggtgtatttaccggtttagatgcacagcatttacgaaatgaactatctgaaagtgagaaacaaaaagcagatcaagaaatgtataaattgctaaatgacttgtatttaaatgaagagtcatacacaaaaatgttatacgatgatcttggaatcactgaagatgtgctaaactatgttaaatataatggaaacaaagcactttcaaacttaggctttgaaccttattttgaggaacgtgaatttaacccaatcattgagaatgccttagatacaacaactaaaaaccatgacttcttctcagtaaaaggtgatggttatgtattagcattaaacgtagaagcattacaagatgatgactttgtatttgacaacaaataa

SEQ ID NO: 8817 - DNA, 2157 bp, Staphylococcus aureus
  CDS (1)...(2157)
atggaaaaaacaaagacgttattgaatttaagaacaaggtgggtaattttaatgaaaaccatggaagagaaaaagtacaatcatattgaattaaataatgaggtcactaaacgaagagaagatggattctttagtttagaaaaagaccaagaagctttagtagcttatttagaagaagtaaaagacaaaacaatcttcttcgacactgaaatcgagcgtttacgttatttagtagacaacgatttttatttcaatgtgtttgatatttatagtgaagcggatctaattgaaatcactgattatgcaaaatcaatcccgtttaattttgcaagttatatgtcagctagtaaatttttcaaagattacgctttgaaaacaaatgataaaagtcaatacttagaagactataatcaacacgttgccattgttgctttatacctagcaaatggtaataaagcacaagctaaacaatttatttctgctatggttgaacaaagatatcaaccagcgacaccaacatttttaaacgcaggccgtgcgcgtcgtggtgagctagtgtcatgtttcttattagaagtggatgacagcttaaattcaattaactttattgattcaactgcaaaacaattaagtaaaattgggggcggcgttgcaattaacttatctaaattgcgtgcacgtggtgaagcaattaaaggaattaaaggcgtagcgaaaggcgttttacctattgctaagtcacttgaaggtggctttagctatgcagatcaacttggtcaacgccctggtgctggtgctgtgtacttaaatatcttccattatgatgtagaagaatttttagatactaaaaaagtaaatgcggatgaagatttacgtttatctacaatatcaactggtttaattgttccatctaaattcttcgatttagctaaagaaggtaaggacttttatatgtttgcacctcatacagttaaagaagaatatggtgtgacattagacgatatcgatttagaaaaatattatgatgacatggttgcaaacccaaatgttgagaaaaagaaaaagaatgcgcgtgaaatgttgaatttaattgcgcaaacacaattacaatcaggttatccatatttaatgtttaaagataatgctaacagagtgcatccgaattcaaacattggacaaattaaaatgagtaacttatgtacggaaattttccaactacaagaaacttcaattattaatgactatggtattgaagacgaaattaaacgtgatatttcttgtaacttgggctcattaaatattgttaatgtaatggaaagcggaaaattcagagattcagttcactctggtatggacgcattaactgttgtgagtgatgtagcaaatattcaaaatgcaccaggagttagaaaagctaacagtgaattacattcagttggtcttggtgtgatgaatttacacggttacctagcaaaaaataaaattggttatgagtcagaagaagcaaaagattttgcaaatatcttctttatgatgatgaatttctactcaatcgaacgttcaatggaaatcgctaaagagcgtggtatcaaatatcaagactttgaaaagtctgattatgctaatggcaaatatttcgagttctatacaactcaagaatttgaacctcaattcgaaaaagtacgtgaattattcgatggtatggctattcctacttctgaggattggaagaaactacaacaagatgttgaacaatatggtttatatcatgcatatagattagcaattgctccaacacaaagtatttcttatgttcaaaatgcaacaagttctgtaatgccaatcgttgaccaaattgaacgtcgtacttatggtaatgcggaaacattttaccctatgccattcttatcaccacaaacaatgtggtactacaaatcagcattcaatactgatcagatgaaattaatcgatttaattgcgacaattcaaacgcatattgaccaaggtatctcaacgatcctttatgttaattctgaaatttctacacgtgagttagcaagattatatgtatatgcgcactataaaggattaaaatcactttactatactagaaataaattattaagtgtagaagaatgtacaagttgttctatctaa

SEQ ID NO: 8818 - DNA, 924 bp, Staphylococcus aureus
  CDS (1)...(924)
gtgataaataaagacatctatcaagctttacaacaacttatcccaaatgaaaaaattaaagttgatgaacctttaaaacgatacacttatactaaaacaggtggtaatgccgacttttacattacccctactaaaaatgaagaagtacaagcagttgttaaatatgcctatcaaaatgagattcctgttacatatttaggaaatggctcaaatattattatccgtgaaggtggtattcgcggtattgtaattagtttattatcactagatcatatcgaagtatctgatgatgcgataatagccggtagcggcgctgcaattattgatgtctcacgtgttgctcgtgattacgcacttactggccttgaatttgcatgtggtattccaggttcaattggtggtgcagtgtatatgaatgctggcgcttatggtggcgaagttaaagattgtatagactatgcgctttgcgtaaacgaacaaggctcgttaattaaacttacaacaaaagaattagagttagattatcgtaatagcattattcaaaaagaacacttagttgtattagaagctgcatttactttagctcctggtaaaatgactgaaatacaagctaaaatggatgatttaacagaacgtagagaatctaaacaacctttagagtatccttcatgtggtagtgtattccaaagaccgcctggtcattttgcaggtaaattgatacaagattctaatttgcaaggtcaccgtattggcggcgttgaagtttcaaccaaacacgctggttttatggtaaatgtagacaatggaactgctacagattatgaaaaccttattcattatgtacaaaagaccgtcaaagaaaaatttggcattgaattaaatcgtgaagttcgcattattggtgaacatccaaaggaatcgtaa

SEQ ID NO: 8819 - DNA, 1005 bp, Staphylococcus aureus
  CDS (1)...(1005)
atgatgcaaaataaacaaattctttttaacaaaataccagaaggcatgcctcaagaggatacattcaaaattgaagagattgacacgcctaaacttgagagcgatggtgtacttgtacaaacgctgtatatttcagtggatccatatatgagaggacgtatgactaaggcagattcgtatgtacagccttttgaaattggtaaaccgattgttagccatgtcgttgcaaaagtaattgattcgacactcgcagattataaaaaaggagatgtcgttgtaggtatgttgccttggcgaatcattaatcatgtccaagcggatcaaattactaaagttccaacgacagatgtaccacttgatttatatttaagtgttttaggaatgccaggacaaacagcatatcatggtctgcttgatattggacaacctaaagccggtgatactgttgtggtttcagctgcatctggtgctgtaggttcagttgtaggtcaaattgctaagattaaaggttgccgtgtagtaggtattgcgggtggcgacaaaaaagtaaattatttaacagagacactgggctttgacgctggtattgattataagaaagaggattttgcagaagcgttagcacaagcagtaccagatggtattgatgtttattttgaaaatgttggtggaacagttggcgatgaagtatttaagcatttaaatcgttttgcacgtgtaccagtatgtggcgcaatttcgtcatataatcatcctgaagccgatatcggaccacgtattcaaggtacgcttattaagaagcaagtaatgatgagaggcttcttggtaagtgaattcgctaatgcttttaaagaagctagtgaacagcttgcaacatgggttcaagaaggtaaaattcagtcacaagtaaccattgaagatggttttgaaaatgcgccacatgcatttaaaaatttatttactggcgataactttggtaaacaagttattaaagtaacggaataa

SEQ ID NO: 8820 - DNA, 429 bp, Staphylococcus aureus
  CDS (1)...(429)
atggcgattattattggttcagatgaagctggcaaacgattaaaagaagtcatcaaatcatacttattagacaataaatatgatgttgttgacgtaacagaaggacaggaagttgactttgttgatgcaactttggctgtagcaaaagatgttcaaagtcaagaaggtaacttaggtattgttatcgatgcatttggtgcaggtagctttatggttgctacaaaaatcaaaggcatgattgctgctgaagtatcagatgaacgctctggatatatgactagaggccataacaattcaagaatgatcactatgggatctgaaattgttggagacacattagcgaaaaatgtcgttaaaggttttgttgaaggtaaatacgatggtggtagacaccaaatccgcgtagatatgcttaataaaatgtgctaa

SEQ ID NO: 8821 - DNA, 516 bp, Staphylococcus aureus
  CDS (1)...(516)
atgaagattgcattaggatgcgaccatattgttacagatacaaaaatgcgtgtatctgaatttttaaaatcaaaaggacatgaagtcattgacgtaggaacatacgatttcacaagaacacattatccaatttttggtaaaaaagttggcgaacaagttgttagcggtaatgcagacttaggtgtttgtatttgtggaacaggtgttggtattaacaatgctgtaaataaagtacctggcgttcgttcagcactagtacgtgatatgacatcagcgttatacgctaaagaagaattaaatgcgaacgttattggcttcggtggacgtattataggtgagttattaatgtgcgatattatcgatgcatttattaatgctgaatataaaccaactgaagagaacaaaaaattaatcgctaaaattaaacatttagaaacaagcaatgcagatcaagctgatccacatttctttgatgaattcttagaaaaatgggacagaggcgaataccacgattaa

SEQ ID NO: 8822 - DNA, 312 bp, Staphylococcus aureus
  CDS (1)...(312)
atgaatagagaagaagtccaattattaggttttgaaattgttgcatttgcaggggatgcacgttctaagtttttagaagcattaacagcagctcaagctggagattttgcaaaagcagatgcactgattgaagaaggaaacaattgcattgcggaagcgcatagagcacaaacaagcctgttggctaaagaagcgcaaggtgatgatattgcatacagtgtaacgatgatgcatggtcaagatcatttaatgacaacaattttactgaaagatttaatgaagcatttattagaattttataaaagagggtga

SEQ ID NO: 8823 - DNA, 1722 bp, Staphylococcus aureus
  CDS (1)...(1722)
gtgatgacaatgatgcaaaaattgatcgcacaaattgaaaaagggaagccatttttcgagaaattatcacgtaacatatatttaagagccatccgtgatggatttatttctgcaatgcctgtcatcttattctcaagtatctttctattaattgcatatgtgccaaatatatttggttttaaatgggataaaggcatggaagccattttaatgaaaccatataactatacgatggggcttgtagcatttttagtagcaggaacgacagcgaaatctttaacagattcatttaaccgtaagctagaaagtacaaatcaaattaactttatttctacaatgctagcagcgatgtgtggattcttgttcttagcttctgatccagccaaagatggtggattcttaagtgcatttatgggaactaaaggtttattaacagcattcttatcagcatttgtaactgttattgtttataacttctgtgtgaagcgcaatattacaattaaaatgccgaaagaagtaccgccgaatatttcacaagtatttaaggacttaattccattttcagcggtaatcatcattctttatgcattagatttagtcattcgcaacagctttaaatcaaatgtagcggaaggtattttaaaattattcgaaccattatttacagcagcagatggatggattggtgtcacaattatctttggtgcctttgcattattctggtttgtaggtattcatggtccgtcaattgtagagccagcaattgcagccattacatatgcgaatatcgaagcgaacttcaagttgcttcaagctggagaacacgcagataaaattattacatcaggtacacaaatgtttatcgttacatttggaggtacgggtgcaacattggtcgtcccgttcatgtttatgtggatgacgaaatctaaacgaaacaaagcgattggacgtgcatcagttgtaccaacattctttggtgtaaacgaaccaattttatttggtgcaccactagtattgaatcctgtgttctttattccatttgtattagcaccaattgttaacgtatggattttcaaacttttcgttgaagtgttaggaatgaatagttttagtgtgaatttaccttggacaacaccaggtccattgggcattatcatgggtacaggttttggtttatggtcattcgtactagctattactttgattgttgtagatattattatttactacccattcctaaaagtttatgatagtgaaattcttgatgaagaagaaggacgtaaagaaagtaattcagatttaaaagaaaaagttgcagcaaactttgatacgaaaaaagctgattcaattttagcggcaagtggtgtatcagacgatgcagctaaagcttcaaatatcacagaacaaacaaatgtcttagtactttgtgccggtggtggtacaagtggattattagccaatgcacttaataaagcagctgaagaatatcatgtgccagtgaaagcggcagctggcggatatggcgcacatatggacattatgaaagagtaccaattaatcattttagcgccacaagttgcgtctaactatgaagatattaagcaagatacagatagattaggtattaaattagcgaagactcaaggtgctgaatatatcaaattgacacgagatggccaagcagcccttgatttcgttcaacaacaatttgaaaattaa

SEQ ID NO: 8824 - DNA, 1599 bp, Staphylococcus aureus
  CDS (1)...(1599)
atgagaaaactaactaaaatgagtgcaatgttacttgcatcagggctaattttaactggttgtggcggtaataaaggtttagaggagaaaaaagaaaacaagcaattaacgtatacgacggttaaagatatcggtgatatgaatccgcatgtttacggtggatcaatgtctgctgaaagtatgatatacgagccgcttgtacgtaacacgaaagatggtattaagcctttactagctaaaaagtgggatgtgtctgaagatgggaagacatacacgttccatttgagagatgacgttaaattccatgatggtacgccatttgatgctgacgcagttaagaaaaatattgacgcagttcaagaaaacaaaaaattgcattcttggttaaagatttcgacattaattgacaatgttaaagttaaagataagtacacggttgaattgaatttgaaagaagcatatcaacctgcattggctgaattagcgatgcctcgtccatatgtatttgtgtctccaaaagactttaaaaacggtacaacaaaagatggcgttaaaaagttcgatggtactggtccatttaaattaggtgaacacaaaaaagatgagtctgcagactttaacaaaaatgatcaatactggggcgaaaagtctaaacttaacaaagtacaagcaaaagtaatgcctgctggtgaaacagcattcctatcaatgaaaaaaggtgaaacgaactttgccttcacagatgatagaggtacagatagcttagacaaagactctttaaaacaattgaaagatacaggtgactatcaagttaagcgtagtcaacctatgaatacgaaaatgttagttgtcaattctggtaaaaaagataacgctgtgagtgacaaaacagtcagacaagcgattggtcatatggtaaacagagataaaattgccaaagaaattttagatggtcaagaaaaaccagcaactcaattatttgcgaaaaatgtaacagacattaatttcgatatgccaacacgtaagtatgaccttaaaaaagcagaatcattattagatgaagctggttggaagaaaggtaaagacagcgatgttcgtcaaaaagatggtaaaaaccttgaaatggcaatgtactatgacaaaggttcttcaagtcaaaaagaacaagcagaatacttacaagcagaatttaagaaaatgggtattaagttaaacatcaatggcgaaacatcagataaaattgctgaacgtcgtacttctggtgattatgacttaatgttcaaccaaacttggggattattgtacgatccacaaagtactattgcagcatttaaagcgaaaaatggttatgaaagtgcaacatcaggcattgagaacaaagataaaatatacaacagcattgatgacgcatttaaaatccaaaacggtaaagagcgttcagacgcttataaaaacattttgaaacaaattgatgatgaaggtatctttatccctatttcacacggtagtatgacagttgttgcaccaaaagatttagaaaaagtatcattcacacaatcacagtatgaattaccattcaatgaaatgcagtataaataa

SEQ ID NO: 8825 - DNA, 639 bp, Staphylococcus aureus
  CDS (1)...(639)
gtggataatgcaagcgaacaacaagtggtagactttgtgtctgacataaaggaacagtttggaagaatcgatgtgttgtttaataatgccggtgtggataatgcggctgatagaattcatgagtatccaatagatgtgtatgacaagattatgaatgtagatatgcgtgggacatttttaatgacgaaaatgatgttacctttaatgatgaatcaaggtggctctattgttaatacgtcttcattttccggacaagcagcagacttgtatcgctctggatataatgctgcgaaaggtgcagtgattaattttacaaaatcaatcgcaattgagtatggccgtgatagcattcgagccaatgcgattgcaccaggtacaattgaaaccccgttagtagataaactgacaggtacgagtgaggatgatgcaggtaaaacatttagagaaaatcaaaaatggatgactccgctgggacgtttaggtaaaccagaagaagttgctaaattagtagtcttcttagcatctgacgacagttcattcataactggagagacgattcgaattgatggtggtgtgatggcttacacatggcctggcgagatgttaagtgatgattcgtggaagcggacattggaataa

SEQ ID NO: 8826 - DNA, 87 bp, Staphylococcus aureus
  CDS (1)...(87)
atgaaacgtttggaaaataaagtagcagtcgtaacaggagcaagtacaggtatcggtcaagcttctgcaatcgctttagctcaataa

SEQ ID NO: 8827 - DNA, 1539 bp, Staphylococcus aureus
  CDS (1)...(1539)
atgacatcaaaacatcaacaaaaggggtctatcgtcaatcgtttcttgaatagtgttgaaaaaatcggaaataaattgccagatcctagcgtcttattctttttaatgtgtgtgggcttagccattatgacatgggttatctcattatttaatgtatctgttaagcatccaggtacgcatcaaaccatttatattaaaaatataattagccatgatggatttacgatgataatgaatgatacgattaaaaatttctcagagttcccagcattaggcttagtactagcagtgatgattggtattggtgttgcagagaaaacaggatacttcgataagttaatgatttctgttgtgaatcgcgcaccacgtttcttaattttaccgactattatattaattggtattttaggtagtacagccggcgatgctgcgacaattatcttgccgccgcttgcagcaatgctttttattaaaattggctatcaccctatcgctggactaacgatggcatatgcttccgctgttggaggatttgcagcaaatatagttgttggtatgcaagatgctttggtctattcatttacagaaccggcaacacgtatcgtttcagattctattaaaacaaacgttgctatgaactggtactttatcgcagcgagtgtcgttgtattacttcctacgatattgctagttacaactaagctcattattcctagattaggaaaatatgatgacagtttaatgcatgatgaccatgaagaaacatcttcacatattactgacaaagaagcacatgctttaaaatgggcaaatatcagtttcatagtcacaattattttattaattattacagccattcctgaacatagctttttaagaaatgctaaaacaggcagcttactagacgatgcgccattaattaacggtgtcggattaattattcttgtcgtatttttagtacctggattagtttatgggattttaagcaaagaaattaaaaatacaaaagacttaggtaaaatgttcggcgatgctgtaggatcaatgggaacatttatcgttattgtgttttttgcagcacagctacttgcgtatttaaagtggagtaatttaggaattatcgctgctgttaaaggtgccaaattattagaacatcaaaacggtattgtattgatactaggtattattgtactgagtgcaatggtcaacatgttaatcggaagcgcatcggctaaatggggtattttaggaccgatattcgtaccaatgttaatccttatcggctttcatcccgcattcacacaagtcatttaccgtgtaggcgattcaattaccaatccaattacaccgatgatgccgtacttacctttattattaacttatgcacaaaaatacgataaacgcatgaaactcggagccttactttctagtttaatgccgtattcaatcgcgctaagtattgtatggacagtatttgtcatcatttggttcctattaggtatccctgttggaccaggtggaccgatattcgttaaataa

SEQ ID NO: 8828 - DNA, 1578 bp, Staphylococcus aureus
  CDS (1)...(1578)
atgacgtttcttacagtcatgcaatttatagttaacattatcgttgtaggattcatgcttacggttattgttatcgggcttatttggttaattaaagataaaagacaatcacaacatagtgtattaaggaattatcctttactagcacgtattagatatatttcagaaaaaatgggaccggaattacgtcagtatttattttctggggataatgaagggaaacctttttcacgtaatgattataaaaatatcgttttggctggaaaatataactctcgtatgaccagcttcggtactactaaagattatcaagacggcttttacatacagaacacaatgtttccgatgcaacgtaatgagatttcagtagataatacaacattgttatcaacattcatttataaaatcgcgaatgagcgtttatttagtcgtgaagaatatcgtgtgccgacaaagattgatccgtattacttaagtgatgaccatgcaataaaattaggtgaacatttaaaacatccatttattttaaaacgtatcgtaggacaatctggtatgagttatggcgctttaggaaaaaatgccattacagctttatctaaaggtctagctaaagcgggcacttggatgaatacaggtgaaggtggcttatcagaatatcatttaaaaggtaatggggatatcattttccaaattggtcccggtttatttggtgttcgtgataaagaaggtaattttagtgaaggtttatttaaagaggttgcacagttatctaacgtacgcgcatttgagctgaagttggcacaaggtgctaagactcgtggtggtcatatggaagctgaaaaggtaaacgaagaaattgctaaaatccgaaatgttgaaccttataaaacaatcaattcacctaaccgttacgaatttattcataatgctgaagatttgattcgtttcgtcgatcagttgcagcaattaggtcaaaaaccagtaggattcaaaattgtagtaagcaaagtttcagaaattgaaacacttgtacgtacgatggtggaactagataagtatccaagctttattacgattgatggtggtgaaggtggtactggtgcaacattccaagaattacaagatggtgttggcttaccgctatttacagctctacctattgtgtctggcatgttagaaaaatatggtattcgagataaagtgaaattggcggcatctggtaagttagtgacaccagataaaattgcgattgcactaggtttaggtgcagattttgtaaatatcgcacgtgggatgatgattagtgtcggttgtataatgagtcaacaatgtcacatgaatacgtgtcctgtaggtgttgcaacgacagatgcgaagaaagaaaaagcattgattgttggagaaaagcaatatcgtgtcacaaactatgtaacaagtttgcatgaaggcttattcaatattgcagcagctgttggcgtatccagtcctacagaaattactgctgatcatattgtatatcgaaaagtcgatggtgagttacaaacgatacatgattataaattaaaactcattagttaa

SEQ ID NO: 8829 - DNA, 816 bp, Staphylococcus aureus
  CDS (1)...(816)
atgacattgttaacagttaaacatttgacgattacagatacctggacagatcaaccactcgtgagtgatgtgaattttacattaactaagggtgaaactttaggcgttattggagaaagtggtagtggtaaatcaatcacttgtaaatcgattattggtttgaatcccgaacgactcggggtgacaggtgaaattatctttgatggtacatcaatgttgtcattatctgaatcgcaattgaaaaagtaccgtggtaaagacattgcgatggtcatgcaacaaggtagtcgtgcctttgacccatcaactactgtcggtaaacaaatgtttgagactatgaaagtacatacgtcaatgtctacacaagaaattgaaaagacattgattgaatatatggattatttaagtttgaaagatcctaaacgtatattaaaatcatacccttacatgttatcaggaggaatgttacagcgattgatgattgctttagcgttagctttgaaaccaaagttaatcattgctgatgagccgacaacggctttagatacaattacacaatatgatgtactggaagcatttatagatattaaaaaacactttgactgtgcgatgattttcatttcacatgatttaacggttattaacaagattgcagaccgtgttgttgtgatgaaaaatggtcagcttattgaacaagggacacgtgaatcagtcttgcatcatccagaacatgtttatacgaagtatttattatcaacgaagaagaagattaatgatcattttaaacatgtgatgaggggtgatgtacatgattaa

SEQ ID NO: 8830 - DNA, 1371 bp, Staphylococcus aureus
  CDS (1)...(1371)
atgggtcaaacattatttgacaaggtgtggaacagacatgtgttatacgggaaattgggcgaaccgcaactattatacattgatttacaccttatacatgaagttacttctcctcaagcatttgaaggacttaggcttcaaaacagaaaattaagacgcccagatttaacatttgcaacactcgatcacaatgttcctactattgatatattcaatattaaagatgaaattgcaaacaaacaaatcacaacattacaaaaaaacgccatagattttggggtgcatatttttgatatgggttctgatgaacaaggtattgttcacatggtaggacctgagacaggacttacacagcctggcaagacaatcgtttgtggtgactctcacacagcaacacatggagcatttggtgctattgcatttggaattggaacaagtgaagttgaacatgttttcgcaactcaaacgctatggcaaacaaaacccaaaaacttaaaaatcgatattaatggtaccttaccaacaggcgtctatgctaaggacattattctgcatttaattaaaacgtatggtgttgactttggtacaggctatgctttggaatttactggcgaaacaattaaaaacctttcaatggatggtcgaatgactatttgtaacatggctatcgaaggtggtgccaaatacggcataatccaacctgatgatataacatttgaatatgttaaagggagaccatttgccgataacttcgctaaatcagttgataagtggcgtgagctatattctgatgacgacgcgatatttgatcgtgtaattgaacttgatgtttcaacattagaaccacaagtgacatggggaactaatcctgaaatgggtgttaatttcagtgaaccattccctgaaatcaatgatatcaacgatcaacgtgcgtatgattatatggggttagaaccaggtcaaaaagctgaagacatcgacttagggtatgtttttctcggttcatgtacaaatgctagactatcagatttgattgaagctagtcatattgttaaaggaaataaagttcatccaaatattacagctattgtcgtaccaggttctcgtacagtaaaaaaagaagcagaaaaattaggtctagatactatctttaaaaatgcaggatttgaatggcgtgaaccaggatgttcaatgtgtttaggcatgaatcctgaccaagtacctgagggcgtacattgtgcatctacaagtaatcgaaactttgaaggacgacaaggcaaaggtgcaagaacacatttagtatcccctgctatggcagcagcagcagctattcatggtaaatttgtggacgtaagaaaggtggttgtttaa

SEQ ID NO: 8831 - DNA, 1689 bp, Staphylococcus aureus
  CDS (1)...(1689)
atgcgaagcgacatgatcaaaaaaggagatcaccaagcaccagcaagaagtcttttacatgccacgggcgcgctaaaaagtccaactgatatgaacaaaccatttgtagctatttgtaactcttatattgatattgttcctggacatgttcacttgagagagcttgcagatatagctaaagaagcaattagagaagccggtgccattccatttgaattcaatacaattggtgttgatgatggaatagctatgggacatatcggaatgcgatattctctaccatcacgtgaaattattgcagatgcagctgaaactgtaattaacgctcattggtttgacggcgtattttacattcctaattgtgacaagattacacccggtatgattttagcagccatgaggacaaacgtaccagctatcttttgctctggtggaccaatgaaagctggcttatctgcacatggaaaagcattaacactttcatcaatgtttgaagcagtcggcgcatttaaagaaggatcgatttctaaagaagaatttttagatatggaacaaaatgcctgccctacttgtggttcatgtgctgggatgtttactgcaaattcaatgaactgtttgatggaagttttaggtctaacattaccatacaacggtactgcacttgcagtcagtgatcagcgacgagaaatgattcgccaagcagcttttaaattagttgaaaatattaaaaatgatttaaaaccacgtgatatcgttactcgcgaagcaattgatgatgcatttgcacttgatatggctatgggtggttcaacaaacacggtactgcatacgttagccattgccaatgaagctggtattgattatgacttagagcgcattaatgctattgccaaacgcacgccatatttatcaaaaatagcacctagttcatcgtattcaatgcatgatgtgcatgaagctggtggcgtcccagcaattattaatgaattgatgaagaaagatggcacgttacacccagatagaatcacagttactggcaaaacgttacgtgaaaataacgaaggcaaagaaattaagaactttgatgtcattcaccctcttgatgcaccatatgatgcacaaggcggtttatctatcttatttggtaatatcgcccctaaaggcgcagttattaaagttggcggcgttgatccatctatcaaaacatttactgggaaagcaatttgtttcaattcgcatgatgaagctgttgaagcaatagacaatcgtaccgttcgtgcaggccacgtcgttgtcattagatatgaaggacctaaaggtggaccaggtatgcctgaaatgttagcacctacttcctctattgttggtcgcggcttaggtaaagatgttgcattaattactgatgggcgtttttccggtgccacaagaggtattgcagttggtcatatttcccctgaagctgcatctggtggaccaattgccttaattgaagatggtgatgagattactattgatttaacaaatcgtacattaaacgtaaaccagcctgaagatgttctagcgcgtcgccgagaatctttaacaccatttaaagcgaaagtaaaaacaggttatctagctcgttatactgccctagtaactagcgcaaatacaggtggcgtcatgcaagtccctgagaatttaatttaa

SEQ ID NO: 8832 - DNA, 255 bp, Staphylococcus aureus; identical to SEQ ID NO: 4860
  CDS (1)...(255)

SEQ ID NO: 8833 - DNA, 1698 bp, Staphylococcus aureus
  CDS (1)...(1698)
atgaaacaattacatccaaatgaagtaggtgtatatgcacttggaggtctaggtgaaatcggtaaaaatacttatgcagttgagtataaagacgaaattgtcattatcgatgcaggtatcaaattccctgatgataacttattagggattgattatgttatacctgactacacatatctagttcaaaaccaagataaaattgttggcctatttataacacatggtcacgaagaccatataggcggtgtgcccttcctattaaaacaacttaatatacctatttatggtggtcctttagcattaggtttaatccgtaataaacttgaagaacatcatttattacgtactgctaaactaaatgaaatcaatgaggacagtgtgattaaatctaagcactttacgatttctttctacttaactacacatagtattcctgaaacttatggcgtcatcgtagatacacctgaaggaaaagtagttcataccggtgactttaaatttgattttacacctgtaggcaaaccagcaaacattgctaaaatggctcaattaggcgaagaaggcgttctatgtttactttcagactcaacaaattcacttgtgcctgattttactttaagcgaacgtgaagttggtcaaaacgtagataagatcttccgtaattgtaaaggtcgtattatatttgctaccttcgcttctaatatttaccgagttcaacaagcagttgaagctgctatcaaaaataaccgtaaaattgttacgttcggtcgttcgatggaaaacaatattaaaataggtatggaacttggttatattaaagcaccacctgaaacatttattgaacctaataaaattaataccgtaccgaagcatgagttattgatactatgtactggttcacaaggtgaaccaatggcagcattatctagaattgctaatggtactcataagcaaattaaaattatacctgaagataccgttgtatttagttcatcacctatcccaggtaatacaaaaagtattaacagaactattaattccttgtataaagctggtgcagatgttatccatagcaagatttctaacatccatacttcagggcatggttctcaaggtgatcaacaattaatgcttcgattaatcaagccgaaatatttcttacctattcatggtgaataccgtatgttaaaagcacatggtgagactggtgttgaatgcggcgttgaagaagataatgtcttcatctttgatattggagatgtcttagctttaacacacgattcagcacgtaaagctggtcgcattccatctggtaatgtacttgttgatggtagtggtatcggtgatatcggtaatgttgtaataagagaccgtaagctattatctgaagaaggtttagttatcgttgttgttagtattgattttaatacaaataaattactttctggtccagacattatttctcgaggatttgtatatatgagggaatcaggtcaattaatttatgatgcacaacgcaaaatcaaaactgatgttattagtaagttaaatcaaaataaagatattcaatggcatcagattaaatcttctatcattgaaacattacaaccttatttatttgaaaaaacagctagaaaaccaatgattttaccagtcattatgaaggtaaacgaacaaaaagaatcaaacaataaataa

SEQ ID NO: 8834 - DNA, 267 bp, Staphylococcus aureus
  CDS (1)...(267)
atggaacaaaattcatatgtaatcatcgacgagactggtattcacgctagaccagcaacaatgttagtacaaacagcttcaaaattcgattctgatattcaattagaatataacggtaagaaagtaaacttaaaatcaatcatgggtgttatgagccttggtgttggtaaagatgctgaaattacaatttatgctgacggtagtgatgaatctgacgccattcaagcaatcagtgacgtcttatcaaaagaaggattgactaaataa

SEQ ID NO: 8835 - DNA, 891 bp, Staphylococcus aureus
  CDS (1)...(891)
atggaacaaactgcttttagattatttaatgctgaaggtgatggtgttgggggattaacaatcgacaattacgatggtcatttgttgattcaatggtactcaaaaggtatttataaatttaaatatgccattcttgaagcggttagaaaagtatttgattataaatctatttacgaaaaagtaagatttaaagacagcgaatatagtggtggttttgttgaaggagatgcacctgagtttccaattgttatcgaagaaaacttcacattttataatgtagaccttgaagatggtttgatgacaggtatctttttagatcaaaaagaagtgcgcaagaaattaagggatcaatatgccaaagaacgccatgttttaaacttatttagttatacaggtgctttttctgcaatagcagcaagtgaggcatcttcaacaacaagtgtagatttggctaatcgttctcgtagtttaactgaagaaaattttggattaaatgctattgatcctaaatcccaatatatttatgtcatggacacttttgatttctataaatatgctgcacgacatggacatagttatgacacgatcgtgattgatccacctagctttgcgcgtaacaaaaaacgtacattttcagtgcaaaaagattatgacaaattaattaatggcgccttaaatatcttatcatctgaaggaacattattgttatgtacaaacgcaagtgtatatccattaaagcaatttaaaaatactattaaaaagacgcttgaagagagtggcgttgattatgaattaactgaagttatgggattaccaaaagattttaaaacgcatccacattataagccatctaaatatttaaaagctgtttttgtaaatattagacattaa

SEQ ID NO: 8836 - DNA, 1407 bp, Staphylococcus aureus
  CDS (1)...(1407)
atggtagttggagatttcccaattgaaacagatactatagtaatcggagcaggtcctggtggatacgttgcagcaattcgtgcagctcaattaggacaaaaagtaacaatcgttgagaaaggtaatcttggtggtgtttgcttaaacgtaggatgtattccttcaaaagcattactacatgcttctcaccgttttgttgaagcacaacattctgaaaacttaggtgttattgctgaaagtgtttctttaaacttccaaaaagttcaagaattcaaatcatcagttgttaataaattaactggtggtgttgaaggcttacttaaaggtaacaaagttaacatcgttaaaggtgaagcatatttcgtagataacaatagcttacgtgttatggacgaaaagagcgcacaaacatacaactttaaaaatgcaatcattgcaacaggttcaagaccaattgaaattcctaatttcaaattcggtaaacgtgttatcgactcaacaggtgctttaaacttacaagaagtaccaggtaaattagttgtagttggtggaggatacattggatcagaattaggtacagcatttgctaactttggttcagaagtaaccatccttgaaggtgctaaagatatcttaggtggcttcgaaaaacaaatgacacaacctgttaaaaaaggtatgaaagaaaaaggtgttgaaatcgttactgaagctatggctaaatcagctgaagaaacagataacggagttaaagttacttatgaagctaaaggcgaagagaaaacaatcgaagctgattatgtattagtaactgtaggtcgtcgtccaaacacagacgaattaggcctagaagaattaggtgttaaattcgctgaccgtggattattagaagttgataaacaaagccgtacgtctatcagcaatatctatgcaattggtgatatcgttccaggtttaccacttgctcacaaagctagctatgaagctaaagttgctgctgaagcaattgatggtcaagctgctgaagttgattacattggtatgccagcagtatgctttactgaaccagaattagctacagttggttattcagaagcgcaagctaaagaagaaggtttagcaattaaagcttctaaattcccatatgcagcaaatggtcgtgcattatcattagatgatactaacggatttgttaaacttattacacttaaagaagatgatactttaatcggtgctcaagtagttggtactggtgcatcagatattatctctgaattaggtttagcaattgaagctggtatgaatgctgaagatatcgcattaacaatccatgcacatccaacattaggtgagatgactatggaagcagcagaaaaagctatcggatacccaatccatacaatgtaa

SEQ ID NO: 8837 - DNA, 1293 bp, Staphylococcus aureus
  CDS (1)...(1293)
gtggcatttgaatttagattacccgatatcggggaaggtatccacgaaggtgaaattgtaaaatggtttgttaaagctggagatactattgaagaagacgatgttttagctgaggtacaaaacgataaatcagtagtagaaatcccatcaccagtatctggtactgtagaagaagttatggtagaagaaggtacagtagctgtagttggtgacgttattgttaaaatcgatgcacctgatgcagaagatatgcaatttaaaggtcatgatgatgattcatcatctaaagaagaacctgcgaaagaggaagcgccagcagagcaagcacctgtagctactcaaactgaagaagtagatgaaaacagaactgttaaagcaatgccttcagtacgtaaatacgcacgtgaaaaaggtgttaacattaaagcagtttctggatctggtaaaaatggtcgtattacaaaagaagatgtagatgcatacttaaatggtggtgcaccaacagcttcaaatgaatcagctgcttcagctacaagtgaagaagttgctgaaactcctgcagcacctgcagcagtaacattagaaggcgacttcccagaaacaactgaaaaaatccctgctatgcgtagagcaattgcgaaagcaatggttaactctaagcatactgcacctcatgtaacattaatggatgaaattgatgttcaagcattatgggatcaccgtaagaaatttaaagaaatcgcagctgaacaaggtactaagttaacattcttaccttatgttgttaaagcacttgtttctgcattgaaaaaatacccagcacttaacacttcattcaatgaagaagctggtgaaatcgttcataaacattactggaatatcggtattgcagcagacactgatagaggattattagtacctgttgttaaacatgctgatcgtaagtctattttccaaatttcagatgaaattaatgaattagctgttaaagcacgtgatggtaaattaacagccgatgaaatgaaaggtgctacatgcacaatcagtaatatcggttcagctggtggacaatggttcactccagttatcaatcacccagaagtagcaatcttaggaattggccgtattgctcaaaaacctatcgttaaagatggagaaattgttgcagcaccagtattagcattatcattaagctttgaccacagacaaattgatggtgcaactggccaaaatgcaatgaatcacattaaacgtttattaaataatccagaattattattaatggaggggtaa

SEQ ID NO: 8838 - DNA, 450 bp, Staphylococcus aureus
  CDS (1)...(450)
gtgattgaacttatggacatgaatttcgatttatacatgaacggtgttgtagaacaagcaaggaatgaaattgaatctgcgggatatgagcaattaactactgcagaagatgttgacaaagttcttaaacaagatggtacaacactagttatgatcaattctgtatgtggttgtgcaggtggtatcgcaagaccagcagcatcacatgctttacattatgacgtattacctgatcgtctagtgacagtatttgctggacaagataaagaagcgacacaaagagcgcgtgaatacttcgaaggttatgcgccttcaagtccgtcatttgcattagtaaaagatggaaagattacagaaatgattgaaagacatcaaatcgaaggtcatgatgtgatgaacgtaattaatcaattacaaacattattcaataaatattgtgaagaaagataa

SEQ ID NO: 8839 - DNA, 207 bp, Staphylococcus aureus
  CDS (1)...(207)
atgcgttacgtgatgatgtcgcaactggtgttcaaaatggtgtaccaacaccctggtttctcatcaagtattaattactatgatagttaccgtgctgctgatttacctgcaaacttaattcaagcacaacgtgactacttcggtgctcatacgtacgaaagaaaagataaagaaggcgtattccatacacaatggattgaagaataa

SEQ ID NO: 8840 - DNA, 297 bp, Staphylococcus aureus
  CDS (1)...(297)
atgaaaaaggttttaattgcaaaccgcggtgaaatcgcagttaggattattcgcgcttgtcgtgatttaggcatccaaactgttgcaatctattctgaaggggataaagatgcgctacatactcaaattgctgatgaagcatattgcgtaggtcccactttgtctaaagattcatatttaaatattccgaacatcttatctattgcaacttctacaggttgtgatggcgttcatccgggttatggctttttagctgaaaatgctgattttgcagaattatgcgaacatgccaattga

SEQ ID NO: 8841 - DNA, 1077 bp, Staphylococcus aureus
  CDS (1)...(1077)
atgcgaacatgccaattgaagttcattggaccaagttatcaatctatccaaaaaatgggtatcaaagatgttgctaaggcagaaatgatcaaagccaatgttccagttgttcctggtagtgacggtttaatgaaagacgtctcagaagctaagaaaatcgccaaaaaaattggctatccggtcatcattaaagctactgctggcggtggcggaaaaggtatccgtgttgctcgtgatgaaaaagaacttgaaactggcttccgaatgacagaacaagaagctcaaactgcatttggtaatggtggactttatatggagaaattcatcgaaaacttccgccatattgaaatccaaattgttggggacagctatggtaatgtaattcatttaggagaacgtgattgtacaattcaaagacgtatgcagaaattagtggaagaagcaccttccccaattttagatgatgaaacacgtcgtgaaatgggaaatgccgcagttcgtgcagcgaaagctgtaaattatgaaaatgcgggaacaattgagtttatatatgatttaaatgataataaattttattttatggaaatgaatacacgtattcaagtagaacatcctgtaactgaaatggtaacaggaattgatttagttaaattacaattacaagttgctatgggtgacgtgttaccgtataaacaagaagatattaaattaacaggacacgcaattgaatttagaattaatgctgaaaatccttacaagaactttatgccatcaccaggtaaaattgagcaatatcttgcaccaggtggatatggtgttcgaatagagtcagcatgttatactaattatacgataccgccatattatgattcgatggtagcgaaattaatcatacatgaaccgacacgagatgaagcgattatggctggcattcgtgcactaagtgaatttgtggttcttggtattgatacaactattccattccatattaaattattgaataacgatatatttagaagcggtaaatttaatacaaactttttagagcaaaatagcattatgaatgatgaaggttaa

SEQ ID NO: 8842 - DNA, 1338 bp, Staphylococcus aureus
  CDS (1)...(1338)
atgtcagattatttaagtgtttcagctttaacgaaatatattaaatataaatttgatcaagatccacatctccaatctgtattgattaaaggtgagctttcaaatttcaaaaagcattcaagtggtcatttatactttaatgtgaaagataaagaaagcgttataagtgccatgatgttcaaaggtagtgcttctaaattaaacttcgaacctaaagaaggagatgaagtcttattagaagcacgtgtttctgtttttgaacgtcgtggaaactatcaaatttatgtaaataaaatgcaattagatggtatagggaacttatatcaaaaattagaagcattaaagaaaaaattaactgaagaaggttgttttgataaagcgaataagaaatcaatacctaagtttcctaaaaaaattgcagttttaacagcgagtacaggtgccgcaattcgagatatccattcaacgataaatagtcgttttccattagctgaacaaatacaaattagtactttggttcaaggtgaaaaagcaaaagacgacattattgaaaaaattgaatatgcagatagtttaggtgtagataccattattgtaggtcgaggcggtggatccatagaagatttatggaatttcaacgaagaagctgtcgtccgtgcaatatataattgtaagacaccgattatatcagcagttggtcatgaaacagactttacattaagtgattttgctgcagacatcagagctgcgactccaactcaagctgctgttattgcaacaccagaccaatatgaattgctgcaacaaatacagcaatatcagtttacattgactcgtttcatcaagaaacatttagaacaacaacgtaaacatgttgaacatttgtcatcgtattacaagtttaaacaaccaactttattgtatgatcaacagatacaacgtcgagatgatttagaaaagagactgaaacaacaaattcaggcaacttttgaacaacagagacatcgattaatgctgttgcaacaacgttataatttaaaagcattactaagtagtgttaatcaagaacaacaaaataatcttcaattgacaaaccaacttgttaaattattgaattctaagatattaagttataaaaatgatttgaaaaataaagtagaaaacttaaacaatttaagtccaactaatacaatgttgcgtggatatgcaattgttaataaaaaagacgaagtcattacgagtactaaagatttaacagaaaatgatcaattgacattaacaatgaaagatggcttagtagatgcaaaagttacgaaagtaaggtgtaataatgactaa

SEQ ID NO: 8843 - DNA, 1449 bp, Staphylococcus aureus
  CDS (1)...(1449)
atgggaagttttttcaataaaatagcacgaaaagaggatccggctatctatcaaaataaagatggtcatttaaagcgtacacttcgggtgcgtgatttcttagctttaggtgtaggaacaattgtatcgacatctatctttacgctacctggcattgttgctgcagaacatgcaggaccggccgttgcgttatcattcttactcgctgctattgttgctggtttagttgcatttacttatgcagaaatggctgccgctatgccatttgcaggttcagcctattcttgggtcaatgtattatttggtgaattttttggatgggttgccggttgggctctattagctgaatattttatcgccgtagcctttgttgcatcaggattctcagcgaatttacgcggacttgtgaaaccaattggcatcgaattacctgcagcattatcaaatccatttggtacaaatggcggttttatcgatattattgctgctatcgttattttattaactgcattattactatcacgtggtatgtcggaagcagctcgtatggaaaatattttagttattttaaaagtattagctattattttatttgtcatcgtaggtttaacagcaataaatgttagtaactatgtgccatttattccagaacacaaagtaactgctacaggtgactttggtggatggcaaggcatatatgctggtgtttcaatgattttcttagcgtatatcggtttcgattctatcgcagcaaactcagcagaagcacttgatcctcaaaagacaatgcctagaggtattcttggttctttaagcgttgctatcgtattatttattgctgtagcacttgtgttagttggtatgttccattactcacaatacgcaaacaatgctgaacctgttggttgggctttacgtcaaagtggtcatggtgttgtagcagctattgttcaagctatctctgttatcggtatgtttacagcattaattggtatgatgttagcaggctcacgtttactttattcatttggacgtgacggcttattaccttcatggttaagccacttaaacgacaaacatttacctaatcgcgcactagttatacttactattattggtgttttaattggttctatgttcccattcgcatttttagcacaattaatttcagcaggtacacttgttgcatttatgttcgtttcattagcaatgtatcgtttgagaaagcgtgaaggtaaagatctaccaattcctgcatttaaattacctttatatcctgtgttaccagcaattacatttgttttagtattgctagtattctggggattaggattcgaagcgaaattatacactttaatttggtttattgttggtatcatcctatatttaagttatggacttagacattctaagaaaaatgacgtagctgaataccacccaccaaaataa

SEQ ID NO: 8844 - DNA, 2160 bp, Staphylococcus aureus
  CDS (1)...(2160)
atgagcaaacaaccgcactatgagaatagtcttgtttgttcatgcctgctttttttgtacatggaagcggaaattgagataggggatgtttatatgtttaagaaattgtttggacaattgcaacgtatcggtaaagcattaatgttacctgttgcgattttaccagcagctggtattttattagcgtttggtaacgcaatgcacaacgaacaattagtagaaattgcaccatggttaaaaaacgatatcattgtaatgatttcgtcggtcatggaagcagcaggacaagttgtatttgataacttgccattattatttgcagttggtacagcacttggattagcaggaggagacggtgttgcagcattagcagcgctagtaggttacttaattatgaatgcaacaatggggaaagtgttgcacattacaattgatgacattttctcatatgccaaaggggcaaaagaattaagtcaagcagcgaaagaaccagcacatgctttagtattaggtattccaacgttacaaacgggtgtgtttggtggtattatcatgggtgctttagccgcatggtgttacaacaaattttataatattacactaccaccatttttaggattctttgcaggtaaacgatttgtaccgattgtgacatcggtcgtagcaatcgcaacaggtgtgcttttaagctttgcgtggccaccaattcaagatggattaaatagtttatcgaatttcttattaaataaaaatttaacattaacaacgtttatattcggtattattgaacgctcattaattccatttggtttacatcatattttctattcaccgttctggtttgaattcggaagttatacaaatcacgcaggtgaattggttcgtggtgaccaacgtatttggatggcacaattgaaagatggcgtaccatttactgctggtgcatttactactggtaaatatccatttatgatgtttggtttaccagcggcggcatttgctatttataaaaatgcacgaccagaacgtaaaaaagtcgtgggtggtttaatgttatcagcaggattaactgcatttttaactggtatcactgagccattagaattttcattcttatttgtagcaccagtactttatggaattcacgtattattagctggtacatcattcttagtaatgcatttattaggcgttaaaattggtatgacattctcaggtggtttcatagattatattttatatggtttattaaactgggatcgttcacacgcattattagttattccagtcggtattgtatatgctatcgtgtattacttcttattcgactttgcaattcgtaagtttaaattgaaaacaccaggtcgtgaagatgaagaaactgaaattcgtaactctagtgtcgcaaaattaccatttgatgtcttagatgcaatgggtggaaaagaaaacattaaacatttagatgcatgtattacacgtctacgcgtagaagtggttgataaatcaaaagtagatgtagcaggtattaaagctttaggcgcatcaggtgtattagaagttggaaacaatatgcaagctatctttggtccaaaatcagatcaaattaaacatgatatggccaagattatgagtggtgaaattacgaaaccaagtgaaacgacagtgactgaagaaatgtcagatgaaccagttcacgtagaagcacttggaacaacagacatctatgcaccaggtatcggtcaaatcattccattatcagaagtacctgatcaagtgttcgctggtaaaatgatgggtgatggtgttggctttatccctgaaaaaggtgaaattgtagcaccgtttgatggtacagtgaaaacaatcttccctacgaaacatgcgataggattagaatctgaaagtggcgtcgaagtacttattcatattggtatcgatacagtgaaactgaatggtgaaggattcgaaagtctgattaacgttgatgaaaaagtaacacaaggtcaaccattaatgaaagtgaatttagcatacttgaaagcacacgcaccaagcatcgttacaccaatgattattacaaatcttgaaaataaagaacttgtcattgaagatgtacaagatgctgatccaggtaagctaattatgacagtcaaataa

SEQ ID NO: 8845 - DNA, 1740 bp, Staphylococcus aureus
  CDS (1)...(1740)
atggcaaaaataaaagcaaatgaagcattagttaaagcattacaagcatgggatatagatcacttgtatggtattccaggagactcaatcgacgcagtagtcgatagtttacgtacagtgagagatcaatttaaattttatcatgtacgtcatgaagaagtagcaagcttagcggctgctggttacacaaaattaactggtaaaatcggtgtggcattaagtatcggtggccctggtttaattcatttattaaatggtatgtatgatgccaaaatggataatgtaccgcaattaatattatctggacaaacgaatagtacagcacttggaacgaaagcattccaagaaacaaatttacaaaaattatgtgaagatgtagccgtttataatcaccaaattgaaaaaggtgacaatgtgtttgaaatcgttaacgaagcaattcgtacggcatatgaacaaaaaggtgtagctgttgttatttgtcctaacgacttattaactgaaaaaattaaagatacaacgaataaaccagtagatacatcaagaccaacagtagtatcaccaaaatataaagacatcaaaaaagcggttaaactaattaataaaagtaaaaagcctgtcatgttaattggtgtaggtgcgaaacatgcgaaagatgagctacgtgaatttattgaaatggctaaaattcctgtcattcattcattaccagctaaaacaatcttgccggatgatcatccatatagtatcggtaacttaggtaaaatcggtaccaaaacatcttatcaaacaatgcaggaagcggatttattaattatggttggtacaaactatccatatgtggattacttacctaagaaaaatattaaagccattcaaattgacacaaatcctaaaaatatcggacatcgtttcaatattaatgtaggaattgttggagatagtaaaattgcgttgcatcagttaactgaaaatattaaacatgttgctgaaagaccattcttaaacaaaacgttagaacgtaaagcggtttgggataaatggatggaacaagataaaaataataatagtaaaccattacgtccagaacgattaatggcatcaatcaataaatttattaaagatgatgcagtgatttcagcagatgtaggtacagcaacagtttggtcaactcgatacttaaaccttggtgtaaataacaagttcatcatttcaagttggttaggtacaatgggttgcggtcttccaggtgcaattgcatcaaaaattgcatatccaaatagacaagccatcgcaattgctggtgacggtgcattccaaatggtaatgcaagacttcgctacagcagtacaatatgatttacctttaactgtatttgtacttaataacaaacagttagcatttattaaatatgaacaacaagcagctggtgaattagaatatgcagttgatttttctgatatggatcatgcaaaatttgctgaggcagcaggtggtaaaggttatacaattaagagtgctagcgaagtagatgctatagtcgaagaggcattagcacaagatgtaccaacgattgtagatgtatatgttgatcctaatgctgcgccattaccaggtaaaattgtaaatgaagaagcgcttggttatggtaagtgggcatttagatcaattactgaagataaacatttagatttagatcaaattccaccaatttcagtggcagcaaaacgtttcttataa

SEQ ID NO: 8846 - DNA, 207 bp, Staphylococcus aureus
  CDS (1)...(207)
atgccttatctctatggtgatgatattaataaacttcaaggtaggcctatcgttggcttatctcatgctgccgggtatgcatgtggctatcacttggtaaaatactttttacaaaaaacaaacatacctattgaagttgctacaacacttccagcacaaaaaataataaatgaggtgactgaattttggcatacacatacactttaa

SEQ ID NO: 8847 - DNA, 240 bp, Staphylococcus aureus; identical to SEQ ID NO: 4806
  CDS (1)...(240)

SEQ ID NO: 8848 - DNA, 3690 bp, Staphylococcus aureus
  CDS (1)...(3690)
atgggaaaatttggattgaatttctttaagccaacagaaaaatttaatgggaattggtcgatcctagaaagtaaaagtagagaatgggaaaaaatgtacagagaacgttggagccacgataaagaagtaagaacaacacatggtgttaactgtacaggctcatgttcttggaaagtatttgtgaaaaatggtgtgattacctgggaaaatcaacaaactgactatccaagttgtggtccggatatgcctgaatatgaaccgagaggatgtccacgaggtgcgtcattctcttggtatgaatacagtccgcttcgaatcaaatatccatatattcgtggaaaactctgggatttatggactgaagcattagaagaaaacaatggtaatcgcgttgctgcatgggcgtctattgttgaaaatgaagacaaagccaaacaatataagcaagcccgaggtatgggagggcacgtgcgttcaaattggaaagacgttacagagataatcgcagcacaattactgtatacaataaaaaaatatggtccagatcgaatcgcaggatttacacctattccagcgatgtcaatgattagttatgcagcaggtgctcgattcatcaatttgcttggtggtgaaatgcttagtttttatgactggtatgcagatttaccacctgcctctccacaaatttggggagagcaaacagatgtgcctgaatcaagtgactggtataacgcatcatacattattatgtggggctctaatgtacctttaacacgtactccggatgcacattttatgactgaagtccgctataaaggtacaaaagtcatttcagtagcaccagattacgcagaaaatgtgaaatttgcagataactggctagcaccgaatcctggttcagatgctgcaattgcacaagcaatgacgcatgttattttacaagaacattatgttaatcaacctaatgaacgctttataaattacgctaaacaatatacagatatgccgtttcttatcatgctggatgaagatgaaaatggatataaagcgggtcgatttttaagagcgagtgacttaggtcaaacaacagagcaaggcgaatggaagccagttattcatgatgcaatcagcgatagtttagtagtacctaatggcacaatgggtcaacgttgggaagaaggtaagaagtggaacttaaaactagaaacagaagatggttctaaaattaaccctacattatcaatgacagaaggtggatacgaattagaaacaattcaattcccatactttgatagtgatggagatgggatattcaatcgtccaattccaactcgacaagtcactttagcaaatggtgacaaagtccgtattgctacaatttttgacttaatggcaagtcaatatggcgtgcgtcgttttgatcataaattagaatcaaaaggatacgacgatgcagaatcaaaatatacacctgcttggcaagaagccatttcaggcgtaaaacaaagtgttgtcattcaagtagcgaaagaatttgcgcaaaacgctatcgatactgaagggcgttcaatgattatcatgggtgcgggtattaaccattggtttaactcagatacgatttatcgttcaatcttaaacttagttatgttatgtggctgtcaaggtgtgaacggtggcggttgggctcactatgtgggacaagaaaaatgtcgtccgattgaaggatggagtactgtcgcatttgcgaaagactggcaaggaccaccacgtttgcaaaacggaacaagttggttctattttgcaacagaccaatggaaatatgaagagtcaaatgtagatcgtttaaaatctccattagctaaaacagaggagttaaagtatcaacatccagctgattataatgttttagcagctagacttggttggttaccatcatatccacaatttaataaaaatagtttgttgtttgcagaagaagctaaagatgaaggtatagattcaaatgaagcgattttgcaacgtgcaattgatgaagtgaaatcaaaacaaacacaatttgcaatagaagatcctgatttgaaaaagaatcatccaaaatcattatttatatggcgttcaaacttaatttcaagttctgcaaaaggtcaagaatactttatgaagcatttacttggcacaaaatcagggttattagctacaccaaatgaagatgaaaagccagaagaaattacgtggcgtgaagaaacaacaggtaagttagatttagtggtctctttagacttcagaatgacggcaacaccgttatattctgacattgttttgccggcagcgacttggtatgaaaaacatgatttatcatcaacggatatgcatccatatgtacatcctttcaatcctgccattgatccgttatgggaatcgcgttcagactgggatatttataaaacgttggcaaaagcattttcagaaatggcaaaagactatttacctggaacgtttaaagatgttgtgacaactccacttagtcatgatacaaagcaagaaatttcaacaccatacggcgtagtgaaagattggtcgaagggtgaaattgaagcggtacctggacgtacaatgcctaactttgcaattgtagaacgcgactacactaaaatttacgacaaatatgtcacgcttggtcctgtacttgaaaaagggaaagttggagcacatggtgtaagtttcggtgtcagtgaacaatatgaagaattaaaaagtatgttaggtacgtggagtgatacaaatgatgattctgtgagagcgaatcgtccacgtattgatacagcacgtaatgtagctgatgcaatactaagtatttcatctgctacgaatggtaaattatcacaaaaatcatatgaagatctcgaagaacaaactggaatgccgttaaaagatatttctagcgaacgcgctgctgagaaaatttcgtttttaaatataacttcacaaccacgagaagtaataccgacagcagtattcccaggttcaaataaacaaggtcgacgatattcaccatttacaacgaatatagaacgtctagtaccttttagaacattaacaggacgtcaaagttattatgtggatcacgaagttttccaacaatttggggagagcttaccagtatataaaccgacattgccgccaatggtatttgggaatagagataagaaaattaaaggtggtacagatgctttggtactgcgttatttaacgcctcatggaaaatggaatatacactcaatgtatcaagataataagcatatgttgacactatttagaggtggtccaacggtttggatatcaaatgaagatgctgaaaaacacgatatccaagataatgattggctagaagtgtataaccgtaatggtgttgtaacggcaagagcagttatttcgcatcgtatgcctaaaggtacaatgtttatgtatcatgcacaagataaacatattcaaacgcctgggtcagaaattacagatacacgtggtggttcacacaacgcgccgactagaatccatttgaaaccaacacaactagtcggaggatacgcacaaattagttatcactttaattattatggaccaattgggaaccaaagggatttatatgtagcagttagaaagatgaaggaggttaattggcttgaagattaa

SEQ ID NO: 8849 - DNA, 978 bp, Staphylococcus aureus; identical to SEQ ID NO: 3800
  CDS (1)...(978)

SEQ ID NO: 8850 - DNA, 315 bp, Staphylococcus aureus; identical to SEQ ID NO: 3799
  CDS (1)...(315)

SEQ ID NO: 8851 - DNA, 639 bp, Staphylococcus aureus
  CDS (1)...(639)
atgtataaaatcaatattattagatcagattccgtctataataatatactcaaggcaccaataaacgaccgtgattcaattttcactaaagaaatattagtaccttttaaaaagaaatttgaggtacaacatatgcctatttataatgatgacaaacagacaatgagtgcgattcaatttttagatgcctttcaaatttctcccaaagatttacgcatgtctgaccaaatgtcaatacaatacctgaataatgatttctggagtaattgcgaaaaatatttaaaagttgctatagatcaattttcaaattatagtatctcatctcaagtttctaactatcatttcacagtattacttggagatcgccaaaaaccacttatgtatctaaataaaaatcgcggtggtgatggtggcataccaggttatattatgatttatttagtgccgagtacaagtacaattaattctatgaaaagcttaattgcacatgaagtaaatcataatatgcgctatcaatatattgattgggatggcggaagtttgattgaattgattattgcagaaggattagctgaaaactatgtagaatcattgtatggtaaagcgcatattggaccgtgggtaacaaatactaattga

SEQ ID NO: 8852 - DNA, 270 bp, Staphylococcus aureus; identical to SEQ ID NO: 8226
  CDS (1)...(270)

SEQ ID NO: 8853 - DNA, 1725 bp, Staphylococcus aureus
  CDS (1)...(1725)
atgaatagtgagtttatatatggacgggtaacaaatttaggaggtaagattttgagtttaataaagaaaaagaataaagatattcgcattataccattaggcggtgttggcgaaattgctaaaaatatgtatatcgttgaagtagacgatgaaatgtttatgttagatgctggacttatgtttccagaagacgaaatgctaggtattgatattgttataccagacatttcatacgtacttgaaaataaagataaattgaagggtatattccttacacacggacatgagcacgcgattggtgcagtgagttatgttttagaacaattagatgcaccagtatatggatctaaattgacaatagcgttaattaaagaaaatatgaaagcccgtaatattgataaaaaagttcgctactatacagttaataatgattcaattatgagattcaaaaacgtgaatattagtttctttaatacgacacacagtattcctgatagtttaggtgtttgtattcacacttcatatggtgccattgtgtatacaggtgaatttaagtttgaccaaagtttacatggacattatgcaccagatattaaacgtatggcagagattggtgaagaaggcgtatttgtcttaatcagtgattctactgaggcagagaaacctggatataatactccggaaaatgtgattgaacatcatatgtatgatgcttttgcaaaagtgcgaggtcgcttgatagtttcatgttatgcttcgaactttatacgtattcagcaagttttaaatattgctagcaagctaaatcgtaaagtgtcatttttaggaagatcacttgaaagttcatttaatattgctcgtaaaatggggtatttcgacattcctaaagatttgctaattcctataacagaagttgataattatcctaaaaatgaagtgataattatagctactggtatgcaaggagaacctgtagaagccttaagtcaaatggcgcaacataagcataaaattatgaatatcgaagaaggcgattctgtatttttagcaattacggcttctgctaatatggaagttatcattgcgaatacattaaatgagcttgtacgtgctggcgcacatattattccaaataacaaaaagattcatgcttcaagtcatggttgcatggaagaattaaaaatgatgattaatattatgaaacctgaatactttattcctgtacaaggtgaatttaaaatgcagatagcacatgcgaagctagcagctgaagcaggtgttgcaccagaaaagattttccttgtggaaaaaggagatgtcattaattacaacggtaaagatatgatattaaatgaaaaggtaaattcaggaaatattttaatagatggcattggtattggggatgtaggaaatatcgtgttgagagaccgtcatcttttagcagaagatggtatctttattgctgttgtaacgttagatcctaaaaatagacgtatagctgcgggacctgaaattcaatctcgtgggtttgtatatgtacgtgaaagtgaagacttattacgtgaagcagaagagaaagtacgtgaaatagtagaggctggtttacaagaaaaacgcatagaatggtctgaaattaaacaaaatatgcgtgatcaaattagtaaactattattcgaaagtacaaaacgtcgtcctatgattattccagtaatttctgaaatttaa

SEQ ID NO: 8854 - DNA, 1704 bp, Staphylococcus aureus
  CDS (1)...(1704)
atgaagcaatccaaagtttttataccaacgatgcgtgacgtgccatcagaagcagaagcacaaagtcatcgtttattattgaaatcgggtttgataaaacaaagtacaagtgggatttatagttatttaccgctagcaacacgtgtgttaaataatattactgcaattgtgcgacaagaaatggaacgtatcgattctgttgaaattttaatgccagcgttacaacaagctgaattatgggaagaatcaggacgttggggtgcatatggcccagaattaatgcgtttacaagatagacatggaagacaatttgcattaggtccaacacatgaagaattagttacatcaatagtaagaaatgaattgaaatcatacaaacaattaccgatgacattattccaaattcaatctaaattccgtgatgaaaagagaccacgttttggtttacttcgtgggcgtgaatttattatgaaagatgcatattcattccatgctgacgaggcatcattagatcaaacgtatcaagatatgtatcaagcgtatagccgtatttttgagagagttggcattaacgcaagaccagtagttgcagattcaggtgctataggcggtagccatacacatgaatttatggcattaagtgctatcggtgaggatacaatcgtttacagtaaagaaagtgattatgctgctaacatcgaaaaagcagaagtcgtttacgaaccaaatcataagcatactactgtgcaacctttagaaaaaattgaaacaccaaatgttaagactgcgcaagaattggcagacttcttaggtagaccagtagatgaaatcgttaaaacgatgattttcaaagttgatggcgaatatattatggttttagtgcgtggccatcatgaaattaatgacattaaattaaaatcttatttcggcacagataatattgaattagcaacacaagacgaaattgttaatttagttggtgcaaatcctggttcactaggtcctgtaattgataaagaaatcaaaatttatgcagataattttgtgcaagatttaaataatttagttgtcggtgctaacgaagatggttatcacttaattaatgtaaatgtaggtagagacttcaacgttgatgaatatggcgatttccgttttattttagaaggcgaaaagttaagtgatggttcaggcgttgcacattttgctgaaggtattgaagttggtcaagtattcaaattgggtactaagtattcagaatcaatgaatgctacattcttagataaccaaggaaaagctcaatctttaattatgggttgttacggaattggaatttctagaacgctaagtgcgattgttgaacaaaatcacgatgataatggaattgtttggcctaaatcagttactccgtttgatttacatttaatttctattaatcctaagaaagatgatcaacgagaactagcagatgcactatatgctgaatttaatactaaatttgatgtgttgtacgatgatcgtcaggaacgtgcaggtgttaaatttaatgatgccgatttaattggtttaccactgcgaattgttgttggtaaacgtgcatcggaaggtattgtagaagttaaagaacgtttaacaggtgatagcgaagaagttcacattgatgacttaatgactgtcattacaaataaatatgataacttaaaataa

SEQ ID NO: 8855 - DNA, 1176 bp, Staphylococcus aureus
  CDS (1)...(1176)
gtgtcaagtaatgaattattattagctactgagtatttagaaaaagaaaagaagattcctagagcagtattaattgatgctattgaagcagctttaattactgcatacaaaaagaattatgatagtgcaagaaatgtccgtgtggaattaaatatggatcaaggtactttcaaagttatcgctcgtaaagatgttgttgaagaagtatttgacgacagagatgaagtggatttaagtacagcgcttgttaaaaaccctgcatatgaaattggtgatatatacgaagaagatgtaacacctaaagattttggtcgtgtaggtgctcaagcagcgaaacaagcagtaatgcaacgtcttcgtgatgctgaacgtgaaattttatttgaagaatttatagacaaagaagaagacatacttactggaattattgaccgtgttgaccatcgttatgtatatgtgaatttaggtcgtatcgaagctgttttatctgaagcagaaagaagtcctaacgaaaaatatattcctaacgaacgtatcaaagtatatgttaacaaagtggaacaaacgacaaaaggtcctcaaatctatgtttctcgtagccatccaggtttattaaaacgtttatttgaacaagaagttccagaaatttacgatggtactgtaattgttaaatcagtagcacgtgaagctggcgatcgctctaaaattagtgtcttctctgaaaacaatgatatagatgctgttggtgcatgtgttggtgctaaaggcgcacgtgttgaagctgttgttgaagagctaggtggtgaaaaaatcgacatcgttcaatggaatgaagatccaaaagtatttgtaaaaaatgctttaagcccttctcaagttttagaagttattgttgatgaaacaaatcaatctacagtagttgttgttcctgattatcaattgtcattagcgattggtaaaagaggacaaaacgcacgtctagctgctaaattaaccggctggaaaattgatattaaatcagaaacagatgcgcgtgaagcgggtatctatccagtagttgaagctgaaaaagtaactgaagaagatgttgctttagaagatgctgacacaacagaatcaaccgaagaggtaaatgatgtttcagttgaaacaaatgtagagaaagaatctgaataa

SEQ ID NO: 8856 - DNA, 537 bp, Staphylococcus aureus
  CDS (1)...(537)
atgtggtattcatatgttagtagtacgcaaagaccatctgtcaatgtaattacaggtttaattaaagccaacataccaacaagaattgcatttatggtatcatcaagtgtagattcgagaacgatattagacagtggtggagcagaacgcttgttaggatatggcgatatgttatatcttggtagcggtatgaataaaccgattagagttcaaggtacatttgtttctgatgacgaaattgatgatgttgttgattttatcaaacaacaaagagaaccggactatctatttgaagaaaaagaattgttgaaaaaaacacaaacacaatcacaagatgaattatttgatgatgtttgtgcatttatggttaatgaaggacatatttcaacatcattaatccaaagacatttccaaattggctataatagagcagcaagaattatcgatcaattagagcaactcggttatgtttcgagtgctaatggttcaaaaccaagggatgtttatgttacggaagcagatttaaataaagaataa

SEQ ID NO: 8857 - DNA, 3336 bp, Staphylococcus aureus
  CDS (1)...(3336)
atgagctggtttgataaattattcggcgaagataatgattcaaatgatgacttgattcatagaaagaaaaaaagacgtcaagaatcacaaaatatagataacgatcatgactcattactgcctcaaaataatgatatttatagtcgtccgaggggaaaattccgttttcctatgagcgtagcttatgaaaatgaaaatgttgaacaatctgcagatactatttcagatgaaaaagaacaataccatcgagactatcgcaaacaaagccacgattctcgttcacaaaaacgacatcgccgtagaagaaatcaaacaactgaagaacaaaattatagtgaacaacgtgggaattctaaaatatcacagcaaagtataaaatataaagatcattcacattaccatacgaataagccaggtacatatgtttctgcaattaatggtattgagaaggaaacgcacaagccaaaaacacataatatgtattctaataatacaaatcatcgtgctaaagattcaactccagattatcacaaagaaagtttcaagacttcagaggtaccgtcagctatttttggcacaatgaaacctaaaaagttagaaaatggtcgtatccctgtaagtaaaccttcagaaaaagttgagtcagataaacaaaaatatgataaatatgtagctaagacgcaaacgtctcaaaataaacaattagaacaagaaaaacaaaatgatagtgttgtcaaacaaggaactgcatctaaatcatctgatgaaaatgtatcatcaacaacaaaatcaatgcctaattattcaaaagttgataatactatcaaaattgaaaatatttatgcttcacaaattgttgaagaaattagacgtgaacgagaacgtaaagtgcttcaaaagcgtcgatttaaaaaagcgttgcaacaaaagcgtgaagaacataaaaacgaagagcaagatgcaatacaacgtgcaattgatgaaatgtatgctaaacaagcggaacgctatgttggtgatagttcattaaatgatgatagtgacttaacagataatagtacagatgctagtcagcttcatacaaatggcatagagaatgaaactgtatcaaatgatgaaaataaacaagcgtcaatacaaaatgaagacactaatgacactcatttagatgaaagtccatacaattatgaggaagttagtttgaatcaagtatcgacaacaaaacaattgtcagatgatgaagttacggtttcgaatgtaacgtctcaacatcaatcagcactacaacataacgttgaagtaaatgataaagatgaactaaaaaatcaatccagattaattgctgattcagaagaagatggagcaacgaataaagaagaatattcaggaagtcaaatcgatgatgcagaattttatgaattaaatgatacagaagtagatgaggatactacttcaaatatcgaagataataccaatagaaacgcgtctgaaatgcatgtagacgctcctaaaacgcaagagtacgcagtaactgaatctcaagtaaataatatcgataaaacggttgataatgaaattgaattagcaccgcgtcataaaaaagatgaccaaacaaacttaagtgtcaactcattgaaaacgaatgatgtgaatgataatcatgttgtggaagattcaagcatgaatgaaatagaaaagaataacgcagaaattacagaaaatgtgcaaaacgaagcagctgaaagtgaacaaaatgtcgaagagaaaactattgaaaacgtaaatccaaagaaacagactgaaaaggtttcaactttaagtaaaagaccatttaatgttgtcatgacgccatctgataaaaagcgtatgatggatcgtaaaaagcattcaaaagtcaatgtgcctgaattaaagcctgtacaaagtaagcaagctgtgagtgaaagaatgcctgcgagtcaagccacaccatcatcaagatctgattcacaagagtcaaatacaaatgcatataaaacaaataatatgacatcaaacaatgttgagaacaatcaacttattggtcatgcagaaacagaaaatgattatcaaaatgcacaacaatattcagagcagaaaccttctgttgattcaactcaaacggaaatatttgaagaaagtcaagatgataatcaattggaaaatgagcaagttgatcaatcaacttcgtcttcagtttcagaagtaagcgacataactgaagaaagcgaagaaacaacacatccaaacaatactagtggacaacaagataatgatgatcaacaaaaagatttacagtcatcattttcaaataaaaatgaagatacagctaatgaaaatagacctcggacgaaccaacaagatgttgcaacaaatcaagctgtacaaacatctaagccgatgattcgtaaaggcccaaatattaaattgccaagtgtttcattactagaagaaccacaagttattgagtcggacgaggactggattacagataaaaagaaagaactgaatgacgcattattttactttaatgtacctgcagaagtacaagatgtaactgaaggtccaagtgttacaagatttgaattatcagttgaaaaaggtgttaaagtttcaagaattacggcattacaagatgacattaaaatggcattggcagcgaaagatattcgtatagaagcgcctattccaggaactagtcgtgttggtattgaagttccgaaccaaaatccaacgacagtcaacttacgttctattattgaatctccaagttttaaaaatgctgaatctaaattaacagttgcgatggggtatagaattaataatgaaccattacttatggatattgctaaaacgccacacgcactaattgcaggtgcaactggatcagggaaatcagtttgtatcaatagtattttgatgtctttactatataaaaatcatcctgaggaattaagattattacttatcgatccaaaaatggttgaattagctccttataatggtttgccacatttagttgcaccggtaattacagatgtcaaagcagctacacagagtttaaaatgggccgtagaagaaatggaacgacgttataagttatttgcacattaccatgtacgtaatataacagcatttaacaaaaaagcaccatatgatgaaagaatgccaaaaattgtcattgtaattgatgagttggctgatttaatgatgatggctccgcaagaagttgaacagtctattgctagaattgctcaaaaagcgagagcatgtggtattcatatgttagtagtacgcaaagaccatctgtcaatgtaa

SEQ ID NO: 8858 - DNA, 648 bp, Staphylococcus aureus
  CDS (1)...(648)
atgaaaaagatgatattaattaatgtcattacggttgttgtactgttagcaattgggattgctggcttttatttttggaataaaacaacaagctatgtaacaactgataatgcaaaagtaaatggcgatcaaattaaaatagcaagtcctgcatctggacaaattaaatcacttaatgttaaacaaggtgacaaactcgataaaggtgacaaagtagcaattgttactgtacaaggtcaagatggcgaaacgaaagatatggatcttaaaatgcctcaaaaaggtacaattgccaaattagatggtatggaaggttcaatggtgcaagctggtaacccaatcgcttatgcatacaatttagatgatttatatgtaacagcaaatattgacgaaaaagatattaaagatgttgaagtaggtaaagatgttgatgtgactattgacggtcaaaaagcttctattaaaggtaaagttgatagtattggaaaagcaactgctgcaagcttttcattaatgccatcatcaaatagtgatggtaactacactaaagtttctcaagtaatacctgttaaaatcactctagaatcagaaccgtctaaacaagttgttcctggaatgaacgctgaagtaaaaatccataaaaattaa

SEQ ID NO: 8859 - DNA, 1260 bp, Staphylococcus aureus; identical to SEQ ID NO: 4809
  CDS (1)...(1260)

SEQ ID NO: 8860 - DNA, 900 bp, Staphylococcus aureus
  CDS (1)...(900)
atgggacttgtaattgaacatgttacgaaacgttttggcaagatgacggcagtaaatgatatttcattaaagttagaatcaggtaaaatgttaggttttctaggaagaaatggtgcaggtaaaacaacgacatttcgtatgattttaggcttaagtgaaccaactgaaggacacattacgtataacggtaaaaaactagataaaacaatgtacaatcgtattggttatttaccggaagaacgcggtttacatgggaaattgacagttgaagaagaattgaaatatttggcaactttaaagggaatgtcaaaaacagaaatacaacagcaaatatcgtattggcttgagcgttttgatattactgaaaaccgcaaaaaacgaattgatagtctatcaaaagggaatcaacaaaaaattcagctgttagcaagtatgttacataaaccagaattactaatattagatgagcctttcagtggtctagacccagttaatgttgagttattaaaagaagcagttaaagacttaaatgattggggcagtacaatcgtttatagttctcaccgtatggagcatgttgaagaattatgtgatgatgtttgtattttagataaaggtcaacttgttgtttctggtgatatcaatcatgtacgtgcatctaatggtaacaagaaagttgtcattgaatcagaaacaacactaccagatttaacaaacattagaggcatcattcatagtgaaaacatgaagcaaggtcttcagttgacgattgagaatgaagacgtagccaaagatatttatcaagttgtggcacatcaaggttatgttaaacgattccaagttgtagaaccatcattacaagatatattcattgagaaggttggtggcaaggatgcataa

SEQ ID NO: 8861 - DNA, 1269 bp, Staphylococcus aureus
  CDS (1)...(1269)
atgaagacaatagaagagattaaatcaactcctaaaacagttatgaagaaaccagaattattagcacctgctggaaacttagaaaagttaaaaatagcagtacattatggcgctgatgccgtatttttaggtggtcaagaatatggattacgttcaaatgctgataatttcacgatggaagaaatagctgaaggtgttgaatttgcgaaccgttacggtgccaaaatttatgttacgacaaatattattgcacatgatgagaatattgaaggtctagaatcatatttgcgtaatttggaaaagactggtgcgacaggtatcattgttgcagatcctttaattatcgaaacatgtaaagaagttgcgccaaaacttgaaattcatttatctactcaacaatcactttctaattacaaagctgtagaatattggaaagaagaaggattggatcgtgttgtattagcacgtgagaccggcgcgatggaaatgcgtgaaatgaaggaaaaagtagatattgaaatcgaagcatttattcatggtgctatgtgtatcgcctattcaggtagatgtacattaagtaatcatatgactgcaagggattccaacagaggcggttgctgtcaaagttgccgttgggattatgaattattagaagttgatgataatggtgaacttgatgttttttataatcaaggtgaagttacaccgtttgcgatgagtcctaaagatttaaaattaatcgaatcaattcctcaaatgatggatattggtgtggactcattaaaaattgaaggacgtatgaagtcaattcattatattgcaacagttgtctcagtatatcgtaaagtcattgatgcgtatgcggcagatcctgacaactttaagattaatccggaatggttaatagagttagataaatgtgcaaatagagacactgcaccagcattctttgagggaacacctggttatgaagaacagatgtttggtcaacaacaatctaaaaaatcaccatttgatttttgtggtttggtattagactataatgaagatacaaaaattgcgactattcaacaacgaaataactttaaaccaggtcaagaaatagaattctttggtccagaaattgaaacatttacacaagtagtagaagcaatttatgatgaagaaggtaacagcttagacgcggcgcgccatccattacaaatcgttcaaattaaagtggatcgcccgatatatccaaacaacatgatgagaaaggaaattggctaa

SEQ ID NO: 8862 - DNA, 309 bp, Staphylococcus aureus
  CDS (1)...(309)
atgactgaacataatcatgattcacaactagaaattaataacgaagaagaattattaactttattcgatgaagagggaaatgaagttttataccgaaaagttttagaattttatcatcctgaattcaaaaaagagtatgttatcttagctgaagaaggtgctcaatcagatgaagacgatatgattgagcttgtaccaatgatcaatgaaccagatgagtcaggtgacggtggtaagttagtaccaatcgaaactgatgaagaatgggacatgattgaagaagttgtaaatactgaaatggaagaataa

SEQ ID NO: 8863 - DNA, 429 bp, Staphylococcus aureus; identical to SEQ ID NO: 8460
  CDS (1)...(429)

SEQ ID NO: 8864 - DNA, 270 bp, Staphylococcus aureus
  CDS (1)...(270)
gtgtcgcaaatggaaaactttgataaaacaatgaaattcgactatgaagaacttccaacgcaagatgtaagagatgttttaaataatgtttatcgaacattagatgaacgaggatataatgccgtaaaccaaattgtaggttatttattatcaggtgaccctgcgtatattccacgccaaaatgaagcaagaaatcaaattcgtcatattgatagagatgttattatggaagagcttgtttcttactatttaaaagagcaaaataaataa

SEQ ID NO: 8865 - DNA, 2478 bp, Staphylococcus aureus
  CDS (1)...(2478)
atgtcagaccctacactatttgattattcaatgatcaaaggtactgttgaagcgatattgtttcaaaacagtgataatttttatacagtgcttaaagtagatactattgaaacaaatgaagactttgatacaatgccaactgttgtagggtttcttccgaatattgttgaaggcgatgtctacacatttaaagggcaagttgttgatcatccacgttatggtaaacaattaaaagcagagacttttgaaaaagaaatgccacaaacgaaagaagcaattataagttatttatctagtgatttgtttaaaggtgtaggtaaaaagacagctcaaaatattgttaatacattaggtgacaatgcgataaatgatatattagatgaccattcagtgctagaaaaagtttcgggattatctcaaaagaaacagaaacaaattgcagaacaaatttcagcaaatcaagaatctgaaaaaataatgattcgtttacatgatttagggtttggtcctaaactttcaatggcaatttatcagttttatctcggcgatacactgactattttagatcgaaatccatatcaattgatttatgatattaaaggtattggttttaataaagcagatcaacttgctagaaatattggtatcgcttataacgataatgaacgattaaaagctgcgttgctctatacgttagaagaagaatgtattaaacagggacatacatatttgcctatcaatgttgttatagatttaacggttgatgtattaaattatcaagatgaagaggtcatcgaacctgaaaaattagacgaaatgttgcaatacttaaatgaggaaaaacgactaattattgacaatgaacaagttgcaattccaagtttgtattattctgaaatcaaaagtgttcaaaacttattcagaataaagacgcatacaaataaacttacagaaattgaacagtcagatttacaaatgcatattggtgaaatagaagatgcgaatcaagtgaactatgcagcttcacaaaaagaagctttgcaaacggctatcaattctaaggtgatgctattaaccggtggaccgggaacaggaaaaacgacagtaattaaaggtattgttgaattatatgctgagattcatggcttatcattagattatgatgattatgtcaatgatgattatccagttgtattagcagcgccaacaggaagagcgtctaagagactacaagagtcaactggattagaagcaatgacgattcatcgtttaataggttggaatcaagacacaaagccagaggatatattagaaaatgaaataaacgcacgactcataatcattgatgagatgtctatggtagatacttggttgttccaccaatttttaagtgcagttcctttagatgcacaattgatatttgtaggtgatgaggaccaattgccttctgtaggtcctggtcaagtatttaaagatttaattgaatcgaaagctataccacgagtaaatctgactgaagtatatcgtcaacaagatggttcaagcattatagaattagcacatcgaatgaagttgggtcagaaaattgatattacacagcgttttcatgatagaagttttattaactgtcaggcaaaccaaataccaacagttgttgagaaggtagttactagtgctgttaataaagggtatactatggctgatattcaagtgcttgcaccaatgtataaaggaaatgccggtattaaacgtttaaatcaagttttacaagatattttaaaccctaaaaagaaagacacacgagaaattgagtttggtgatgtagtctttagaaaaggtgacaaagtattacaacttgttaataggccaaatgataacatattcaatggtgacataggagttattgttggtattttttgggcgaaagaaaatgcccttaataaagatgtacttgttgtggattttgaaggtaatgaaattacatttacgaaacaagatatgatggaattaacacatgcttattgtacatcaatccataaatcacaaggttcagaatttcctattgttatcatgcctattgttaaacagtattttagaatgttacaaagaccgatattatatactggtttaactagagcgaaaacgagtttagttttacttggtgatccggaagcatttgatattggattgaaaacaaatggtcaagcgcgtttaacacaattatgtacattgttgaaaaattattttaattcagaagatgaagaaatgctggaaaacacagcaactaatgatacaggagcttcacaaacgacaatagatgatcaagtagaagcgccaatgtcatcgaatgatagtgaagaagttatgtctgattcaacaaaaacagatacaaatgtattaacggaagctacaatgtttaaaattgacccaatgattaatatgggagaaatcacgccgtatgactttatagaacgttga

SEQ ID NO: 8866 - DNA, 276 bp, Staphylococcus aureus; identical to SEQ ID NO: 4859
  CDS (1)...(276)

SEQ ID NO: 8867 - DNA, 705 bp, Staphylococcus aureus
  CDS (1)...(705)
atgacgaatgtcttgtatcaacatggtacattaggtacgttaatggctggcttactagaaggcacagctacaattaatgaattgttagaacatgggaatttagggattgcaacgttaacagggtctgatggcgaagtaatatttttagacggaaaggcatatcatgctaacgagcataaagaatttatagaattaaaaggcgatgagaaagtaccgtatgcatcgattactaattttaaagcgagtaagacatttccattgcaacaattatcacaagatgatgtatttgcacaaattaaaaatgaaatgttaagtgagaatttattttcggctgttaaaatttatggcacatttaaacatatgcatgtacgaatgatgcctgctcagcaaccgccatatacacgtttgattgattcagcacgcagacaacctgaggaaaaaagacaagatattcgtggtgccattgttggattttttacaccagaattatttcatggcgtagggtctgctggttttcatatacattttgcggatgatgaaagagcttatggtggacatgttcttgactttgaagtggatgacgttgtcgttgagatacaaaactttgaaacattccaacaacatttcccggtaaataacgagacgtttgttaaagcgaaaatagactataaagatgtggcagaagaaattagagaagctgaatag

SEQ ID NO: 8868 - DNA, 384 bp, Staphylococcus aureus
  CDS (1)...(384)
atggggtataaattacaaggtgcaacgaaagaagcagcggagcaacttattttagacgcgaaaaatgtagaacaagctggtgcagttgcgttagtacttgaagcaattccaaatgatttagcagaagaaattagcaagcacttaacaattccagtcattggtattggtgcaggaaaaggtacagatggtcaagtattggtttatcacgatatgttaaattatggtgttgaacataaagcgaaatttgtgaagcaatttgctgattttagtgttggtgtggatggtttaaaacaatacgatcaagaagttaaatctggtgcatttccatcagaagaatatacgtataaaaagaaaattatgaatgaggttaataacaatgactaa

SEQ ID NO: 8869 - DNA, 7437 bp, Staphylococcus aureus
  CDS (1)...(7437)
atgaatttattcagacaacaaaaatttagtatcagaaaatttaatgtcggtattttttcagctttaattgccactgttacttttatatctactaacccgacaacagcgtctgcagcagagcaaaatcagcctgcacaaaatcaaccagcacaaccagctgatgccaatacacagcctaacgcaaatgctggtgctcaagctaatcctacagcacagccagctgcacctgccaaccaaggacaaccagcagtacaaccagcaaaccaaggtggacaggctaatccagcaggaggagcagcacaaccaaatacacaaccagctggacaaggtaatcaagctgatccgaataacgctgcacaagcacaacctggaaatcaagcaacaccggcaaaccaagcaggtcaaggaaataaccaagcaacacctaataataatgcaacaccggcaaatcaaacacagccagcgaatgctccagcagcagcgcaaccagcagcacctgtagcagcaaacgcacaaactcaagatccaaatgctagcaatactggtgaaggcagtattaatacgacattaacatttgatgatcctgccatatcaacagatgagaatagacaagatccaactgtaactgttacagataaagtaaatggttattcattaattaacaacggtaagattggtttcgttaactcagaattaagacgaagcgatatgtttgataagaataaccctcaaaactatcaagctaaaggaaacgtggctgcattaggtcgtgtgaatgcaaatgattctacagatcatggtaactttaacggtatttcaaaaactgtaaatgtaaaaccagattcagaattaattattaactttactactatgcaaacgaatagtaagcaaggtgcaacaaatttagttattaaagatgctaagaaaaatactgaattagcaactgtaaatgttgctaagactggtactgcacatttatttaaagtaccaactgatgctgatcgtttagatttacaatttattcctgacaatacagcagttgctgatgcttcaagaattacaacaaataaagatggttataaatactattcattcattgataatgtaggtctattctcaggatcacatttatatgtcaaaaatagagatttagcaccgaaagcaactaacaataaagaatatactattaatactgaaatcggtaacaatggtaattttggtgcttcattaaaagcagatcaatttaaatatgaagtaacattaccacaaggtgtaacttacgttaataattcattaactacaacattccctaatggtaatgaagacagtacagtattgaaaaatatgactgttaattatgatcaaaatgcaaataaagttacatttacaagccaaggtgtgacaacggcacgtggtacacacactaaagaagttttattcccagataaatctttaaaattatcatataaagttaatgttgcgaatatcgatacacctaaaaatattgattttaatgaaaaattaacatatcgtactgcttcagatgttgtaattaataatgcgcaaccagaagttacactaactgcagatccattttcagtagcggttgaaatgaacaaagatgcgttgcaacaacaagtaaactcacaagttgataatagtcattacacaacagcatcaattgcagaatacaataaacttaaacaacaagcagatactattttaaatgaagatgcgaatcatgttaaaactgcaaatcgtgcatctcaagcggatattgatggtttagtaactaaattacaagctgcattaattgataatcaagcagcaattgctgaattagatactaaagctcaagaaaaggttacagcagcacaacaaagtaaaaaagttacgcaagatgaagttgcagcacttgtaactaaaattaacaatgataaaaataatgcaatcgcagaaattaataaacaaactacagcacaaggtgtcacaactgaaaaagataatggtatcgcagtgttagaacaagatgtgattacaccaacagttaaacctcaagcgaaacaagatattatccaagcagttacaactcgtaaacaacaaattaaaaagtcaaatgcatcattacaagatgaaaaagatgtagcaaatgataaaattggtaaaattgaaacaaaggcaattaaagatattgatgcagcaacaacaaatgcacaagtagaagccattaaaacaaaagcaatcaatgatattaatcaaactacacctgctacaacagctaaagcagcagctcttgaagaatttgacgaagttgttcaagcacaaattgatcaagcacctttaaatcctgatacaacaaatgaagaagtagcggaagctattgaacgtattaatgcagctaaagtttctggtgttaaagcaattgaagcgacaacgactgcacaagatttagaaagagttaaaaacgaagaaatctcaaaaattgaaaatattactgactctacgcaaacaaaaatggatgcctataatgaagttaaacaagctgcaacagctagaaaagctcaaaatgctacagtttcaaatgcaacaaatgaagaagtagcagaagctgatgcagcagtagatgcagctcaaaagcaaggtttacatgacatccaagttgttaaatcaaaacaggaagttgctgatacaaaatcaaaagtattagataaaatcaatgcaattcaaacacaagcaaaagttaaacctgcagctgatacggaagtagaaaacgcatataatacacgtaaacaagaaattcaaaatagcaatgcttcaactacagaagaaaaacaagctgcatatacagaattagatactaaaaagcaagaagcaagaacaaatcttgatgctgcaaatacaaacagtgatgtaacaacagctaaagacaatagtattgctgcaattaatcaagttcaagctgccacaactaagaaatcggatgcaaaagcggaaatcgctcaaaaagcaagtgaacgtaaaacagcaattgaagcaatgaatgattcgactactgaagaacaacaagcagcgaaagacaaagtggatcaagcagtagttactgcaaacgctgatatagataatgctgcagcaaacaatgatgtggataatgcaaaaactacaaatgaagctacaatcgcagccattacacctgatgcaaatgttaaaccagcagcaaaacaagcaattgcagataaagtacaagctcaagaaacagcaattgatggaaataacggctcaacaactgaagaaaaagcagctgctaaacaacaagttcaaactgaaaaaacaacagctgatgccgcaatagatgcagcacatacaaatgcggaagttgaagcggctaaaaaagcagcaattgctaaaattgaagcgattcagccagcaacaacaactaaagataatgcgaaagaagcaattgctacgaaagcgaatgaacgtaaaacagcaatcgctcaaacgcaagacattactgctgaagaaattgcagcggctaatgcggacgtagataatgctgtgacacaagcaaatagcaacattgaagctgctaatagtcaaaatgatgtagaccaagcgaaaacgacaggtgaaaatagtattgatcaagtaacaccaacagttaataaaaaagcaactgcacgtaatgaaatcacagcaattttaaataacaaattgcaagagattcaagctacgccagatgcaacagatgaagaaaaacaagcagctgatgctgaagcaaatactgaaaatggtaaagcaaatcaagccatttcagcagcaactactaacgcacaagttgatgaagctaaagcaaatgcagaagcagcgattaatgcggtaacaccaaaagttgtgaagaaacaagcggctaaagatgaaattgatcaattacaagcaacgcaaacaaatgttatcaataatgatcagaacgctacaacagaagaaaaagaagcagctattcaacaattagcaacagcagttacagacgcgaaaaataatattacagctgcaactgatgataatggtgtagatcaggcgaaagacgctggaaagaattcaattcaaagcacgcaaccagcaacagcggttaaatcaaatgctaaaaatgatgttgatcaagctgtgacaactcaaaatcaagcaattgataatacaactggtgctacaactgaagagaaaaatgcagcaaaagatttagttttaaaagctaaagaaaaagcgtatcaagatatcttaaatgcacaaacaactaatgatgttacgcaaattaaagatcaagcagttgctgatattcaaggtattactgcagatacaacaattaaagatgttgcgaaagatgaattagcaacaaaagcaaacgaacaaaaagcgcttattgcacaaactgcagatgcgactactgaagaaaaagaacaagcaaatcaacaagtagacgcacaattaacacaaggtaatcaaaatattgaaaatgcacagtcaatcgatgatgtaaacactgcaaaagataatgcaattcaagcaattgacccaattcaagcatcaacagatgttaaaacgaatgcaagagcggaattgctaactgaaatgcaaaataaaataactgaaatacttaataataatgagactactaatgaagaaaaaggtaacgatattggaccagttagagcagcatatgaagaaggtttaaataatattaatgcagcaactactacaggtgatgtaactactgctaaagatacagcagtacaaaaagttcaacaacttcatgcaaatcctgttaagaaaccagcaggtaaaaaagaattagatcaagctgcagctgataagaaaacacaaatagaacaaacaccaaatgcatcacaacaagaaattaatgatgcaaaacaagaagttgatactgaattaaatcaagcgaaaacaaatgtcgatcaatcatcaacaaatgaatatgttgataatgcagttaaagaaggaaaagctaaaattaatgcagttaaaacatttagtgagtacaaaaaagatgctttagctaaaattgaagatgcatataatgctaaagtaaacgaagcggataactctaacgcatcgacttcaagtgaaattgctgaagcgaaacaaaaacttgctgaattaaaacaaactgcggatcaaaatgttaatcaagctacttctaaagatgacattgaagttcaaattcataatgacttagataatattaacgattacacaattccaacaggtaaaaaagaatcagctacaacagatttatatgcttatgcagatcagaagaaaaataatatttcagctgacactaatgcaacacaagatgaaaagcaacaagcaattaagcaagttgaccaaaatgttcaaactgcattagaaagcattaataatggtgtggataatggtgacgttgatgatgcattaacacaaggtaaagcagcaattgatgctattcaagtagatgctactgttaaacctaaagcgaaccaagctattgaagttaaagcagaagatacgaaagaatctattgatcaaagtgaccagttaactgctgaagaaaaaactgaagcattagcaatgattaaacaaattacagatcaagctaaacaaggtattactgatgcaacaacaactgctgaagttgaaaaagcgaaagctcaaggacttgaagcatttgataacattcaaatcgactcaacagaaaaacaaaaagctatcgaagaattagaaactgcactagaccagattgaagcaggtgtaaatgtcaacgctgatgctacaactgaagaaaaagaagcgtttacgaatgctttagaagacattttatcaaaagcaactgaagatatttctgatcaaactacaaatgcagaaatcgctactgtcaaaaatagtgcgcttgaacaacttaaagcacaacgtattaatcctgaagttaagaaaaatgctttggaagcaatcagagaagtggttaacaagcaaatagaaataattaaaaatgcagatgcagatgcatcggcgaaagaaattgcacgtacggatttaggtagatattttgacagatttgctgataaattagataaaacacaaacaaatgcagaagttgctgaattacaaaatgtaacgatacctgcaattgaagcgattgtgcctcagaatgatccagatgctaatgatactaataatggtatagataataatgatgcaacagcaaattcaaatgctaatgcaacaccagaaaatactggacaacctaacgtatctgagacgacagctaatggcaaagcagacgcttctccgacaacaccaaataatagtgatgcggcaacaggtgaaacaacagcaacatcagcaactgatgatgcaaatgataaaccgcaagctaataacaattctagtgtagatgcatcaacaaacagtccgacaatggataacgatgtaactagtaaaccagaagtagaatcaactaataacggcacaactgataaacctgtaacagaaactgataatgcaacgccagcagaaagcacaacaaataacaatagtacaactacagcaacaaacgagaatgcaccaacaggatcaacagcaacggctccaacaactgcgagcacagaagcagcatcatctgctgatagcaaagataatgcatctgtaaatgattcaaaacaaaatgctgaagtaaataatagtgctgaatctcaatcaactaatgacaaggttgcacaaccaaaatctgaaaataaagctaaggcagaaaaagatggtagtgattcaacaaatcaaagtatggttgaatcaacaactgaaacattgccttcagcagacataacagaaccaaatgtaccttctaatacatcaaaagataaagaagaaagtacgacaaatcaaactgatgcaggacaacttaagtctgaaactaacgttgcatctaacgaagcagataaatcgccaagcaaagctgatactgaagtttcgaataaaccatcaacatctgcatcttctgaagcaaaagaaaaaatgacttcaactaatgttagccaaaaagatgatacggcaacagcagatactaatgatacgcaaaaatcagttggttcagctgcaaacaataaagctacgcaaaacgacggtgccaatgcatctccagctacagtttcaaatggaagcaatagtgctaatcaagatatgcttaatgtaactaacactgacgaccaccaagctaagacaaaatcagctcaacaaggaaaagttaataaagctaaacaacaagctaaaactttaccagatactggtatgtcacataatgacgatttaccatatgctgaattagctctaggtgcaggtatggcattcttaattagaagattcactaagaaagaccaacaaactgaagaataa

SEQ ID NO: 8870 - DNA, 444 bp, Staphylococcus aureus
  CDS (1)...(444)
gtgtacaaaatgagcgaattatttagtaatgacaatatctttttaaatgtaaatgttaacagccaaaatgaagcaattgaaaaagcaggtaaagccttagttgatagtggtgctgtaacagatgcttatattcaagcaatgaaagatcgtgagcaagtcgtatcaacatttatgggaaatggcttagcaattcctcatggcacagatgaagctaaaacaaatgtgattcactcaggtttaacattattacaaatccctgaaggcgttgactgggatggcgaagtagttaaagttgtcgtgggaattgctggtaaagatggcgaacatttagacttgttatctaaaattgcaattacatttagcgaagaagaaaatgtggatcgtatcgttcaagcaaaatctgcagaagaaattaaacaagtattcgaggaggcagatgcataa

SEQ ID NO: 8871 - DNA, 177 bp, Staphylococcus aureus; identical to SEQ ID NO: 8470
  CDS (1)...(177)

SEQ ID NO: 8872 - DNA, 1857 bp, Staphylococcus aureus
  CDS (1)...(1857)
atgattaaatggaggaattttattatgagtaaaattattggtatagacttaggtacaacaaattcatgtgtaacagtattagaaggcgatgagccaaaagtaattcaaaaccctgaaggttcacgtacaacaccatctgttgtagctttcaaaaatggagaaactcaagttggtgaagtagcaaaacgtcaagctattacaaacccaaacactgttcaatctattaaacgtcatatgggtactgattataaagtagatattgaaggtaaatcatacacaccacaagaaatctcagctatgattttacaaaacttaaaaaatacagctgaaagctatttaggtgagaaagttgacaaagctgtaattacagtacctgcatactttaacgatgctgaacgtcaagcaactaaagatgctggtaaaattgctggtttagaagttgagcgtatcattaatgaaccaacagctgcagcattagcatatggtttagacaaaactgataaagatgaaaaagttcttgtttttgacttaggtggcggtacatttgacgtatctatcctagaattaggtgacggtgtattcgaagtactatcaacagccggtgacaacaaacttggcggtgatgattttgaccaagtaattattgactacctagttgcagaattcaaaaaagaaaatggcgtagacttatctcaagataaaatggcattacaacgtttgaaagatgctgctgaaaaagctaaaaaagacttatcaggtgtatcacaaactcaaatctcattaccatttatctcagctggtgaaaacggtccattacacttagaagtaaacttaactcgttctaaatttgaagaattatcagattcattaattagaagaacaatggaacctacacgccaagcaatgaaagacgctggcttaacaaactcagatatcgatgaagttatcttagttggtggatcaactcgtattccagcagtacaagaagctgtcaaaaaagaaatcggtaaagagcctaacaaaggagtaaacccggacgaagtagtggcaatgggagctgcaatccaaggtggcgttatcacaggtgacgttaaagacgtagtattattagacgtaacaccactatctttaggtattgaaattttaggtggacgtatgaatacgttaattgaacgtaacactacgattcctacatctaaatctcaaatctattcaacagcagtagataatcaaccatcagtagatgtacacgtattacaaggtgaacgtccaatggctgcggataataaaacacttggtagattccaattgactgatattccaccagctgaacgtggtaaacctcaaattgaagtaacgtttgatatcgataaaaacggtattgtaaatgtaactgcaaaagacttaggtacaaataaagaacaaagaattacaattcaatcaagttcttcattatcagacgaagaaatcgaccgtatggtaaaagatgctgaagttaacgctgaagcagataaaaaacgtcgtgaagaagtagacttaagaaacgaagctgacagtctagtattccaagttgaaaaaactttaactgatttaggcgaaaatatcggtgaagaagataaaaaatctgctgaagagaaaaaagacgctcttaaaactgctttagaaggtcaagatatagaagatattaaatctaaaaaagaagaacttgaaaaagtgattcaagaattatcagcaaaagtatatgagcaagcggctcaacagcaacaacaagcacaaggtgctaatgctggtcaaaacaatgatagtactgtagaagatgctgaatttaaagaagtaaaagacgacgacaaaaaataa

SEQ ID NO: 8873 - DNA, 762 bp, Staphylococcus aureus
  CDS (1)...(762)
gtgaataatgtgcaacgttatttcatagaccaaaacgctgatgtaagtcagcgtttttttattacaaaaaaagaagatattcatcatataacaaatgtaatgagatatgatgttggtagtaaaattattttaacttttaatgatcaaacagtttatttatgtgaaattgctgacataacaagtgataaaattgaagttgatttaaaagaaaaacaaaatattaatacagaattgccagttgatgttacgatttgcagtggactaatcaaagctgacaaatatgagtggttgctacaaaaagctactgaattgggtgcttcatcatttatagctgtgagcatggaacgttcaattgttaaattaaacgaggcaaaagttgccaaaaagatagagcgttggcaaaaaataattaaagaagctgctgaacaaagctatcgtttagtgattccatctattcaattcgagtcgaatttaaaattaatttgtgatactattgataattatgactatattcttattgcatatgaagaggaagcaaaagatggtgagttaagcaatttcaagcaaactttacaacaattcaatgctcaggataaagtgttgatgatttttggtcctgagggtggtttgtcagaaaatgaaatttcattatttagtaatactagtacagttgttggtcttgggccgagaattttacgggcagaaactgcgccattgtatgcgttaagtgcaataagttatgaaaaagaattaatggggtga

SEQ ID NO: 8874 - DNA, 633 bp, Staphylococcus aureus
  CDS (1)...(633)
atgacgatgaggatagcgattgaaaagataattggtttgctgaaaaaccagtcctctaaagaatcgaatgttaagattcatcgcttggcgtatattacaaactcaaaatttgatggcaataactatatagatagatggtgtaaaatcaggaattctcacattggtgaatacagttatattggatttggtagtgattttaataatgtagaagtaggaagatattgttcgatatcttcggatgtaaaaattgggttaggaaaacatcctacacacttttttagctcatcaccgattttttattctaataataatccatttaacataaagcaaaagtttatagactttaatgaccaaccaagccgtacaacaattaaaaatgatgtgtggattggtgcaaatgtaattattatggatggtttaacaataaatactggtgcagtcatagcagccggctcagttgttactaaaaatgtaggagcatatgaggttgttggtggtgttcctgcaaaagtgattaagaagcgatttgacaataaaacaattgaaaaacttttggaaagcaagtggtgggagaaaacgcctgacaaactaaaaggattttcggttgaatatttaaataaaaaggatacttaa

SEQ ID NO: 8875 - DNA, 855 bp, Staphylococcus aureus
  CDS (1)...(855)
gtgaattgcgaaatcgcttcggaaaaaaatgttgatatcgttcctattatagcggatgtgcaaaatagagcgcgtatgtttgaaattatggaaacgtataaaccatacgcagtttatcatgcagcagcacacaagcacgtgccgttaatggaagacaaccctgaagaagcagtacgtaataatattttaggtacgaaaaatactgctgaagctgctaaaaatgcagaggtaaagaaattcgttatgatttctacggataaagccgttaatccgcctaatgtcatgggagcttcaaagcgaattgcagaaatgattattcaaagtttaaatgatgaaacgcatcgaacaaattttgttgcagtgagatttggtaatgtacttggatcgagaggatctgtgattccacttttcaaaagtcaaattgaagaaggtgggccagttactgtgacacatcctgaaatgacacgttactttatgacaattcctgaagcttctagactagttttgcaggcaggggcattagcagaaggtagcgaagtatttgtgctagatatgggagaaccagtgaaaattgtagatttggcacgtaatttaattaagctaagtggtaaaaaagaagacgacatacgcattacttatacagggattagacccggcgaaaaaatgtttgaagagcttatgaataaagatgaggttcatcctgaacaagtatttgaaaaaatttatcgtggcaaagtacaacatatgaaatgtaatgaagttgaagcgattattcaagacatcgtcaatgactttagtaaagaaaaaattattaactatgccaatggcaaaaagggagataattatgttcgatga

SEQ ID NO: 8876 - DNA, 1092 bp, Staphylococcus aureus
  CDS (1)...(1092)
atgataaaaaaattcctaaacgaatgccacaacaagattataaacagaaaagatggtttgggttataaacagcaaatgaggggttttatggcacatttatctgtgaaattgcggcttttaatactagcattaatcgattcactgatagtgacattttcagtattcgtaagttattacattttagaaccgtatttcaaaacatattctgtcaaattattaatattggcagctatatcactattcatatcgcatcatatttcagcatttatttttaatatgtatcatcgagcgtgggaatatgccagtgtgagtgaattgattttaattgttaaagctgtgacgacatctatcgttattacgatggtggtcgtgacaattgttacaggcaatagaccgttttttagattgtatttaattacttggatgatgcacttgattttaataggtggctcaaggttattttggcgtatttatcggaaataccttggaggtaagtcatttaataagaagccaactttagttgttggtgctggtcaagcaggttcaatgctgattagacaaatgttgaaaagtgacgaaatgaaacttgaaccggtattagcagtcgatgatgacgaacataaacgcaatatcacaattactgagggtgtaaaagtccaaggtaaaattgcggatattccagaactagtgaggaaatataagattaaaaaaatcatcattgcaattccaactattggtcaagagcgtttgaaagaaattaataatatttgccatatggatggcgttgagttattgaaaatgccaaatatagaagacgtcatgtctggtgagttagaagtgaaccaacttaaaaaagttgaagtagaagatttactaggcagagatcctgttgaattagatatggatatgatatcaaatgaattgacgaataaaactattttagttacgggtgcaggtggttcaataggatcagaaatttgtagacaagtttgtaatttctatccagaacgtattattctacttggccatggtgaaaacagtatttatttaatcaatcgtgaattgcgaaatcgcttcggaaaaaaatgttga

SEQ ID NO: 8877 - DNA, 558 bp, Staphylococcus aureus
  CDS (1)...(558)
atgaagcgattattcgatgtagtgagttcaatatatggtttagtagttttaagtccgattctgttaattacagcattactaattaaaatggaatcacctggaccagccattttcaaacaaaaaagaccgacgattaataatgaattgtttaatatttataagtttagatcaatgaaaatagacacacctaatgttgcaactgatttaatggattcaacatcgtatataacaaagacagggaaggtcattcgtaagacctctattgatgaattgccacaattattgaatgttttaaaaggagaaatgtcaattgtaggtcctagaccagcgctttataatcaatacgaattaatcgaaaaacgtacaaaagcgaacgtgcatacgattagaccaggtgtgacaggactagctcaagtgatggggagagatgatatcactgatgatcaaaaagtagcgtatgatcattattacttaacacatcaatctatgatgcttgatatgtatatcatatataaaacaattaaaaatatcgttacttcagaaggtgtgcatcactaa

SEQ ID NO: 8878 - DNA, 255 bp, Staphylococcus aureus; identical to SEQ ID NO: 8279
  CDS (1)...(255)

SEQ ID NO: 8879 - DNA, 861 bp, Staphylococcus aureus
  CDS (1)...(861)
atgcctttagtttcaatgaaagaaatgttaattgatgcaaaagaaaatggttatgcggtaggtcaatacaatattaataacctagaattcactcaagcaattttagaagcgtcacaagaagaaaatgcacctgtaattttaggtgtttctgaaggtgctgctcgttacatgagcggtttctacacaattgttaaaatggttgaagggttaatgcatgacttaaacatcactattcctgtagcaatccatttagaccatggttcaagctttgaaaaatgtaaagaagctatcgatgctggtttcacatcagtaatgatcgatgcttcacacagcccattcgaagaaaacgtagcaacaactaaaaaagttgttgaatacgctcatgaaaaaggtgtttctgtagaagctgaattaggtactgttggtggacaagaagatgatgttgtagcagacggcatcatttatgctgatcctaaagaatgtcaagaactagttgaaaaaactggtattgatgcattagcgccagcattaggttcagttcatggtccatacaaaggtgaaccaaaattaggatttaaagaaatggaagaaatcggtttatctacaggtttaccattagtattacacggtggtactggtatcccgactaaagatatccaaaaagcaattccatttggtacagctaaaattaacgtaaacactgaaaaccaaatcgcttcagcaaaagcagttcgtgacgttttaaataacgacaaagaagtttacgatcctcgtaaatacttaggacctgcacgtgaagccatcaaagaaacagttaaaggtaaaattaaagagttcggtacttctaaccgcgctaaataa

SEQ ID NO: 8880 - DNA, 1611 bp, Staphylococcus aureus
  CDS (1)...(1611)
atgacaaaatttatttttgtaacaggtggcgtagtttcatcattagggaagggtattacagcatcttctctaggtagattattaaaagatagaggtctaaatgtaacaattcaaaaattcgatccatacttaaatgttgacccaggtacaatgagtccttatcaacatggtgaagtattcgtaacggatgatggtgcagaaactgacctagacttaggacattacgaaagatttattgatattaatttaaacaagttttcaaatgtgacagccggtaaagtgtattcacacgtattgaaaaaagaacgtcgtggtgattacttaggcggaacagttcaagttattccgcatattacaaatgaaattaaagaacgtttattacttgcaggggaaagtacgaatgcagacgttgttatcactgaaattggcggtacaacaggtgatattgagtcattaccgtttattgaagcgattcgtcaaattcgtagcgatttaggtagagaaaatgttatgtatgttcactgtacattactgccttatattaaagctgctggagaaatgaaaacgaagccaacacaacatagtgttaaagaattacgaggcttaggtattcaaccagacttaatcgttgtaagaactgaatatgaaatgacacaagatttaaaagataaaattgcattattctgtgacattaataaagaaagtgttattgaatgtcgtgatgcagactctttatacgaaattccattacaattaagccaacaaaatatggatgatatcgttattaaacgtttacaattaaacgcgaaatatgaaacgcagcttgatgaatggaaacagttgttagatatcgttaataatttagatggtaaaattacaattggtttagtaggtaaatatgttagcttacaagatgcatatttatcagttgttgaatcattgaaacatgctggatatccttttgccaaagatattgacattagatggattgattcaagtgaagtaacagatgaaaatgcagccgaataccttgcagatgtcgacggtattttagtaccaggtggatttggtttccgtgcaagtgaaggtaaaattagtgcaattaagtatgctagagaaaacaatgtaccattctttggtatttgtttaggaatgcaacttgcaacagttgaattttcaagaaacgtattaggccttgaaggcgcacattcagctgaattagacccagcaacaccatacccaattatagatttattaccagaacaaaaagatatcgaagatttaggtggtacattacgcttaggcttatatccatgttcaattaaagaaggcacattggcacaagatgtttatggtaaagcggaaattgaagaaagacatcgtcatcgttatgaatttaataatgactatagagaacaattagaagcaaatggtatggtgatttctggtacaagtccagatggacgtttagtagaaatggtagagattccgacaaatgatttctttattgcttgtcaattccacccagaattcttatctagaccaaatcgtccgcacccgatttttaaatcatttattgaagcttcattaaaatatcaacaaaataaataa

SEQ ID NO: 8881 - DNA, 570 bp, Staphylococcus aureus; identical to SEQ ID NO: 4807
  CDS (1)...(570)

SEQ ID NO: 8882 - DNA, 630 bp, Staphylococcus aureus
  CDS (1)...(630)
atgagtaaagtacacgttttcgatcatccattaattcaacacaaactaagctatattagagatgtaaatacaggtactaaagaatttagagaacttgtagacgaagttggtatgttgatggcatatgaagtaactagagacttagagcttcaggatgttgatattgaaacgcctgtaactaaaatgacggctaaacgattagctggtaaaaaattagctatcgttccaattttaagagctggtttaggtatgactgatggtattttaagtttagtacctgcagccagagttggacatatcggtttatatcgagatcccgaaacattaaaggctgtagagtattttgctaagttacctcaagatattactgaaagacaaatcattgttgttgatcctatgttagcaacaggcgcatcagcaattgaagctattacttcattgaagaaacgtggcgctaaaaatattcgcttcatgtgtttaattgcagcaccagaaggcgtagaaaagatgcatgaagcacatccagatgtagatatttatattgctgcacttgatgaaaagctaaatgacaaagcatatatcacaccagggttaggcgacgctggagatagattgtttggtactaaatag

SEQ ID NO: 8883 - DNA, 1032 bp, Staphylococcus aureus
  CDS (1)...(1032)
atggatatgaaaatcgtagcattatttccagaagcagtagaaggtcaagaaaatcaattacttaatactaaaaaagcattaggattaaaaacatttttagaggaaagaggacatgagttcattatattagcagataatggtgaagacttagataaacatttaccagatatggatgtgattattagtgcgccattttatcctgcatatatgactcgtgaacgtattgaaaaagcaccgaacttgaaattagcaattacagcaggtgtaggatctgaccatgtagatttagcggcagcaagtgaacacaatattggtgtcgttgaagttacaggaagtaatacagttagtgtggcagaacatgcggttatggatttattaatacttcttagaaactatgaagaaggtcatcgtcaatcagtagaaggtgaatggaacttgtctcaagtaggtaatcatgcgcatgaattacaacacaaaacaattggtatttttggatttggtcgaattggacaacttgttgctgaaagattagcgccatttaatgtaacattacaacactatgatccaatcaatcaacaagaccataaattgtctaaatttgtaagctttgatgaacttgtttcaacaagtgatgcgattacaattcatgcaccattaacaccagaaactgataacttatttgataaagatgttttaagtcgtatgaaaaaacacagttatttagtgaatactgcacgtggtaaaattgtaaatcgcgatgcgttagttgaagcgttagcatccgagcatttacaaggatatgctggtgatgtttggtatccacaacctgcacctgctgatcatccatggagaacaatgcctagaaatgctatgacggttcactattcaggtatgactttagaagcacaaaaacgtattgaagatggagttaaagatattttagagcgtttcttcaatcatgaacctttccaagataaagatattattgttgcaagtggtcgtattgctagtaaaagttatacagctaaatag

SEQ ID NO: 8884 - DNA, 360 bp, Staphylococcus aureus
  CDS (1)...(360)
gtgaatactatagatacgcatactaaagaacaacaattctcgaatctagtaagatcttatcgtaaagaatacgtgggtaaaggacccaatagtattcgagtgtcgtttaaagataattgggcgattgcacatatgacaggtgttttgagtaaagttgagagtttttacctaaacgacaaacgcaatgaatcgatgctccattatacacgcacagagaagattaaacagatgtataaagaaatagatgtaaatgagatggaaagtcttgtaggcgctaagtttgtaaaattatttacagatattgatttgaatgatgatgaagtcatttcaatatttgttttcgataagtcaatagaataa

SEQ ID NO: 8885 - DNA, 204 bp, Staphylococcus aureus; identical to SEQ ID NO: 4808
  CDS (1)...(204)

SEQ ID NO: 8886 - DNA, 2349 bp, Staphylococcus aureus
  CDS (1)...(2349)
atgagacaaaaaacattagacgtcttagaatttgaaaaaataaaatcactcgttgccaatgaaactattagtgacttaggcttggaaaaggtcaatcaaatgatgccagctactaattttgaaacggttgtttttcaaatggaagaaacggatgagattgctcaaatctataataagcatcgtttaccaagcttgagtggcttatctaaagtatcagcattcattcatcgcgctgatattggcggcgttttaaatgtatcagagcttaacttgataaaaagattaattcaagtacaaaatcaattcaagacattttataatcaattggttgaagaagatgaaggtgttaaatacccaatattagatgacaagatgaatcaattacctgtgttaactgatctttttcaacaaataaatgaaacatgcgatacgtatgatttatatgataatgcgagttatgaattgcaagggattagaagtaaaatttctagcacgaatcaacgtattagacaaaatttggaccgtattgttaaaagccaagcaaatcagaaaaaattatcagatgctattgtaacagttaggaatgaaagaaacgttatacctgtcaaagctgaatatcgacaagattttaatgggattgtacatgatcaatctgcttcaggacaaacattgtatattgagccatcatcagttgttgaaatgaataatcaaattagtcgattacgtcatgacgaagcaattgaaaaagaacgcattttaacgcaactaactggttatgtggctgcggacaaagatgcactacttgtggcagaacaagtcatgggtcagttagattttttaatcgcaaaagcgagatatagtagaagtattaaaggaacaaagccgatatttaaagaggaccgtactgtatatttacctaaagcataccatccattattaaatcgtgagactgttgtagctaataccatcgaatttatggaagatattgaaacggtaattattacaggaccgaatacaggtggtaaaactgtaacattaaaaacattaggtttaattattgttatggctcaatcaggattgttgattcccacacttgatggtagtcagttaagtgtatttaaaaatgtatattgcgatatcggagatgaacaatcaatagaacaatcattatcaactttttcatctcatatgacgaatatagttgaaattttaaagcatgcagacaaacatagtttagttttatttgatgaattaggtgcaggtacagatccgagtgaaggtgctgcattagcaatgagcattttagatcatgttagaaaaattggttctctagtaatggcaacgacgcactatcctgaacttaaagcatatagttataatcgagaaggcgttatgaatgcgagtgtagaatttgatgtagatactttgagtccaacgtataagttattaatgggtgtgccgggtcgttcaaatgcttttgacatttctaaaaagttaggtcttagtttgaatattattaataaggctaagacgatgattggtactgatgaaaaagaaataaatgaaatgattgaatcattagagcgtaattacaaacgtgtagagacacagaggttagaactggaccgtcttgtaaaagaagcggagcaagtgcatgatgatttatctaagcagtatcaacaattccaaaattatgaaaagtctctaatagaggaagcgaaagaaaaagcaaatcagaagattaaggctgcaacaaaagaagctgacgatattattaaagacttaagacaattgcgtgaacaaaaaggtgcagatgttaaagaacatgaattgattgataagaagaaacgattagatgatcattatgaagcgaaatctataaagcaaaatgtacaaaagcaaaaatacgataaaattgttgctggtgatgaagtaaaagtattatcttacggtcaaaagggtgaagttttagaaattgtcaatgatgaagaagcaattgttcaaatgggaattattaaaatgaagttacctattgaagatttagagaaaaaacaaaaagaaaaagttaagccaacgaaaatggttacacgtcaaaatcgtcaaacaattaaaactgaacttgacttacgaggctatcgttatgaggatgctttaattgaactagatcaatatttagatcaagccgttttaagtaattacgaacaagtttatatcattcatggtaaaggtacaggtgcacttcaaaaaggtgtacaacaacatttgaaaaagcataaaagtgttagtgactttagaggtggtatgccaagcgaaggtggatttggcgttaccgttgcaacactaaaataa

SEQ ID NO: 8887 - DNA, 2403 bp, Staphylococcus aureus
  CDS (1)...(2403)
atgttgatatcaaatgaatggttgaaagaatatgtaacaatcgatgattctgtaagtaatttggcagaacgtattacgcgcacaggtattgaagtggatgatttaattgactacacaaaagatatcaaaaatttagttgtcggcttcgttaagtcaaaagagaaacatcctgatgctgataaattaaatgtttgccaagttgatatcggagaagacgaacctgtacaaatcgtttgtggtgcaccgaacgttgatgcaggacaatatgtcattgttgctaaagtaggtggcagattgcctggtggtattaaaattaagcgtgccaaattacgcggtgaacgttcagaaggtatgatttgttcgttacaagaaattggtatttcaagtaactatataccgaaaagttttgaatcaggcatttatgtatttagtgaagcccaagttccaggaacagatgccttacaagctttatatttagatgatcaagtaatggaatttgatttaacgccgaatcgtgcagatgctttaagtatgataggtactgcttatgaagttgcagcattatataatacaaaaatgactaagccagagacaacatcaaatgagcttgatttatctgcaaatgatgaactgactgtgacaattgaaaatgaagataaagtaccatattatagtgcacgtgttgttcacgacgtgacaattgaaccctcgccaatttggatgcaagcacgcttaataaaagcgggtatacgtcctattaataatgttgttgacatttcaaattatgtgttattagaatacggtcaaccattgcacatgtttgatcaagatgcgattggttcacaacaaattgttgttcgtcaagctaatgaaggcgaaaaaatgacaacattagatgatacagaacgtgaattattaacgagcgatattgtcattactaatggacaaactccaattgcattagctggtgttatgggtggcgatttttcagaagttaaagaacaaacatcaaatatagtgattgaaggtgctatttttgatccagtttcaattcgtcatacatcaagacgtttaaatttacgcagtgaatcatctagtcgttttgaaaaaggaatagctactgaatttgtagatgaagcagtcgaccgtgcatgttatttattacaaacttatgcaaacggaaaagtgctaaaagatagagtgtcttcaggagaacttggtgcatttattacaccaatcgacatcactgctgataaaattaatcgcactattggatttgatttgtcacaaaatgatattgttactatttttaatcaactagggtttgatacagaaataaatgatgatgttattacagtgctagtaccatcacgtcgtaaagatattacaattaaagaagatttaattgaagaagttgcacgtatatatggatacgacgatattccatcaacgttacctgtcttcgataaagttactagtggtcagctaactgatcgccaatataaaactagaatggttaaagaagtgttagaaggtgctggattagaccaagctattacgtattcgttagtttctaaagaagatgctactgcattttcgatgcaacagcgtcaaacaattgatttattgatgccaatgagtgaagcgcatgcgtcattacgtcaaagtttattaccacatttaatcgaagcggcatcatataatgtggcacgcaaaaataaagatgtaaaattatttgaaatcggcaatgtcttctttgctaatggagaaggtgaactaccagatcaagttgaatatttaagtggtattttaactggagattatgtagtcaatcaatggcaagataagaaagaaacggttgatttctatttagcaaaaggtgtcgtggatcgagtatctgaaaagttaaatcttgaatttagttatcgccgtgctgatattgatggattacatccaggtcgtactgctgaaatcttattagagaataaagttgttggttttattggtgaattacatccaatattagcagctgataatgatttaaaacgtacgtatgtttttgagttgaattttgatgcattaatggctgtgtcggtaggttacattaattaccagccaattccgagattcccaggcatgtctcgtgacattgcattagaagtagatcaaaatattccagcagctgatttattatcaacgattcatgcacatggtggcaatatattaaaagatacacttgtctttgatgtatatcagggcgaacatttagaaaaaggtaaaaaatcaattgcaatacgtttaaattatttagacacagaagaaacattgacagatgagcgcgtttcaaaagtacaagcggaaattgaagcagcattaattgaacaaggtgctgttattagataa

SEQ ID NO: 8888 - DNA, 741 bp, Staphylococcus aureus
  CDS (1)...(741)
atggaacaaattacttctgcacaaaataatagaattaaacaagcgaacaagctaaaaaagaaacgtgagagggataaaactggattagctttaattgaaggtgtgcatttaattgaagaagcttatcaaagtggaattgtaattacacaattatttgcaattgaaccggcaagattagatcagcaaattatcgcatacgcgcaagaagtttttgaaataaacatgaaagttgctgaatctttatcaggtacagtgacaccacaagggtttttcgcaatcattgagaagccgcattatgatatttctaaagcacaacaagtattgctcatcgatcgtgttcaagatcctggaaatttaggcacattaattagaactgcggatgctgctggaatggatgctgtaataatggagaagggtacgacagatccttatcaagataaagtgttgcgagcgagtcaaggtagtgttttccatttgccagttatgacacaagatctcgatacgtttattactcaatttaatggtcctgtttatggtacagcacttgaaaacgcagtggcatacaaagaagttacttcaagtgattcttttgcattactattaggtaatgagggagaaggtgttaatcctgaattattagcacatactacacaaaatttaatcatacctatttatggtaaagctgaaagtttaaatgtagcgattgcaggtagtattttactttatcatttgaaaggttga

SEQ ID NO: 8889 - DNA, 969 bp, Staphylococcus aureus
  CDS (1)...(969)
atgatgataaaaaataaaaagaaactactatttttatgtttgttagtcattttaatcgcaactgcttatatttcgtttgtaaccggtacaattaaattgtcatttaatgacctatttacaaaatttacaactggtagcaatgaagcagtggattcaatcattgatttgcgattgccacgtatattaattgcattgatggttggcgcaatgttagcagtttctggagcattattacaagcagcactacaaaatcctttggcagaggcgaatatcattggcgtttcctcaggtgcacttataatgagagcactttgtatgttgtttattccacaattgtacttttacttaccattattaagttttattggaggtttaataccatttttaataattatattgttgcattctaaatttagattcaatgctgtaagtatgatattagtaggtgttgcgttattcgtattattaaatggtgttttagaaattttaactcaaaaccctttaatgaaaattcctcaaggcttaacaatgaaaatatggagcgacgtatacatattagcagtatcagcattattgggattaatattaacattactattgtcccctaaattgaatttactaaatttagacgacatacaagcgcgaagtatcggttttaatattgatcgttacagatggttaacaggtttattagcagtatttttagcaagtgcaactgttgcgattgttggacaactagcctttttaggtattattgtgccacatgtggttagaaagctagttgggggcaattacagagtacttattccgttttctacagttattggtgcatggctattgttagtggctgatttattaggacgagtgatacagcctcctttagaaattccagccaatgctattttaatgattgtcggtggtccaatgctaatttacttaatttgtcaaagtcaacgaaatcgaatctaa

SEQ ID NO: 8890 - DNA, 588 bp, Staphylococcus aureus
  CDS (1)...(588)
atgaaagagattgttattgcatcgaataatcaagggaaaataaatgactttaaagtaatatttccagattaccacgtaataggtatttcagaactaataccagattttgatgtggaagaaacaggatcaacatttgaagaaaatgctatattaaaatcagaagctgctgcaaaagcattgaataaaacggtcatagctgatgacagtggactagaagtttttgcattaaatggtgagccaggtatatactctgcacgttatgctggtgaaaataaaagcgatgaagcaaatattgaaaaattattaaataagcttggtaatacaactgatcgtcgtgcgcaatttgtttgtgtcataagtatgagtggccctgatatggaaacaaaagtatttaaaggtactgtttcaggtgaaattgcagatggaaaatatggcgaaaatggtttcggatatgatccgatattttatgtaccgaaattagataaaaccatggctcaactttcaaaagaacaaaaagggcaaattagtcatagacgaaatgcgattaatttacttcaagcttttcttgaaggtgataaaaatgtctaa

SEQ ID NO: 8891 - DNA, 801 bp, Staphylococcus aureus
  CDS (1)...(801)
atgaataaaccaataggtgtaatagactctggtgtcggaggtttgacagtagctaaagaaattatgcgtcagttgccaaatgagacgatttattacttaggtgatattggacgatgtccatatgggccaagaccaggagaacaagtaaaacaatatacagttgaaatcgctcgtaaattaatggaatttgatataaaaatgctcgtgattgcttgtaatacagcaactgctgtagctttagaatatttacaaaagaccttatcaatcccagtgattggcgtaattgaaccaggtgctagaacagcaataatgactactagaaatcaaaatgtattagtactaggaacggaaggcacaattaaatctgaagcatatcgtacgcatattaaacgtatcaatccacatgtagaggtacatggcgttgcctgtccaggttttgtgccacttgtagaacaaatgagatatagtgatccaacaattacaagcattgtcattcatcaaacactgaaacgttggcgtaatagtgagtctgatactgtcattttaggatgtacccactatccattgctctataaacctatctatgattattttggtggtaaaaagacagtgatttcgtctggattagaaacggctcgtgaagttagtgcattgctaacatttagtaatgaacatgcaagttatactgaacatccagatcatcgattttttgcaacaggtgatcctactcacattactaacattatcaaagagtggttaaatttatctgtcaatgtggaacgtatatcagtgaatgactag

SEQ ID NO: 8892 - DNA, 2730 bp, Staphylococcus aureus
  CDS (1)...(2730)
gtgtatgcagaaataaattttatagcatttaattgtgaagaatattatgatattgctatcgaggtgaaggttatgtcaaacactgaatcgctaaacataggaaaaaagcgtggatctttaacaatttacatcggttacagtccaggtgttggtaaaacatttgagatgctttcaaatgccattgaactatttcaaagtaacgttgatattaaaataggatatattgaaccgcatcagcgtgatgaaacaaatgcattagctgaacaattacctaaaatcacaaccaattttactaaacatggtagtcatcattttcaatatttagatgtcgaccgcataatcgaagaatcgccgacaatagtacttatcgatgagttagcacatacgaatatttctagagatcgtcatgagaaacgatatatggatattgaagaaattttaaatcatggtatcgatgttcataccactttgaacattcaacatattgaaagtttaagtagtcaaattgaactgatgaccggtgtacatgttaaagaacgtgtacccgactatttcataatgagcgccgatgtattagaagtcgtagatatctcacctgaacaattaattaaacgcttaaaagctggcaaggtatataaaaaggataggctagatgtagcatttagtaatttctttacgtatgcccacctaagcgaactgcgtacattgacgttaagaacagttgccgacttgatgagtgataaagaaaaagtccgacacaaccataaaacgtcactcaaacctcatattgctgtggcaattagtgggagcatttataatgaagcagtaattaaagaggcattccatattgctcaaaaagaacatgcgaagttcactgctatttatatagatgtattcgaaaaaaacaggcaatataaagatagtcaaaagcaagtgcatcaacatctcatgcttgcaaaatcattaggagcaaaagtaaaagtagtttatagccaaaccgttgcattaggattagacgaatggtgtaaaaatcaagatgtaaccaaattaattatcggacaacatattagaaataagtggcgagactttttcaatacacctttaattgaccatttaatgtcctttgaacatagctataaaatcgaaatcgttccaatcaaacaaatacctgttgaattgaaaatgaacaaatcaccctatcgtcctaaaggcaaacgtttcgccatagatatgttaaaaatgattttgattcaaataatttgtgtaatgatgggactgtggatttatcaacttgataagcatgagtctagtacgattattttaatgatttttctcatcggcatcattttattatccatttggacgcggtccttcatcattggctttttagcagcaattattaacgtatttgtttttaattatttttttacggaacctagatatacatttgaagtatatcgctttgactatcctattacatttatcgttagcattttaacaagtattttaacgagtgctttattaaaacaaattaaattccaatactccattactaaaaagcaactttatcgtacagatttattatttcaatttaatgattcgattaaacaaacttatacagttgaaaacttactaataaatgctggataccaaattaatcaattattgcaacaatcaattactatatacgttatcaatcaatcgaaagtaattaaaacaataccattgcaaaaccatatcgataatacgactcaacagcatgaacaagcattaagctgggtaattaaaaatgaaagacaagctggtgcaacaacagatacatttccaggcattaataaatggttgataccaattggcacatctccgattaaaggcattctagccattgattaccaaagttctcaagtgattaatccatatgatgcatcaatattagaatcaatgttaaatgaactttctctcgccgttgaaaatgtgacgttacttaaacaaacgagagaatccatgttacaggctgaacgtcaactgacacattcaaattttttaagatcaatttcgcatgacatacgtacaccgttaacaacaattatgggaaatttagatattttagtatcacatagtaaagatatgtctatcatagaaaaggaacaattacttgtacatagttttcaagaaagtcagtatttatatctattagtgacaaatattttatcattaacaaaattacagtcatcaaatgttcagataaaattgcaaccttatctcgttagtgaattagtagaagaaatcgatatgattttagaacgtcgccatttaaaaaagcgtataactgtatcatcctcagtaaatttacagtttatacacattgacagtaagttgattttacaagctttattcaatttgattgaaaatgcagttaaacacacttctactgacaccaaaatcaatttatctattcgttatgctagctatgaacaaatcgaatttgccgttatagacgaaggacctggaattagtttagaagaacaacaaaagatattcgagcctttttacacaggatcaaataaatattttaaagataaccaaaaagaaagcatgggactaggcttatatttagtacagactatcctacacaaacatcaatcaaacttacaatataaaccgaaccaaccacacggcagtatattctatttcaatatatatacagactttaacgaaggagacgtataa

SEQ ID NO: 8893 - DNA, 1464 bp, Staphylococcus aureus
  CDS (1)...(1464)
atgggatttaaagagccgacacctatccaaaaagacagtatcccttatgcgttacaaggaattgatatccttgggcaagctcaaaccggtacaggtaaaacaggagcattcggtattcctttaattgagaaagtagtagggaaacaaggggttcaatcgttgattttagcacctacaagagaattggcaatgcaggtagctgaacaattaagagaatttagccgtggacaaggtgtccaagttgttactgtattcggtggtatgcctatcgaacgccaaattaaagccttgaaaaaaggcccacaaatcgtagtcggaacacctgggcgtgttatcgaccatttaaatcgtcgcacattaaaaacggacggaattcatactttgattttagatgaagctgatgaaatgatgaatatgggattcatcgatgatatgagatttattatggataaaattccagcagtacaacgtcaaacaatgttgttctcagctacaatgcctaaagcaatccaagctttagtacaacaatttatgaaatcaccaaaaatcattaagacaatgaataatgaaatgtctgatccacaaatcgaagaattctatacaattgttaaagaattagagaaatttgatacatttacaaatttcctagatgttcatcaacctgaattagcaatcgtattcggacgtacaaaacgtcgtgttgatgaattaacaagtgctttgatttctaaaggatataaagctgaaggtttacatggtgatattacacaagcgaaacgtttagaagtattaaagaaatttaaaaatgaccaaattaatattttagtcgctactgatgtagcagcaagaggactagatatttctggtgtgagtcatgtttataactttgatatacctcaagatactgaaagctatacacaccgtattggtcgtacgggtcgtgctggtaaagaaggtatcgctgtaacgtttgttaatccaatcgaaatggattatatcagacaaattgaagatgcaaacggtagaaaaatgagtgcacttcgtccaccacatcgtaaagaagtacttcaagcacgtgaagatgacatcaaagaaaaagttgaaaactggatgtctaaagagtcagaatcacgcttgaaacgcatttctacagagttgttaaatgaatataacgatgttgatttagttgctgcacttttacaagagttagtagaagcaaacgatgaagttgaagttcaattaacttttgaaaaaccattatctcgcaaaggccgtaacggtaaaccaagtggttctcgtaacagaaatagtaagcgtggtaatcctaaatttgacagtaagagtaaacgttcaaaaggatactcaagtaagaagaaaagtacaaaaaaattcgaccgtaaagagaagagcagcggtggaagcagacctatgaaaggtcgcacatttgctgaccatcaaaaataa

SEQ ID NO: 8894 - DNA, 357 bp, Staphylococcus aureus
  CDS (1)...(357)
gtgttgacgttgtgttttatgggatatagtatagtaaggaatgtaaatgaaggagtgaatgctatgactgaacaagataatgcacatcattctgaacaaataaaaacgaatcttaaatcacgtttaaatcgaattgaaggacaagtgagagcgattaatcgcatgattgaagaagatgtctattgtgatgatgtccttacgcaaataagagcgacacgttcggcgttaaacagtgttgcgataaagttattagaacaacatatgaaaagttgtattatgaataaagttaatcaaggtgctcaggaagaggcaatggaagagttattagtgacttttcaaaaattgattaaagactaa

SEQ ID NO: 8895 - DNA, 1278 bp, Staphylococcus aureus
  CDS (1)...(1278)
atgatgaaattaattaaaaacggtaaagtattacaaaatggcgaattacaacaagcagatattttaattgatggtaaggtaattaaacaaattgcacctgcaattgaaccaagcaatggtgttgacatcatagatgcgaaaggtcactttgtgtcacctggatttgtcgatgttcatgttcatttacgtgaacctggtggtgaatataaagagacaattgaaactggtactaaagctgctgctagaggcggatttacaactgtatgtccaatgcctaacacaagaccggtaccagattctgtagaacattttgaagctttacaaaaattaatcgatgacaatgctcaagtacgtgtattaccttatgcttcaattacaacacgtcaattaggtaaagaattggttgatttcccagcactagtaaaagaaggtgcctttgcgtttacagatgacggtgtaggagtacaaactgcaagcatgatgtatgaaggcatgattgaagctgcaaaagtaaacaaagccatcgtagcacactgtgaagataattcattaatctatggtggtgcaatgcatgaagggaaacgcagtaaagagttaggtataccaggtattccaaacatttgtgaatctgttcaaatcgcaagagatgtactattagctgaagcagcaggttgtcattatcatgtatgtcatgtttctactaaagaaagtgttagagtcattcgtgacgctaaacgcgcaggcattcatgttacagctgaagttacaccacaccatttattgttaacagaagatgatattcctggtaataatgccatttataaaatgaatccaccattgagaagtactgaagatagagaggctttgttagaagggttactagacggtacaattgactgtatcgcaacagaccatgcaccacatgcacgtgatgaaaaagcacaaccaatggaaaaagcaccattcggaattgttggtagtgaaacagcattcccattattatatacgcattttgtaaaaaatggtgattggacattacaacaattagtagattacttaacaattaaaccatgtgagacatttaatttagaatacggcacattaaaagaaaatggttatgcagatttaacaatcattgatttagatagtgaacaagaaattaaaggagaagatttcttatcaaaagcagataatacaccatttatcggctataaagtttatggaaatccgatcttaacaatggttgaaggcgaagttaaatttgagggggataaataa

SEQ ID NO: 8896 - DNA, 564 bp, Staphylococcus aureus; identical to SEQ ID NO: 8080
  CDS (1)...(564)

SEQ ID NO: 8897 - DNA, 2763 bp, Staphylococcus aureus
  CDS (1)...(2763)
gtgaaaaaaatggattacaaagaaacgttattaatgcctaaaacagatttcccaatgcgaggtggtttaccaaacaaggaaccgcaaattcaagaaaaatgggatgcagaagatcaataccataaagcgttagaaaaaaataaaggtaacgaaacattcattttacatgatggcccaccatacgcgaatggtaacttacatatgggacatgccttgaacaaaattttaaaagactttattgtacgttataaaactatgcaagggttctatgcaccatacgtaccaggttgggatacacatggtttaccaattgaacaagcattaacgaaaaaaggtgttgaccgaaagaaaatgtcaacagctgaattccgtgagaaatgtaaagaatttgctttagaacaaattgaattacagaaaaaagattttagacgtttaggtgttcgtggtgactttaatgatccatatattacattaaaacctgaatacgaagctgcacaaattcgtatttttggagaaatggcagataaaggtttaatttataaaggtaaaaagccagtttattggtctccttcaagtgagtcttcattagcagaagcagaaattgaatatcacgataaacgttcagcatcaatttacgttgcatttgacgttaaagatgacaaaggtgtcgttgatgcagatgctaaatttattatctggacaacaacgccatggacaattccatcaaatgttgcgattaccgttcatcctgaattaaaatatggtcaatacaatgtaaatggcgaaaaatatattattgcagaagccttgtctgacgctgtagcagaagcactggattgggataaagcatcaatcaaattagaaaaagaatacacaggtaaagaattagagtatgttgtagcacaacatccattcttagacagagaatcgttagtgattaatggtgatcatgttactacagatgctggtacaggttgtgtacatacagcaccaggtcacggggaagatgactatattgttggtcaaaaatatgaattgccagtaattagtccaatcgatgataaaggtgtatttactgaagaaggcggccaatttgaagggatgttctatgataaagctaataaagccgttactgatttattaacagaaaaaggtgcactattaaaattagactttattacacatagctatccacacgactggagaacaaaaaaacctgtaatcttccgtgctacaccacaatggtttgcctcaatcagtaaagtaagacaagatattttagatgcaatcgaaaatacaaacttcaaagtaaattggggtaaaacacgtatttacaatatggttcgtgaccgtggcgaatgggttatttctcgtcaacgtgtgtggggtgtaccgttaccagtattttatgctgaaaatggcgaaattatcatgacgaaagaaacagtgaatcatgttgctgatttatttgcagaacacggttcaaatatttggtttgaaagagaagcgaaagacttactaccagaaggatttacacatccaggcagccctaacggtacatttactaaagaaacagacattatggacgtttggtttgattctggttcatcacaccgtggcgtgttggaaacaagaccggaattaagtttcccagcggatatgtatttagaaggtagtgaccaatatcgtggttggttcaactcttctatcacaacttcagttgctacaagaggagtatcaccttataaattcttactttctcatggttttgttatggacggtgaaggtaagaaaatgagtaaatctttaggtaatgtgattgtacctgaccaagtggttaaacaaaaaggtgctgatattgcgagactttgggtaagtagtacggactatttagctgatgttagaatttctgatgaaattttaaaacaaacatctgatgtttatcgtaaaatcagaaatacattaagatttatgttaggtaacattaacgatttcaatcctgacacagatagcattcctgaatcagagttattagaagtggatcgttacttgctaaatcgtttacgtgaatttactgcaagtacgattaacaactatgaaaactttgactacttaaatatttatcaagaagttcaaaactttatcaatgttgagttaagtaatttctatttggattacggtaaagatattttatatattgaacaacgtgattctcatatccgtcgtagtatgcaaacagtgttatatcaaattttagttgatatgacgaagttgttagcaccaatcttagtgcatacagctgaagaagtttggtctcatacaccacatgttaaagaagaaagtgttcacttagcagacatgcctaaagttgtagaagtagatcaagctttattggataaatggcgtacatttatgaatttacgtgatgatgtgaaccgtgcattagaaactgctcgtaatgaaaaagttattggtaaatcattagaagctaaagttacgattgctagtaacgataaatttaatgcatctgaattcttaacttcatttgatgcattacatcaattatttatcgtgtcacaagttaaagttgtagataagttagacgatcaggcaacagcttatgaacatggtgatattgtcatcgaacatgcagatggtgaaaaatgtgaaagatgttggaactattcagaggatcttggtgctgttgatgaattgacgcatctatgtccacgatgccaacaagttgtaaaatcacttgtataa

SEQ ID NO: 8898 - DNA, 18846 bp, Staphylococcus aureus
  CDS (1)...(18846)
gtgggacaagccaatagattagaagacgtacaaactgttcaaacaaatggacaagcattgaacaatgcaatgaaaggcttaagagatagtattgctaacgaaacaacagtcaaaacaagtcaaaactatacagacgcaagtccgaataaccaatcaacatataatagcgctgtgtcaaatgcgaaaggtatcattaatcaaactaacaatccgactatggatactagtgcgattacccaagctacaacacaagtgaataatgctaaaaatggtttaaacggtgctgaaaacttaagaaatgcacaaaacactgctaagcaaaacttaaatacattatcacacttaacaaataaccaaaaatctgccatctcatcacaaattgatcgtgcaggtcatgtgagtgaggtaactgctactaaaaatgcagcaactgagttgaatacgcaaatgggtaacttggaacaagctatccatgatcaaaacacagttaaacaaagtgttaaatttactgatgcagataaagctaaacgtgatgcgtatacaaatgcggtaagcagagctgaagcaattctgaataaaacgcaaggtgcaaatacgtctaaacaagatgttgaagcggctattcaaaatgtttcaagtgctaaaaatgcattgaatggtgatcaaaacgttacaaatgcgaagaatgcagctaaaaatgcattaaataacttaacgtcaattaataatgcacaaaaacgtgacttaacaactaaaattgatcaagcaacaactgtagctggtgttgaagctgtatctaatacgagtacacaattgaatacagcgatggctaacttgcaaaatggtattaatgataaaacaaatacactagcaagtgaaaactatcatgatgctgattcagataagaaaactgcttatactcaagccgttacgaacgcagaaaatattttaaataaaaatagtggatcaaatttagacaaaactgccgttgaaaacgcgttgtcacaagttgctaatgcgaaaggtgccctaaatggtaaccataatttagagcaagctaaatcaaatgcaaacactactataaacggacttcaacatttaacaactgctcaaaaagataaattgaaacaacaagtgcaacaagcacaaaatgttgcaggtgtagatactgttaaatcaagtgccaacacattaaatggtgctatgggtacgttaagaaatagcatacaagataacacagctacgaaaaatggccaaaactatcttgatgctacagaacgtaacaaaacaaactataacaatgctgttgatagtgctaatggtgtcattaatgcaacaagcaatccaaatatggatgctaatgcaattaaccaaatcgctacacaagtgacatcaacgaaaaatgcattagatggtacacataatttaacgcaagcgaaacaaacagcaacaaatgccatcgatggtgctactaacttaaataaagcgcaaaaagatgcgttaaaagcacaagttacaagtgcgcaacgtgttgcaaatgtaacaagtatccaacaaactgcaaatgaacttaatacagctatgggtcaattacaacatggtattgatgatgaaaatgcaacaaaacaaactcaaaaatatcgtgacgctgaacaaagtaagaaaactgcttatgatcaagctgtagctgctgcgaaagcaattttaaataaacaaacaggttcaaattcagataaagcagcagttgaccgtgcattacaacaagtaacaagtacgaaagatgcattgaatggtgatgcaaaactggcagaagcgaaagcggcagctaaacaaaacttaggcactttaaaccatattacgaatgcacaacgtactgacttagaaggccaaatcaatcaagcgacgactgttgatggcgttaatactgtaaaaacaaatgccaatacattagacggcgcaatgaatagcttacaaggttcaatcaatgataaagatgcgacattaagaaatcaaaattatcttgatgcggatgaatcaaaacgaaatgcatatacgcaagctgtcacagcggctgaaggcattttaaataaacaaactggtggtaacacatctaaagcagacgttgataatgcattaaatgcagttacaagagcgaaagcggctttaaatggtgctgacaacttaagaaatgcgaaaacttcagcaacaaatacgattgatggtttacctaacttaacacaattacaaaaagacaacttgaagcatcaagttgaacaagcgcaaaatgtagcaggtgtaaatggtgttaaagataaaggtaatacgttaaatactgccatgggtgcattacgtacaagtatccaaaatgataatacgacgaaaacaagtcaaaattatcttgatgcatctgacagcaacaaaaataattacaatactgctgtaaataatgcaaatggtgttattaatgcaacgaacaatccaaatatggatgctaatgcgattaatggcatggcaaatcaagtcaatacaacaaaagcagcgttaaatggtgcacaaaacttagctcaagctaaaacaaatgcgacgaacacaattaacaacgcacatgacttaaaccaaaaacaaaaagatgcattaaaaacacaagttaacaatgcacaacgtgtatctgatgcaaataacgttcaacacactgcaactgaattgaacagtgcgatgacagcacttaaagcagctattgctgataaagaaagaacaaaagcaagcggtaattatgtcaatgctgatcaagaaaaacgtcaagcgtatgattcaaaagtgactaacgctgaaaatatcattagtggtacaccgaatgcgacattaacagtcaatgacgtaaatagtgcggcatcacaagtcaatgcggctaaaacagcattaaatggtgataacaacttacgtgtagcgaaagagcatgccaacaatacaattgacggcttagcacaattgaataatgcacaaaaagcaaaattaaaagaacaagttcaaagtgcaactacattagatggtgttcaaactgttaaaaatagttctcaaacgttgaatacagcgatgaaaggcttaagagatagtattgcgaatgaagcaacaattaaagcaggtcaaaactacactgacgcaagtccaaataatcgtaacgagtacgacagtgcagttactgcagcaaaagcaatcattaatcaaacatcgaacccaacgatggaaccaaatactattacgcaagtaacatcacaagtgacaactaaagaacaggcattaaatggtgcgcgaaacttagctcaagctaagacaactgcgaaaaacaacttgaataacttaacatcaattaacaatgcacaaaaagatgcgttaacgcgtagcattgatggtgcaacaacagtagctggtgtaaatcaagaaactgcaaaagcaacagaattaaataacgcaatgcatagtttacaaaatggtatcaatgatgagacacaaacaaaacaaactcagaaatacctagatgcagagccaagtaagaaatcagcttatgatcaagcagtaaatgcagcgaaagcaattttaacaaaagctagtggtcaaaatgtagacaaagcagcagttgaacaagcattgcaaaatgtgaacagtacgaagacggcgttgaacggtgatgcgaaattaaatgaagctaaagcagctgcgaaacaaacgttaggtacattaacacacattaataatgcacaacgtacagcgttagacaatgaaattacacaagcaacaaatgttgaaggtgttaatacagttaaagccaaagcgcaacaattagatggtgctatgggtcaattagaaacatcaattcgtgataaagacacgacgttacaaagtcaaaattatcaagatgctgatgatgctaaacgaactgcttattctcaagcagtaaatgcagcagcaactattttaaataaaacagctggcggtaatacacctaaagcagatgttgaaagagcaatgcaagctgttacacaagcaaatactgcattaaacggtattcaaaacttagatcgtgcgaaacaggctgctaacacagcgattacaaatgcttcggacttaaatacaaaacaaaaagaagcattaaaagcacaagtaacaagtgcaggacgtgtatctgcagcaaatggtgttgaacatactgcgactgaattaaatactgcgatgacagctttaaagcgtgccattgctgataaagctgagacaaaagctagtggtaactatgtcaatgctgatgcgaataaacgtcaagcatatgatgaaaaagttacagctgccgaaaatatcgttagtggtacaccaacaccaacgttaacaccagcagatgttacaaatgcagcaacgcaagtaacgaatgctaagacgcagttaaacggtaatcataatttagaagtagcgaaacaaaatgctaacactgcaattgatggtttaacttctttaaatggtccgcaaaaagcaaaacttaaagaacaagtgggtcaagcgacgacgttgccaaatgttcaaactgttcgtgataatgcacaaacattaaacactgcaatgaaaggtctacgagatagcattgcgaatgaagcaacgattaaagcaggtcaaaactacacagatgcaagtcaaaacaaacaaactgactacaacagtgcagtcactgcagcaaaagcaatcattggtcaaacaactagtccatcaatgaatgcgcaagaaattaatcaagcgaaagaccaagtgacagctaaacaacaagcgttaaacggtcaagaaaacttaagaactgcgcaaacaaatgcgaagcaacatttgaacggcttaagtgacttaactgacgctcaaaaagatgcagtgaaacgtcaaatcgaaggtgcaacgcatgttaatgaagtaacacaagcacaaaataatgcggatgcattaaatacagctatgacgaacttgaaaaatggtattcaagatcagaatacgattaagcaaggtgttaacttcactgatgccgacgaagcgaaacgtaatgcatatacaaatgcagtgacgcaagctgaacaaattttaaataaagcacaaggtccaaatacttcaaaagacggtgtcgaaactgcgttagaaaatgtacaacgtgctaaaaacgaattgaacggtaatcaaaatgttgcgaacgctaagacaactgcgaaaaatgcattgaataacctaacatcaattaataatgcacaaaaagaagcattgaaatcacaaattgaaggtgcgacaacagttgcaggtgtaaatcaagtgtctacaacggcatctgaattaaatacagcaatgagcaacttacaaaatggtattaatgatgaagcagctacaaaagcagctcagaaatatactgatgcagatagagaaaaacaaactgcatacaatgacgctgtaacagcagctaaaacgttattagataaaacagctggttcaaatgacaataaagcagctgttgaacaagcattacaacgtgtgaatactgctaaaacagcattaaatggtgacgagcgattaaatgaagcgaagaacacagctaaacaacaagtagcgacaatgtcacacttaactgatgctcaaaaagcaaacttaacatcgcaaatcgaaagtggtacgactgttgcaggtgttcaaggtattcaagctaatgccggtactttagatcaagcaatgaatcaattaagacaaagtattgcttctaaagatgcgactaaatcaagcgaagattatcaagacgcgaatgcagatttacaaaatgcatacaatgatgcggtaactaatgctgaaggtattattagtgcaacgaataaccctgaaatgaatcctgatacaattaaccaaaaagcgagccaagtgaacagtgcgaagtctgcattgaacggtgatgaaaaattagcagcagcaaaacaaactgcgaaatcagatatcggtcgtttgacagacttgaacaatgcacaacgaactgcggcaaatgctgaagtggatcaagcaccaaatcttgcagctgtcacagcggctaaaaataaagcaacatcgttaaacacagcgatgggtaatttgaaacatgcacttgctgaaaaggataatacgaaacgtagtgtcaattacacagatgcggatcaaccaaaacaacaagcgtatgatactgcggttacacaagcagaagcaattactaatgctaatggcagcaacgcgaatgaaacacaagttcaagcagcactaaaccaattgaatcaagctaaaaatgacttgaatggtgataataaagttgctcaagcaaaagagtcagcgaaacgtgcattagcttcatatagtaacttgaataatgcgcaatcaactgcagcaactagtcaaattgacaatgcaacgacagtagcaggcgtaactgctgcacaaaatactgctaatgaattaaatacagcaatgggtcaacttcaaaatggtataaatgaccaaaacactgttaaacaacaagtgaactttacagatgctgaccaaggtaagaaagatgcttacacaaatgctgttacgaatgctcaaggtattttagataaagcacacggtcaaaatatgacgaaagcacaagttgaagctgcattaaatcaagtaacgactgctaagaatgctttaaacggtgacgcaaatgtaagacaagcaaaatcagatgcgaaagcaaacttaggtacattaacacacttaaataatgcacaaaaacaagatttaacatcacaaatcgaaggcgcaacaacagtcaacggtgtaaatggtgttaaaacgaaagcacaagacttagatggtgcaatgcaacgattacaatcagctatagcaaataaagatcaaactaaagcgagcgaaaattacatcgacgcagatccaactaagaaaacagcatttgataatgctatcacacaagctgaatcttacttaaataaagatcacggtgcgaataaagataagcaagctgttgaacaagcaattcaaagtgtaacgtctactgaaaatgctttgaacggtgacgcgaacttacaacgcgctaaaactgaagctatacaagctatcgataacttgacacatttgaatacaccacaaaaaacagcattaaaacaacaagtgaacgctgcgcaacgtgtatcaggtgtaactgatctgaaaaatagtgctacatcacttaataatgcgatggatcaattaaaacaagcaattgctgatcatgacacaattgtagctagtggtaattacactaacgcgagtcctgataagcaaggtgcttatactgatgcatataatgctgcgaaaaacattgtaaatggttcgcctaatgtgattacaaatgcagcagatgttacagcagcaacacaacgtgttaataatgctgaaacaggtttaaacggtgatacaaacttagcaactgcgaagcaacaagctaaagatgcattacgtcaaatgacacatttatctgatgcacaaaaacaaagtattactggtcaaattgatagcgcgacacaagtaactggcgttcaaagtgtgaaagacaacgcgacaaatcttgataatgcaatgaatcaacttcgaaatagtattgcgaataaagatgatgtaaaagcgagtcaaccatatgttgatgcagatagagataaacaaaatgcatacaatacagcagttacaaatgctgaaaatatcattaatgcaacgagtcagccgacacttgatccatctgcagtaacacaagcagctaatcaagtgagcactaacaaaactgcgcttaatggtgcacaaaacttagcgaataaaaagcaagaaacgactgctaacatcaaccaattaagtcatttaaataatgctcaaaagcaagatttaaatacgcaagtgacaaatgcaccaaatattagcacagtaaatcaagtgaaaactaaagctgaacaattagatcaagcaatggaacgtttaatcaacggaatccaagacaaagatcaagtgaaacaaagtgttaactttacagatgcagatccagaaaaacaaacagcatacaacaatgcggtaactgctgctgaaaatattattaatcaagcaaatggtacaaatgcgaaccaatcacaagttgaagcagcactttcaactgtaacaactacgaaacaagcgttgaatggtgatagaaaagtaacagatgctaaaaacaatgcaaaccaaacattatctacgttagataacttaaacaatgcacaaaaaggtgctgttactggaaacatcaatcaagcgcacactgtagctgaagtaacgcaagccattcaaaccgctcaggaactgaatacagcgatgggtaacttgaaaaatagcttgaatgataaagacactacacttggcagtcaaaactttgcagatgcagatccagagaagaaaaatgcatacaatgaagcggttcataatgctgaaaatattttaaataaatctacaggtacgaacgtgcctaaagatcaagttgaagcagctatgaatcaagtgaatgctacaaaagcagcgcttaatggtactcaaaaccttgaaaaagctaaacaacacgcaaatacagcaattgacggtttaagccatttaacaaatgcacaaaaagaggcattaaaacaattggtacaacaatcgactactgttgcagaagcacaaggtaatgagcaaaaagcaaacaatgttgatgcagcaatggacaaattacgtcaaagtattgcagataatgcgacaacaaaacaaaaccaaaattatactgatgcaagtcagaataaaaaggatgcgtacaataatgctgtcacaactgcacaaggtattattgatcaaactacaagtccaactttagatccgactgttatcaatcaagctgctggacaagtaagcacaactaaaaatgcattaaatggtaatgaaaacctagaggcagcgaaacaacaagcgtcacaatcattaggttcattagataacttaaataatgcgcaaaaacaaacagttactgatcaaattaatggcgcgcatactgttgatgaagcaaatcaaattaagcaaaatgcgcaaaacttaaatacagcgatgggtaacttgaaacaagcgatagctgacaaagatgctacgaaagcgacagttaacttcactgatgcagatcaagcaaaacaacaagcatataacactgctgttacaaatgctgaaaatatcatttcaaaagctaatggcggcaatgcaacacaagctgaagttgaacaagcaatcaaacaagttaatgctgcaaaacaagcattaaatggtaatgccaacgttcaacatgcaaaagacgaagcaacagcattaattaatagctctaatgaccttaaccaagcacaaaaagacgcattaaaacaacaagttcaaaatgcaactactgtagctggtgtaaacaatgttaaacaaacagcacaagagttaaacaatgctatgacacaattaaaacaaggcattgcagataaagaacaaacaaaagctgatggtaactttgtcaatgcagatcctgataagcaaaatgcatataatcaagcagtagcgaaagctgaagcattaattagtgctacgcctgatgttgtcgttacacctagcgaaattactgcagcgttaaataaagttacgcaagctaaaaatgatttaaatggtaatacaaacttagcaacggcgaaacaaaatgttcaacatgctattgatcaattgccaaacttaaaccaagcgcaacgtgatgaatacagcaaacaaatcacgcaagcaacacttgtaccaaacgtcaatgctattcaacaagcggcgacaacgcttaatgacgcgatgacacaattgaaacaaggtattgcgaataaagcacaaattaaaggtagcgagaactatcacgatgctgatactgacaagcaaacagcatatgataatgcagtaacaaaagcagaagaattgttaaaacaaacaacaaatccaacaatggatccaaatacaattcaacaagcattaactaaagtgaatgacacaaatcaagcacttaacggtaatcaaaaattagctgatgccaaacaagatgctaagacaacacttggtacactagatcatttaaatgatgctcaaaaacaagcgctaacaactcaagttgaacaagcaccagatattgcaacagttaataatgttaagcaaaatgctcaaaatctgaataatgctatgactaacttaaacaatgcattacaagataaaactgagacattaaatagcattaactttactgatgcagatcaagctaagaaagatgcttatactaatgcggtttcacatgcagaaggtattttatctaaagcaaatggcagcaatgcaagtcaaactgaagtggaacaagcgatgcaacgtgtgaacgaagcgaaacaagcattgaatggtaatgacaatgtacaacgtgcaaaagatgcagcgaaacaagtgattacaaatgcaaatgatttaaatcaagcgcaaaaagatgcattaaaacaacaagtcgatgctgcgcaaactgttgcaaatgtaaacacgattaagcaaacagcacaagatttaaatcaagcaatgacacaattgaaacaaggtattgcagataaagaccaaactaaagcaaatggtaactttgtcaatgctgatactgataagcaaaatgcttacaacaatgcggtagcacatgctgaacaaataattagtggtacaccaaatgcaaacgtggatccacaacaagtggctcaagcgttacaacaagtgaatcaagctaagggtgatttaaacggtaaccataacttacaagttgctaaagacaatgcaaatacagccattgatcagttaccaaacttaaatcaaccacaaaaaacagcattaaaagaccaagtgtcgcatgcagaacttgttacaggtgttaatgctattaagcaaaatgctgatgcgttaaataatgcaatgggtacattgaaacaacaaattcaagcgaacagtcaagtaccacagtcagttgactttacacaagcggatcaagacaaacaacaagcatataacaatgcggctaaccaagcgcaacaaatcgcaaatggcataccaacacctgtattgacgcctgatacagtaacacaagcagtgacaactatgaatcaagcgaaagatgcattaaacggtgatgaaaaattagcacaagcgaaacaagaagctttagcaaatcttgatacgttacgcgatttaaatcaaccacaacgtgatgcattacgtaaccaaatcaatcaagcacaagcgttagctacagttgaacaaactaaacaaaatgcacaaaatgtgaatacagcaatgagtaacttgaaacaaggtattgcaaacaaagatactgtcaaagcaagtgagaactatcatgatgctgatgccgataagcaaacagcatatacaaatgcagtgtctcaagcggaaggtattatcaatcaaacgacaaatccaacgcttaacccagatgaaataacacgtgcattaactcaagtgactgatgctaaaaatggcttaaacggtgaagctaaattggcaactgaaaagcaaaatgctaaagatgccgtaagtgggatgacgcatttaaacgatgctcaaaaacaagcattaaaaggtcaaatcgatcaatcgcctgaaattgctacagtgaaccaagttaaacaaacagcaacgagcctagatcaagcaatggatcaattatcacaagctattaatgataaagctcaaacattagcggacggtaattacttaaatgcagatcctgacaaacaaaatgcgtataaacaggcagtagcaaaagctgaagcattattgaataaacaaagtggtactaatgaagtacaagcacaagttgaaagcatcactaatgaagtgaacgcagcgaaacaagcattaaatggtaatgacaatttggcaaatgcaaaacaacaagcaaaacaacaattggcgaacttaacacacttaaatgatgcacaaaaacaatcatttgaaagtcaaattacacaagcgccacttgttacagatgtcactacgattaatcaaaaagcacaaacgttagatcatgcgatggaattattaagaaatagtgttgcggataatcaaacgacattagcgtctgaagattatcatgatgcaactgcgcaaagacaaaatgactataaccaagctgtaacagctgctaataatatcattaatcaaactacatcgcctacgatgaatccagatgatgttaatggtgcaacgacacaagtgaataatacgaaagttgcattagatggtgatgaaaaccttgcagcagctaaacaacaagcaaacaacagacttgatcaattagatcatttgaataatgcgcaaaagcaacagttacaatcacaaattacgcaatcatctgatattgctgcagttaatggtcacaaacaaacagcagaatctttaaatactgcgatgggtaacttaattaatgcgattgcagatcatcaagccgttgaacaacgtggtaacttcatcaatgctgatactgataaacaaactgcttataatacagcggtaaatgaagcagcagcaatgattaacaaacaaactggtcaaaatgcgaaccaaacagaagtagaacaagctattactaaagttcaaacaacacttcaagcgttaaatggagaccataatttacaagttgctaaaacaaatgcgacgcaagcaattgatgctttaacaagcttaaatgatcctcaaaaaacagcattaaaagaccaagttacagctgcaactttagtaactgcagttcatcaaattgaacaaaatgcgaatacgcttaaccaagcaatgcatggtttaagacagagcattcaagataacgcagcaactaaagcaaatagcaaatatatcaacgaagatcaaccagagcaacaaaactatgatcaagctgttcaagccgcaaataatattatcaatgaacaaactgcaacattagataataatgcgattaatcaagcagcgacaactgtgaatacaacgaaagcagcattacatggtgatgtgaagttacaaaatgataaagatcatgctaagcaaacggttagtcaattagcacatctaaacaatgcacaaaaacatatggaagatacgttaattgatagtgaaacaactagaacagcagttaagcaagatttgactgaagcacaagcattagatcaacttatggatgcattacaacaaagtattgctgacaaagatgcaacacgtgcgagcagtgcatatgtcaatgcagaaccgaataaaaaacaatcctatgatgaagcagttcaaaatgctgagtctatcattgcaggattaaataatccaactatcaataaaggtaatgtatcaagtgcgactcaagcagtaatatcatctaaaaatgcattagatggtgttgaacgattagctcaagataagcaaactgctggaaattctctaaatcatttagatcaattaacaccagctcaacaacaagcgctagaaaatcaaattaataatgcaacaactcgtggcgaagtagcacaaaaattaactgaagcacaagcacttaaccaagcaatggaagctttacgtaatagcattcaagatcaacagcaaacggaagcgggtagcaagtttatcaatgaagataaaccacaaaaagatgcttaccaagcagcagttcaaaatgcaaaagatttaattaatcaaactaacaatccaacgcttgataaagcacaagttgaacaattgacacaagctgttaaccaagctaaagataacctacacggtgatcaaaaacttgcagacgataaacaacatgcggttactgatttaaatcaattaaatggtttgaataatccgcaacgtcaagcacttgaaagccaaataaacaacgcagcaactcgtggcgaagtagcacaaaaattagctgaagcaaaagcgcttgatcaagcaatgcaagcattacgtaatagtattcaagatcaacaacaaacagaatctggtagcaagtttatcaatgaagataaaccgcaaaaagatgcttaccaagcagcagttcaaaatgcaaaagatttaattaaccaaacaggtaatccaacactcgacaaatcacaagtagaacaattgacacaagcagtaacaactgcaaaagataatctacatggtgatcaaaaacttgctcgtgatcaacaacaagcagtaacaactgtaaatgcattgccaaacttaaatcatgcacaacaacaagcattaactgatgctataaatgcagcgcctacaagaacagaggttgcacaacatgttcaaactgctactgaacttgatcacgcgatggaaacattgaaaaataaagttgatcaagtgaatacagataaggctcaaccaaattacactgaagcgtcaactgataaaaaagaagcagtagatcaagcgttacaagctgcagaaagcattacagatccaactaatggttcaaatgcgaataaagacgctgtagaccaagtattaactaagcttcaagaaaaagaaaatgagttaaatggtaatgagagagtcgctgaagctaaaacacaagcgaaacaaactattgaccaattaacacatttaaatgctgatcaaattgcaactgctaaacaaaacattgatcaagcgacgaaacttcaaccaattgctgaattagtagatcaagcaacgcaattgaatcaatctatggatcaattacaacaagcagttaatgaacatgctaacgttgagcaaactgtagattacacacaagcagattcagataaacaaaatgcttataaacaagctattgctgatgctgaaaatgtattgaaacaaaatgcgaataagcaacaagtggatcaagcacttcaaaatattttaaatgcaaaacaagcattaaatggtgatgaacgtgtagcacttgctaaaacaaatggtaaacatgacatcgaccaattgaatgcattaaacaatgctcaacaagatggatttaaaggtcgcatcgatcaatcaaacgatttaaatcaaatccaacaaattgtagatgaggctaaggcacttaatcgtgcaatggatcaattgtcacaagaaatcactgacaatgaaggacgcacgaaaggtagcacgaactatgtcaatgcagatacacaagtcaaacaagtatatgatgaaacggttgataaagcgaaacaagcacttgataaatcgactggtcaaaacttaactgcaaaacaagttatcaaattaaatgatgcagtcactgcagctaagaaagcattaaatggtgaagaaagacttaataatcgtaaagctgaagcattacaaagattggatcaattaacacatctaaacaatgctcaaagacaattagcaatccaacaaattaataatgctgaaacgctaaataaagcatctcgagcaattaatagagcaactaaattagataatgcaatgggtgcagtacaacaatatattgacgaacagcaccttggtgttatcagcagcacaaattacatcaatgcagatgacaatttgaaagcaaattatgataatgcaattgcgaatgcagcacatgagttagataaagtgcaaggtaatgcaattgcaaaagctgaagcagagcaattgaaacaaaatattatcgatgctcaaaatgcattaaatggagaccaaaaccttgcaaatgccaaagataaagcaaatgcgtttgttaattcgttaaatggattaaatcaacagcaacaagatcttgcacataaagcaattaacaatgccgatactgtatcagatgtaacagatattgttaataatcaaattgacttaaatgatgcaatggaaacattgaaacatttagttgacaatgaaattccaaatgcagagcaaactgtcaattaccaaaacgctgacgataatgctaaaacaaacttcgatgatgccaaacgtctagcaaatacattgctaaatagtgataacacaaatgtgaatgatatcaatggcgcaatccaagcagtcaatgatgcaatccataatcttaatggtgatcaacgactacaagatgctaaagacaaggcaattcaatctattaatcaagctttagctaataagctaaaagaaatcgaagcttcaaatgcgacggatcaagacaagcttattgcgaaaaataaagcagaagaattggcaaacagcatcatcaacaacattaataaagcaacaagtaatcaggctgaatctcaagttcaaacagcaggcaaccacgcgattgaacaagtgcatgccaatgaaataccaaaagcaaaaattgatgccaataaagacgttgataagcaagttcaagcattaattgacgaaattgatcgaaatccaaatctaacagataaggaaaaacaagcacttaaagatcgtattaatcaaatacttcaacaaggtcataacggcattaacaatgcgatgactaaagaagaaattgaacaagccaaagcacaacttgcgcaagcattacaagacatcaaagatttagtgaaagctaaagaagatgcgaaacaagatgttgataaacaagttcaagctttaattgacgaaatcgatcaaaatccaaatctaacagataaggaaaaacaagcacttaaagatcgtattaatcaaatacttcaacaaggtcataacgacattaacaatgcgctgactaaagaagaaattgagcaggcaaaagcacaacttgcacaagcattgcaagacatcaaagatttagtgaaagctaaagaagatgcgaaaaatgcaataaaagccttagctaatgcgaagcgtgatcaaatcaattcaaatccagatttaacacctgagcaaaaagcaaaagcgctcaaagaaattgacgaagctgaaaaacgagcactacaaaacgttgagaatgctcaaactatagatcaattaaatcgaggattaaacttaggtttagatgacattagaaatacacatgtatgggaggttgatgaacaacctgctgtaaatgaaatttttgaagcaacacctgagcaaatcctagttaatggtgaactcattgtacatcgtgatgacatcattacagaacaagatattcttgcacacataaacttaattgatcagctttcagcagaagtcatcgatacaccatcaactgcaacgatttctgatagcttaacagcaaaagttgaagttacattgcttgatggatcaaaagtgattgttaatgttcctgtaaaagttgtagaaaaagaattgtcagtagtcaaacaacaggcaattgaatcaatcgaaaatgcggcacaacaaaagattaatgaaatcaataatagtgtgacattaacactggaacaaaaagaagctgcaattgcagaagttaataagcttaaacaacaagcaattgatcatgttaacgatgcacctgatgttcattcagttgaagaaattcaacaacaagaacaagcgcatattgaacaatttaatccagaacaatttacgattgaacaagcaaaatcaaatgcaattaaatcgattgaagatgcaattcaacatatgattgatgaaatcaaagctcgtactgatctaacagataaagagaagcaagaagctattgctaagttaaatcaattaaaagaacaagcaattcaagcgattcaacgtgcgcaaagcatcgatgaaataagtgagcaattggaacaatttaaagctcaaatgaaagcagctaatccaacagcaaaagaactagctaaacgcaagcaagaagctattagtagaattaaagacttttcaaatgaaaaaataaatagtattcgaaatagtgaaattggcacagctgatgaaaaacaagcagcaatgaatcaaattaacgaaattgtgcttgaaacaattagagatattaataatgcgcatacattacagcaagttgaggctgcattgaacaatggtattgctcgaatttcagcagtacaaattgtaacatctgatcgtgctaaacaatcgtcaagtactggaaatgaatctaatagccatttaacaattggttatggaactgcaaatcatccatttaacagttcgactattggacataaaaagaaacttgatgaagatgatgacattgatccacttcatatgcgtcactttagtaataatttcggtaatgttattaaaaacgctattggtgtggtgggtatctctggtttactagctagtttctggttcttcattgccaaacgtcgtcgtaaagaagatgaagaggaagaattagaaataagagataataataaagattcaataaaagagactttagacgatacaaaacatttaccacttttatttgtgaaacgtcgcagaaaagaagatgaagaagatgttactgttgaagaaaaagattcgctaaataatggcgagtcactcgataaagttaaacatacgccgttcttcttaccaaaacgtcgtcgtaaagaagatgaagaagatgtggaagttacaaatgaaaacacagatgaaaaagtgttgaaagataacgaacattcaccactcttattcgcaaaacgacgcaaagataaagaggaagatgttgaaacaacaactagtattgaatctaaagatgaggacgttcctttattattggctaaaaagaaaaatcaaaaagataaccaatccaaagacaaaaagtcagcatcaaaaaatacttctaaaaaggtagcagctaaaaagaagaaaaagaaagctaagaaaaataaaaaataa

SEQ ID NO: 8899 - DNA, 2664 bp, Staphylococcus aureus
  CDS (1)...(2664)
atggctgaattacctcaatcaagaataaatgaacgaaatattaccagtgaaatgcgtgaatcatttttagattatgcgatgagtgttatcgttgctcgtgcattgccagatgttcgtgacggtttaaaaccagtacatcgtcgtatactatatggattaaatgaacaaggtatgacaccggataaatcatataaaaaatcagcacgtatcgttggtgacgtaatgggtaaatatcaccctcatggtgacgcatctatttataaagcaatggtacgtatggctcaagatttcagttatcgttatccgcttgttgatggccaaggtaactttggttcaatggatggagatggcgcagcagcaatgcgttatactgaagcgcgtatgactaaaatcacacttgaactgttacgtgatattaataaagatacaatagattttatcgataactatgatggtaatgaaagagagccgtcagtcttacctgctcgattccctaacttattagccaatggtgcatcaggtatcgcggtaggtatggcaacgaatattccaccacataacttaacagaattaatcaatggtgtacttagcttaagtaagaaccctgatatttcaattgctgagttaatggaggatattgaaggtcctgatttcccaactgctggacttattttaggtaagagtggtattagacgtgcatatgaaacaggtcgtggttcaattcaaatgcgttctcgtgcagttattgaagaacgtggaggcggacgtcaacgtattgttgtcactgaaattcctttccaagtgaataaggctcgtatgattgaaaaaattgcagagctcgttcgtgacaagaaaattgacggtatcactgatttacgtgatgaaacaagtttacgtactggtgtgcgtgtcgttattgatgtgcgtaaggatgcaaatgctagtgtcattttaaataacttatacaaacaaacacctcttcaaacatcatttggtgtgaatatgattgcacttgtaaatggtagaccgaagcttattaatttaaaagaagcgttggtacattatttagagcatcaaaagacagttgttagaagacgtacgcaatacaacttacgtaaagctaaagatcgtgcccacattttagaaggattacgtatcgcacttgaccatatcgatgaaattatttcaacgattcgtgagtcagatacagataaagttgcaatggaaagcttgcaacaacgcttcaaactttctgaaaaacaagctcaagctattttagacatgcgtttaagacgtctaacaggtttagagagagacaaaattgaagctgaatataatgagttattaaattatattagtgaattagaagcaatcttagctgatgaagaagtgttattacagttagttagagatgaattgactgaaattagagatcgtttcggtgatgatcgtcgtacagaaattcaattaggtggatttgaaaacttagaggacgaagacttaattccagaagaacaaatagtaattacactaagccataataactacattaaacgtttgccggtatctacatatcgtgctcaaaaccgtggtggtcgtggtgttcaaggtatgaatacattggaagaagattttgtcagtcaattggtaactttaagtacacatgaccatgtattgttctttactaacaaaggtcgtgtatacaaacttaaaggttacgaagtgcctgagttatcaagacagtctaaaggtattcctgtagtgaatgctattgaacttgaaaatgatgaagtcattagtacaatgattgctgttaaagaccttgaaagtgaagacaacttcttagtgtttgcaactaaacgtggtgtcgttaaacgttcagcattaagtaacttctcaagaataaatagaaatggtaagattgcgatttcgttcagagaagatgatgagttaattgcagttcgcttaacaagtggtcaagaagatatcttgattggtacatcacatgcatcattaattcgattccctgaatcaacattacgtcctttaggccgtacagcaacgggtgtgaaaggtattacacttcgtgaaggtgacgaagttgtagggcttgatgtagctcatgcaaacagtgttgatgaagtattagtagttactgaaaatggttatggtaaacgtacgccagttaatgactatcgcttatcaaatcgtggtggtaaaggtattaaaacagctacgattactgagcgtaatggtaatgttgtatgtatcactacagtaactggtgaagaagatttaatgattgttactaatgcaggtgtcattattcgactagatgttgcagatatttctcaaaatggtcgtgcagcacaaggtgttcgcttaattcgcttaggtgatgatcaatttgtttcaacggttgctaaagtaaaagaagatgcagaagatgaaacgaatgaagatgagcaatctacttcaactgtatctgaagatggtactgaacaacaacgtgaagcggttgtaaatgatgaaacaccaggaaatgcaattcatactgaagtgattgattcagaagaaaatgatgaagatggacgtattgaagtaagacaagatttcatggatcgtgttgaagaagatatacaacaatcatcagatgaagaataa

SEQ ID NO: 8900 - DNA, 1935 bp, Staphylococcus aureus
  CDS (1)...(1935)
atggtgactgcattgtcagatgtaaacaacacggataattatggtgctgggcaaatacaagtattagaaggtttagaagcagtacgtaaaagaccaggtatgtatataggatcgacttcagagagaggtttgcaccatttagtgtgggaaattgtcgataatagtatcgatgaagcattagctggttatgcaaatcaaattgaagttgttattgaaaaagataactggattaaagtaacggataacggacgtggtatcccagttgatattcaagaaaaaatgggacgtccagctgtcgaagttattttaactgttttacatgctggtggtaaatttggcggtggcggatacaaagtatctggtggtttacatggtgttggttcatcagttgtaaacgcattgtcacaagacttagaagtatatgtacacagaaatgagactatatatcatcaagcatataaaaaaggtgtacctcaatttgacttaaaagaagttggcacaactgataagacaggtactgtcattcgttttaaagcagatggagaaatcttcacagagacaactgtatacaactatgaaacattacagcagcgtattagagagcttgctttcttaaacaaaggaattcaaatcacattaagagatgaacgtgatgaagaaaacgttagagaagactcctatcactatgagggcggtattaaatcgtacgttgagttattgaacgaaaataaagaacctattcatgatgagccaatttatattcatcaatctaaagatgatattgaagtagaaattgcgattcaatataactcaggatatgccacaaatcttttaacttacgcaaataacattcatacgtatgaaggtggtacgcatgaagacggattcaaacgtgcattaacgcgtgtcttaaatagttatggtttaagtagcaagattatgaaagaagaaaaagatagactttctggtgaagatacacgtgaaggtatgacagcaattatatctatcaaacatggtgatcctcaattcgaaggtcaaacgaagacaaaattaggtaattctgaagtgcgtcaagttgtagataaattattctcagagcactttgaacgatttttatatgaaaatccacaagtcgcacgtacagtggttgaaaaaggtattatggcggcacgtgcacgtgttgctgcgaaaaaagcgcgtgaagtaacacgtcgtaaatcagcgttagatgtagcaagccttccaggtaaattagccgattgctctagtaaaagtcctgaagaatgtgagattttcttagtcgaaggggactctgccggggggtctacaaaatctggtcgtgactctagaacgcaggcgattttaccattacgaggtaagatattaaatgttgaaaaagcacgattagatagaattttgaataacaatgaaattcgtcaaatgatcacagcatttggtacaggaatcggtggcgactttgatctagcgaaagcaagatatcacaaaatcgtcattatgactgatgccgatgtggatggagcgcatattagaacattgttattaacattcttctatcgatttatgagaccgttaattgaagcaggctatgtgtatattgcacagccaccgttgtataaactgacacaaggtaaacaaaagtattatgtatacaatgatagggaacttgataaacttaaatctgaattgaatccaacaccaaaatggtctattgcacgatacaaaggtcttggagaaatgaatgcagatcaattatgggaaacaacaatgaaccctgagcaccgcgctcttttacaagtaaaacttgaagatgcgattgaagcggaccaaacatttgaaatgttaatgggtgacgttgtagaaaaccgtagacaatttatagaagataatgcagtttatgcaaacttagacttctaa

SEQ ID NO: 8901 - DNA, 1827 bp, Staphylococcus aureus
  CDS (1)...(1827)
atgaagtggctaaaacaactacaatcccttcatactaaacttgtaattgtttatgtattactgattatcattggtatgcaaattatcgggttatattttacaaataaccttgaaaaagagctgcttgataattttaagaagaatattacgcagtacgcgaaacaattagaaattagtattgaaaaagtatatgacgaaaagggctccgtaaatgcacaaaaagatattcaaaatttattaagtgagtatgccaaccgtcaagaaattggagaaattcgttttatagataaagaccaaattattattgcgacgacgaagcagtctaaccgtagtctaatcaatcaaaaagcgaatgatagttctgtccaaaaagcactatcactaggacaatcaaacgatcatttaattttaaaagattatggcggtggtaaggaccgtgtctgggtatataatatcccagttaaagtcgataaaaaggtaattggtaatatttatatcgaatcaaaaattaatgacgtttataaccaattaaataatataaatcaaatattcattgttggtacagctatttcattattaatcacagtcatcctaggattctttatagcgcgaacgattaccaaaccaatcaccgatatgcgtaaccagacggtcgaaatgtccagaggtaactatacgcaacgtgtgaagatttatggtaatgatgaaattggcgaattagctttagcatttaataacttgtctaaacgtgtacaagaagcgcaggctaatactgaaagtgagaaacgtagactggactcagttatcacccatatgagtgatggtattattgcaacagaccgccgtggacgtattcgtatcgtcaatgatatggcactcaagatgcttggtatggcgaaagaagacatcatcggatattacatgttaagtgtattaagtcttgaagatgaatttaaactggaagaaattcaagagaataatgatagtttcttattagatttaaatgaagaagaaggtctaatcgcacgtgttaactttagtacgattgtgcaggaaacaggatttgtaactggttatatcgctgtgttacatgacgtaactgaacaacaacaagttgaacgtgagcgtcgtgaatttgttgccaatgtatcacatgagttacgtacacctttaacttctatgaatagttacattgaagcacttgaagaaggtgcatggaaagatgaggaacttgcgccacaatttttatctgttacccgtgaagaaacagaacgaatgattcgactggtcaatgacttgctacagttatctaaaatggataatgagtctgatcaaatcaacaaagaaattatcgactttaacatgttcattaataaaattattaatcgacatgaaatgtctgcgaaagatacaacatttattcgagatattccgaaaaagacgattttcacagaatttgatcctgataaaatgacgcaagtatttgataatgtcattacaaatgcgatgaaatattctagaggcgataaacgtgtcgagttccacgtgaaacaaaatccactttataatcgaatgacgattcgtattaaagataatggcattggtattcctatcaataaagtcgataagatattcgaccgattctatcgtgtagataaggcacgtacgcgtaaaatgggtggtactggattaggactagccatttcgaaagagattgtggaagcgcacaatggtcgtatttgggcaaacagtgtagaaggtcaaggtacatctatctttatcacacttccatgtgaagtcattgaagacggtgattgggatgaataa

SEQ ID NO: 8902 - DNA, 708 bp, Staphylococcus aureus
  CDS (1)...(708)
atgcaaatggctagaaaagttgttgtagttgatgatgaaaaaccgattgctgatattttagaatttaacttaaaaaaagaaggatacgatgtgtactgtgcatacgatggtaatgatgcagtcgacttaatttatgaagaagaaccagacatcgtattactagatatcatgttacctggtcgtgatggtatggaagtatgtcgtgaagtgcgcaaaaaatacgaaatgccaataataatgcttactgctaaagattcagaaattgataaagtgcttggtttagaactaggtgcagatgactatgtaacgaaaccgtttagtacgcgtgaattaatcgcacgtgtgaaagcgaacttacgtcgtcattactcacaaccagcacaagacactggaaatgtaacgaatgaaatcacaattaaagatattgtgatttatccagacgcatattctattaaaaaacgtggcgaagatattgaattaacacatcgtgaatttgaattgttccattatttatcaaaacatatgggacaagtaatgacacgtgaacatttattacaaacagtatggggctatgattactttggcgatgtacgtacggtcgatgtaacgattcgtcgtttacgtgaaaagattgaagatgatccgtcacatcctgaatatattgtgacgcgtagaggcgttggatatttcctccaacaacatgagtag

SEQ ID NO: 8903 - DNA, 447 bp, Staphylococcus aureus
  CDS (1)...(447)
atgaaagtaatttttacacaagatgttaaaggtaaaggtaaaaaaggtgaagttaaagaagtaccagtaggttatgcaaataacttcttattgaaaaagaattatgctgtagaagcaacaccaggtaaccttaaacaattagagttacagaaaaaacgtgcaaaacaagaacgccaacaagaaattgaagatgctaaagcattaaaagaaacgttatcaaacattgaagttgaagtatcagcaaaaactggtgaaggtggtaaattgtttgggtcagtaagtacaaaacaaattgccgaagcactaaaagcacaacatgatattaaaattgataaacgtaaaatggatttaccaaatggaattcattccctaggatatacgaatgtacctgttaaattagataaagaagttgaaggtacaattcgcgtacacacagttgaacaataa

SEQ ID NO: 8904 - DNA, 2106 bp, Staphylococcus aureus
  CDS (1)...(2106)
atgaataacggttttttcaatagcgactttgattcaatttttcgaagaatgatgaaagatatgcaaggttcaaatcaagtcggaaacaaaaagtactatattaatggtaaagaagtttcacctgaagaactagcgcaactcacacaacaaggtggcaatcactctgctgaacaaagtgcgcaagcttttcaacaagcagcacaaagacaacaagggcaacaaggtggcaacggcaattatttagaacaaattggtcgtaaccttacgcaagaagcacgtgacggtttattagatccagtcattggtcgtgataaagaaattcaagaaactgctgaagttttaagtagacgaactaaaaacaatcctatattagttggagaagctggtgttggtaaaactgcgattgttgaaggtttagcacaggcaatcgttgaaggaaatgtaccagcagcaatcaaagacaaagaaattatttctgtagacatttcatcattagaagctggaacgcaatatcgtggtgcttttgaagaaaatattcaaaaattaatcgaaggtgttaaatcttcacaaaatgccgtactattctttgatgaaatccatcaaattatcggttcaggtgccacaggaagtgattcaggtagcaaagggttatctgatattttgaaacctgcattaagtcgtggtgagatttctattattggtgcaacaacacaagatgaatatcgaaacaatattcttaaagatgctgcattaacgcgcagatttaatgaagtgcttgttaatgaaccaagcgctaaagatactgttgaaattttaaaaggtattcgcgaaaaattcgaagaacaccatcaagtaaaattaccagatgacgtattaaaagcatgtgttgacttatcaattcaatatattccacaacgattattaccagataaagcaatcgatgtgttagatattacagcagcacatttatctgcgcaaagtccagctgtcgataaagttgaaactgaaaaacgaatttctgaattagaaaatgataaacgtaaagcagtaagtgctgaagaatataaaaaagctgacgacattcaaaatgaaatcaaatcattacaagataaattagaaaatagtaatggtgaacatactgctgttgctacagttcatgatatttcagatactattcaacgattaactggtattccagtttctcaaatggatgataacgatattgaacgtttaaaaaatatttctaatcgtttaagaagtaaaatcataggtcaagatcaagctgtagaaatggtttcacgtgcaattcgccgtaatcgtgctgggtttgatgacggcaaccgtccaattggcagtttcctatttgttggccctactggtgttggtaaaacagagcttgctaaacaattagcaattgatttatttggtaataaagatgcactgattcgacttgatatgagtgaatatagtgacacaacagctgtttcaaaaatgattggtacaactgctggttatgttggttatgatgacaattcaaatacgttaactgaaaaagtacgccgtaatccatactcagtcattctatttgatgaaatcgaaaaagcaaatccacaaattttaacattgttattacaagtaatggatgatggtaatttgactgatggtcaaggtaatgtcatcaactttaaaaatacaattattatttgtacatcaaatgctggctttggcaatggcaatgacgctgaagaaaaagatattatgcacgaaatgaaaaaattcttccgccctgaattccttaaccgcttcaacggcatcgttgaattcttacatttagataaagatgcattgcaagatatcgtcaacttattattagacgatgtacaagttacattagacaaaaaaggtattacgatggacgtttctcaagatgcgaaagattggttaattgaagaaggctatgatgaagaattaggtgcacgtccattaagacgtattgttgaacagcaagtacgtgacaaaattacagattactatttagatcatacagacgttaaacatgtggatatagatgttgaggataacgaattagtcgtaaaaggtaaataa

SEQ ID NO: 8905 - DNA, 2631 bp, Staphylococcus aureus
  CDS (1)...(2631)
atggaaatgaaaccaaaatatgatcctcgtgaagttgaagcgggacgttatgaagaatgggtaaagaatggttattttaaaccgtcagaagataaatcaaaagaaacatatacaattgttatcccgccaccaaatgtaactggtaaattacatttaggacatgcatgggatacgactttacaagatatcattacacgtatgaaacgtatgcaaggatacgatacgttatacttaccaggtatggatcatgctggtattgcgacacaggcaaaggtagaagctaaattaaatgaacaaggaataactagatatgatcttggtcgtgaaaagtttttagaacaggcatgggattggaaagaagagtatgcgtcatttattcgtgcgcaatgggctaaattaggtctaggtttagattatagtagagaacgttttactttagatgaaggtttaagtaaagcagttaaaaaagtttttgttgatttatacaataaaggaattatttatcgtggcgaacgtattataaattgggatcctaaagcacgtacagctttatctgatattgaagtaatacatgaagatgttcaaggtgcgttttatcattttaaatatccttacgctgatggtgaaggttttattgaaattgcaacaacaagaccagaaacgatgttaggtgatacagcgattgttgttaaccctaatgacgaacgatacaaagatgtaatcggtaaaactgttatattaccaatcgtaggacgcgaactgcctattttagcagatgagtatgttgatatagacttcggttctggtgctatgaaagtgacaccagcacatgaccctaatgattttgaaattggtcaaagacatcaattagaaaatattatcgttatggatgaaaatggtaaaatgaacgacaaagcgggtaaatatgaaggtatggaccgttttgattgtcgtaaacagctagttaaagatttaaaagaacaagatttagttatcaagattgaagatcatgttcattctgtaggtcattcagaacgatctggcgctgttgttgaaccatatttatcaacacaatggtttgtgcgcatggaagacttagcgaaacgttcattagataaccaaaaaacagatgatcgtattgatttttatccgcaacgtttcgaacatacatttaaccaatggatggaaaatattagagattggacgatttcaagacaattatggtggggtcatcaaattccggcttggtatcataaagaaacaggcgaaatatatgttggagaagaagcgccaactgatattgaaaattggcaacaagatgaagatgtattagatacgtggttctcaagtgctttatggcctttctctacgttaggttggcctgatttagaaagtgaagactttaaacgatactacccaacaaatgccttagttacaggttacgatattatctttttctgggtagcacgcatgatattccaaggcttagaatttacagatcgtcgtccatttaatgatgtattattacacggtttagttcgtgctgaagacgggcgtaagatgagtaaatcattaggtaatggtgtggatccaatggatgttattgacgaatacggtgctgatagcttgcgttacttcttagcaacaggttcatctccaggacatgatttaagatactcaactgaaaaagttgagtcagtgtggaactttatcaataaaatctggaatggggcacgtttcagtttaatgaatatcggtgaagactttaaagttgaagatatcgatttaagtggtaacttatcattagcagataaatggattctaacacgtttaaatgaaacgattgcaacagttactgatttaagtgacaaatatgaattcggcgaagttggacgtgcattatataatttcatttgggatgatttctgtgattggtacattgaaatgagtaaaattccaatgaatagtaatgatgaagaacaaaaacaagttacacgttcagtattgagttatactttagacaatattatgagaatgctacatccattcatgccatttgtaacagagaaaatatggcaaagtttaccacatgaaggtgacacaattgttaaagcttcatggccagaagtgcgtgaatcattgatttttgaagaaagtaaacaaacaatgcaacaacttgttgaaatcattaaatctgtaagacaatcacgtgtagaagtaaatacgccattgtctaaagaaatacctattttaattcaagctaaagataaagaaattgaaacaactttatcacaaaacaaagattatttaatcaaattctgtaatcctagtaccttaaatattagcactgacgtggaaattcctgagaaagcaatgacatcagttgtaattgcaggtaaagtggtattaccattagaagggctaattgatatggataaggaaatcagccgtttggaaaaagaattagctaaacttcaaagcgaattagatagagtagataaaaagctctctaatgaaaactttgtaagtaaagcacctgaaaaggttataaatgaagaaaaacgtaaaaaacaagattatcaagaaaaatatgatggtgtgaaggcaagaattgaacaattaaaagcatag

SEQ ID NO: 8906 - DNA, 975 bp, Staphylococcus aureus
  CDS (1)...(975)
atgaaatttgatagacatagaagattgagatcatcagcgacaatgagagatatggttagagagaatcatgtaagaaaagaagatttaatatatccaatttttgtagttgaaaaagacgatgtgaaaaaagaaattaagtcattgccaggtgtataccaaatcagtttgaatttacttgaaagtgaattaaaagaagcttatgacttaggcatacgtgccattatgtttttcggtgttccaaactcaaaagatgatataggtactggtgcatacattcacgatggtgttattcaacaggcaacacgtattgctaaaaaaatgtatgatgacttattaattgttgcagacacttgtttatgtgaatatactgatcatggtcattgtggcgtgattgatgaccatacacatgacgttgacaatgataaatcattgccactacttgttaaaacagcaatttctcaagtggaagctggtgctgatattattgcgccaagtaatatgatggatggttttgttgctgaaattcgtcgtggattagatgaagccggctattacaatattcctataatgagttatggtgtcaagtatgcatcaagtttctttggaccttttagagatgcagcagattcagcgccatcatttggggatagaaaaacgtatcagatggaccctgctaaccgtttggaagcacttcgtgaattagaaagtgatcttaaagaagggtgcgacatgatgattgttaaacctgctctaagttatttagatatagttcgagatgttaaaaatcatacgaatgttccagttgttgcatataatgtgagtggagaatatagtatgactaaagcagcggcacaaaatggttggatagatgaagaacgtgtcgttatggaacaaatggtttcaatgaaacgtgcaggtgctgatatgattattacgtattttgcaaaggacatttgtcgctatttagataaataa

SEQ ID NO: 8907 - DNA, 357 bp, Staphylococcus aureus
  CDS (1)...(357)
atgccacgagttaaaggtggaacagtaacaagagcgcgtcgtaaaaaaacgattaaattagctaaaggttacttcggttcaaaacatacattatacaaagtagctaagcaacaagtaatgaaatcaggtcaatatgctttccgtgaccgtcgtcaacgtaaacgtgacttccgtaaattatggattacacgtatcaacgcagcagctcgtcaacatgaaatgagctactcacgtttaatgaacggtttgaaaaaagctggtatcgacattaaccgtaaaatgttatcagaaatcgcaatttctgacgaaaaagcatttgctcaattagtaactaaagctaaagatgctttaaaataa

SEQ ID NO: 8908 - DNA, 201 bp, Staphylococcus aureus; identical to SEQ ID NO: 8530
  CDS (1)...(201)

SEQ ID NO: 8909 - DNA, 603 bp, Staphylococcus aureus
  CDS (1)...(603)
gtgtataaggaagagcgggtattttatacctgctcttcctttttgcttggtgcaaatttcgtaaaaattttggaggtgtcaaccatagcaaaagatcaaactcaaatcaatgacaaaattcgtgcaaaagaattacgtttaatcggtcaagatggtgaacaaattggtgttaaatcaaagcgtgaagctttagaaatggctgaacgtgtagatttagacttagtggtcgttgcaccgaatgcgaaaccaccagttgcaagaattatggattacggtaaattcaaattcgaacaacagaaaaaagaaaaagaaatgaaaaagaaacaaaaaattatcaatgttaaagaaattcgtttaagtccaacaattgaggaacatgatttccaaacgaagttgaaaaacggacgtaaattcttaactaaaggcgataaatgtaaagtatctattcgtttcagagggcgtgccattacgcataaggaaattggtcaacgtgtgctagaaaaatatgcagatgaatgcaaagatatagcaacagttgaacaaaaacctaaaatggacgggcgtcaaatgtttatcatgttagcgccaacagctgaaaaataa

SEQ ID NO: 8910 - DNA, 1911 bp, Staphylococcus aureus
  CDS (1)...(1911)
atgaaaaagcaaataatttcgctaggcgcattagcagttgcatctagcttatttacatgggataacaaagcagatgcgatagtaacaaaggattatagtgggaaatcacaagttaatgctgggagtaaaaatgggacattaatagatagcagatatttaaattcagctctatattatttggaagactatataatttatgctataggattaactaataaatatgaatatggagataatatttataaagaagctaaagataggttgttggaaaaggtattaagggaagatcaatatcttttggagagaaagaaatctcaatatgaagattataaacaatggtatgcaaattataaaaaagaaaatcctcgtacagatttaaaaatggctaattttcataaatataatttagaagaactttcgatgaaagaatacaatgaactacaggatgcattaaagagagcactggatgattttcacagagaagttaaagatattaaggataagaattcagacttgaaaacttttaatgcagcagaagaagataaagcaactaaggaagtatacgatctcgtatctgaaattgatacattagttgtatcatattatggtgataaggattatggggagcacgcgaaagagttacgagcaaaactggacttaatccttggagatacagacaatccacataaaattacaaatgaacgtattaaaaaagaaatgattgatgacttaaattcaattattgatgatttctttatggaaactaaacaaaatagaccgaaatctataacgaaatataatcctacaacacataactataaaacaaatagtgataataaacctaattttgataaattagttgaagaaacgaaaaaagcagttaaagaagcagatgattcttggaaaaagaaaactgtcaaaaaatacggagaaactgaaacaaaatcgccagtagtaaaagaagagaagaaagttgaagaacctcaagcacctaaagttgataaccaacaagaggttaaaactacggctggtaaagctgaagaaacaacacaaccagttgcacaaccattagttaaaattccacagggcacaattacaggtgaaattgtaaaaggtccggaatatccaacgatggaaaataaaacggtacaaggtgaaatcgttcaaggtcccgattttctaacaatggaacaaagcggcccatcattaagcaataattatacaaacccaccgttaacgaaccctattttagaaggtcttgaaggtagctcatctaaacttgaaataaaaccacaaggtactgaatcaacgttaaaaggtactcaaggagaatcaagtgatattgaagttaaacctcaagcaactgaaacaacagaagcttctcaatatggtccgagaccgcaatttaacaaaacacctaaatatgttaaatatagagatgctggtacaggtatccgtgaatacaacgatggaacatttggatatgaagcgagaccaagattcaataagccatcagaaacaaatgcatataacgtaacaacacatgcaaatggtcaagtatcatacggagctcgtccgacatacaagaagccaagcgaaacgaatgcatacaatgtaacaacacatgcaaacggccaagtatcatacggagctcgtccgacacaaaacaagccaagcaaaacaaacgcatataacgtaacaacacatggaaacggccaagtatcatatggcgctcgcccaacacaaaacaagccaagcaaaacaaatgcatacaacgtaacaacacatgcaaacggtcaagtgtcatacggagctcgcccgacatacaagaagccaagtaaaacaaatgcatacaatgtaacaacacatgcagatggtactgcgacatatgggcctagagtaacaaaataa

SEQ ID NO: 8911 - DNA, 501 bp, Staphylococcus aureus
  CDS (1)...(501)
gtgaaaagccgattgcctcattcggaagaaagtcatacttttcatggtagagatgtttatgcatacaatggtgcgagattagctgcaaataagatagcgtttgaacgtctcggtcaggcaattaatgttgatagtattgaggcattagaaataagagaagtgacaaaaaatgaggattctgttacaggaagcattgatattttagatatcagatttgggtcattatggacaaatattccattggcattcttaaaatccttggaaattgttcatggtaataatttggtggtaacaatttatcatcaagataagaaagtctatcaaaatattattaaatttgcgcgatcgtttgcagatgttaatgtgggtgaacctcttgtgtatgttaactcgctagtaaatattggtgtagcagtcaatcaagactcattttcagatttatatcatattggtactggaaatgattggacgattcatttatctaaagcaccatcaatataa

SEQ ID NO: 8912 - DNA, 927 bp, Staphylococcus aureus
  CDS (1)...(927)
atggatgaacagcaacaattgacgaatgcatatcattcaaataaattatcgcatgcctatttatttgaaggtgatgatgcacaaacgatgaaacaagttgcgattaattttgcaaagcttattttatgtcaaacagatagtcaatgtgaaacaaaggttagtacatataatcatccagactttatgtatatatcaacaactgagaatgcaattaagaaagaacaagttgaacaacttgtgcgtcatatgaatcaacttcctatagaaagcacaaataaagtgtacatcattgaagactttgaaaagttaactgttcaaggggaaaacagtatcttgaaatttcttgaagaaccaccggacaatacgattgctattttattgtctacaaaacctgagcaaattttagacacaatccattcaaggtgtcagcatgtatatttcaagcctattgataaagaaaagtttataaatagattagttgaacaaaacatgtctaagccagtagctgaaatgattagtacttatactacgcaaatagataatgcaatggctttaaatgaagaatttgatttattagcattaaggaaatcagttatacgttggtgtgaattgttgcttactaataagccaatggcacttataggtattattgatttattgaaacaggctaaaaataaaaaactgcaatctttaactattgcagctgtgaatggtttcttcgaagatatcatacatacaaaggtaaatgtagaggataaacaaatatatagtgatttaaaaaatgatattgatcaatatgcgcaaaagttgtcgtttaatcaattaattttgatgtttgatcaactgacggaagcacataagaaattgaatcaaaatgtaaatccaacgcttgtatttgaacaaatcgtaattaagggtgtgagttag

SEQ ID NO: 8913 - DNA, 627 bp, Staphylococcus aureus
  CDS (1)...(627)
atgaataaaatgtcagcttttataacttttgagggcccagaaggctctggaaaaacaactgtaattaatgaagtttaccatagattagtaaaagattatgatgtcattatgactagagaaccaggtggtgttcctactggtgaagaaatacgtaaaattgtattagaaggcaatgatatggacattagaactgaagcaatgttatttgctgcatctagaagagaacatcttgtattaaaggtcataccagctttaaaagaaggtaaggttgtgttgtgtgatcgctatatcgatagttcattagcttatcaaggttatgctagagggattggcgttgaagaagtaagagcattaaacgaatttgcaataaatggattatatccagacttgacgatttatttaaatgttagtgctgaagtaggtcgcgaacgtattattaaaaattcaagagatcaaaatagattagatcaagaagatttaaagtttcacgaaaaagtaattgaaggttaccaagaaatcattcataatgaatcacaacggttcaaaagcgttaatgcagatcaacctcttgaaaatgttgttgaagacacgtatcaaactatcatcaaatatttagaaaagatatga

SEQ ID NO: 8914 - DNA, 537 bp, Staphylococcus aureus
  CDS (1)...(537)
atgaaaatcaatgagtttatagttgtagaaggacgagatgatactgagcgtgttaaacgagctgttgaatgtgatacgattgaaacgaatggtagtgccatcaacgaacaaactttagaagtaattagaaatgctcaacaaagtcgaggcgttattgtattaacagatccagatttcccaggagataaaattagaagtacaattactgaacatgtcaaaggtgttaaacatgcgtatattgatagagaaaaagctaaaaataaaaaagggaaaattggtgttgaacatgccgacttaattgatattaaagaagcgttaatgcatgttagttcaccctttgatgaagcttatgaatcaattgataaatctgtgctaatagagttggggttaattgttgggaaagatgcaaggcgccgtagagaaattttaagtagaaaattgcgaatcggccattccaatggtaagcagttattgaaaaagttaaatgcatttggttataccgaagcggatgtaaggcaagctttagaagatgaatga

SEQ ID NO: 8915 - DNA, 1974 bp, Staphylococcus aureus
  CDS (1)...(1974)
atggctaaagaaacattttatataacaaccccaatatactatcctagtgggaatttacatataggacatgcatattctacagtggctggagatgttattgcaagatataagagaatgcaaggatatgatgttcgctatttgactggaacggatgaacacggtcaaaaaattcaagaaaaagctcaaaaagctggtaagacagaaattgaatatttggatgagatgattgctggaattaaacaattgtgggctaagcttgaaatttcaaatgatgattttatcagaacaactgaagaacgtcataaacatgtcgttgagcaagtgtttgaacgtttattaaagcaaggtgatatctatttaggtgaatatgaaggttggtattctgttccggatgaaacatactatacagagtcacaattagtagacccacaatacgaaaacggtaaaattattggtggcaaaagtccagattctggacacgaagttgaactagttaaagaagaaagttatttctttaatattagtaaatatacagaccgtttattagagttctatgaccaaaatccagattttatacaaccaccatcaagaaaaaatgaaatgattaacaacttcattaaaccaggacttgctgatttagctgtttctcgtacatcatttaactggggtgtccatgttccgtctaatccaaaacatgttgtttatgtttggattgatgcgttagttaactatatttcagcattaggctatttatcagatgatgagtcactatttaacaaatactggccagcagatattcatttaatggctaaggaaattgtgcgattccactcaattatttggcctattttattgatggcattagacttaccgttacctaaaaaagtctttgcacatggttggattttgatgaaagatggaaaaatgagtaaatctaaaggtaatgtcgtagaccctaatattttaattgatcgctatggtttagatgctacacgttattatctaatgcgtgaattaccatttggttcagatggcgtatttacacctgaagcatttgttgagcgtacaaatttcgatctagcaaatgacttaggtaacttagtaaaccgtacgatttctatggttaataagtactttgatggcgaattaccagcgtatcaaggtccacttcatgaattagatgaagaaatggaagctatggctttagaaacagtgaaaagctacactgaaagcatggaaagtttgcaattttctgtggcattatctacggtatggaagtttattagtagaacgaataagtatattgacgaaacaacgccttgggtattagctaaggacgatagccaaaaagatatgttaggcaatgtaatggctcacttagttgaaaatattcgttatgcagctgtattattacgtccattcttaacacatgcgccgaaagagatttttgaacaattgaacattaacaatcctcaatttatggaatttagtagtttagagcaatatggtgtgcttaatgagtcaattatggttactgggcaacctaaacctattttcccaagattggatagcgaagcggaaattgcatatatcaaagaatcaatgcaaccgcctgctactaaagaggaaaaagaagagattcctagcaaacctcaaattgatattaaagactttgataaagttgaaattaaggcagcaacgattattgatgctgaacatgttaagaagtcagataagcttttaaaaattcaagtagacttagattctgaacaaagacaaattgtatcaggaattgccaaattctatacaccagatgatattattggtaaaaaagtagcagttgttactaacctgaaaccagctaaattaatgggacaaaaatctgaaggtatgatattatctgctgaaaaagatggtgtattaaccttagtaagtttaccaagtgcaattccaaatggtgcagtgattaaataa

SEQ ID NO: 8916 - DNA, 333 bp, Staphylococcus aureus
  CDS (1)...(333)
atgaaaaagttagccaattatttatgggtagaaaaagtaggagatttgtatgtgtttagtatgacacctgaattgcaagatgatattgggacagtaggttatgttgaattcgtaagtccagatgaagttaaagtggatgatgaaattgtgagtatcgaagcatcgaaaacggtcattgatgtgcaaacgccattgtcaggaacgattattgagcgaaatacaaaagcggaagaagaaccgacaattttaaactctgaaaaaccagaagaaaattggttgttcaaattggatgatgtcgataaagaagcattcctagcattaccggaggcttaa

SEQ ID NO: 8917 - DNA, 429 bp, Staphylococcus aureus
  CDS (1)...(429)
atgacaagtatgaatcctaatattacgtatacgacttatacaggtgtatcatctcatactggtccattaggttatgaaaatcctgatttaggtacatttttcttaatggctacaacgagtagaattattggtcatgatgcaagagaagaatggcgtaaaaatgatggtgtcgtaccagtgatttcgtcattacatccgtccaatcaaccatttgttaatgttacgaatgatgaacctgccacacgcagaggtatctggcaagttaaaccaatcatacaaggatgggatcatgtcgattttatcggtgtggacttcctggatttcaaacgtaaaggtgcagaacttgccaacttctatacaggtattataaatgacttgttgcgtgttgaagcgactgaaagtaaaggaacacaattgaaagcaagttaa

SEQ ID NO: 8918 - DNA, 846 bp, Staphylococcus aureus
  CDS (1)...(846)
atgaaaagtgaggatgtcattgtgaaggagaaacatattaaatgggataagattttttatggggacgactgggtaaataacgtagtcgaaacgataagaacaaaagatatattacaaagcgtttatttaaaacgttatttattacgcgcgatgatggcaggatttattatcgggattattacggtcttcgtattatcagttaaagcaacacacgaaccagatttaccgccaggcattgtgaatatggccagtgccattacattcagctttgcgttagtactcattttatttacaaactccgaactactaaccagtaacttcatgtactttactgtaggcctgtattataaagtaattaaaccaactagagtattgaaaatatttttattatgctttgcaggaaatattttaggtgctgctattttatttagtttcatgcgtttttcaaatgtaatgacgccagatatgttaaatcagttatcagcagttatagagcataaaacgttgtctactggttttgtaagtatattaatgaaagcgatcttcgccaatttctttatcaatatttcattagttattgccatgcaaattgacgatgtactcgcaaaaatgtttgtcatgatgttcggtgttaccatattcgcctttatgggttatgaacacgtcgtttacaacagttgcttatttatgggtggtttaatttatcaagttgatacattgcacttcataccagctatttcgaatatcgctgcggcttttatcggtaactatattggaggcggactcattataggtttattctatgcttacttgaatgatcatcatcaattttataaaaataattaa

SEQ ID NO: 8919 - DNA, 915 bp, Staphylococcus aureus
  CDS (1)...(915)
atgaccaacaaagttgttattttaggttcaacgaatgtcgatcaatttttaacagttgaaagatatgcacaaccaggcgaaacattacatgttgaagaagcacaaaaagcattcggcggaggtaaaggtgccaaccaggctattgccactgcacgcatgcaagcagacacaacatttattactaaaattggcactgatggcgttgctgatttcatcttagaagattttaaagtagctcatattgatacatcatatattatcaaaacagctgaagcaaaaacgggccaagcctttatcactgtgaatgcagaaggacaaaacaccatctatgtttatggtggtgcgaatatgacgatgacacctgaagatgttattaacgcaaaagacgctataatcaatgcagactttgtcgttgcacaattagaagtacccatcccggctattatatctgcatttgaaattgccaaggcacatggtgtgacgacagtattaaatcctgcaccagcgaaagcattacctaatgaattattatcattaatcgatattattgtgccaaacgaaacagaagccgaattgttatctgggattaaagtaactaatgaacaatctatgaaagacaatgccaattactttttatctataggcattaagactgttttgattacgctaggtaagcaaggtacatattttgctactaaaaatcaaagccaacacatcgaagcttataaagtaaatgcgattgatacaactgctgcaggcgacacatttattggtgcatttgtcagtcgcttaaacaagtcgcaagataacttagcagatgctattgattttggtaataaagcgagctcactcactgtacaaaaacacggcgcgcaagcatctattcctctactagaagaagtaaatcaagtttaa

SEQ ID NO: 8920 - DNA, 792 bp, Staphylococcus aureus
  CDS (1)...(792)
atgagcaataaatataaagaacaagcccaagacattcttacagctgtaggtggtgtcgaaaacattgttgatgcaacgtatgatacgaagtgcattacaattcatatgcaacatacaattccttctacagcaaatgaagtgaaacaaatagttgatgtgacatctgtagcagaaaatgatacgcagttagtcataaaattaaatggaaatgtcgatgaagtgtatcagcaattacagcgattaattaagaatgctaatgtcgaagagagtgagaatactgacaatattaatagtcaagatacaagttatacacctcaagtaaaagtaacaacaccaattttagtgaaagcaccaatcgctggtcgtcgtattttacttaaagaagtaagagattcaatttttagagagaaaatggtaggtgaaggcttagcaatcaaagctcatgaagaatccaaagtaatcgcaccgttcaatggtttaatatctatgattgtaccaactaagcatgcagttggtattcaatcagaagacggtgtggacatagtcattcatattggcgtgaatacagttgacttggaaggtaaagggttcaagtgctttgtaaagcaaaatgatcatgttgaagcagggcaaacgttgttgcaattcgaccagcaatatatacaacaacaaggctacaatgctgacgttattgtcgttattagcaactctgccgatttaggaaaagtagaactgacaatgaatgaaatcattacgactgaagatgttatttttaaaatatttaaaaactag

SEQ ID NO: 8921 - DNA, 135 bp, Staphylococcus aureus
  CDS (1)...(135)
atgctaacttttatgcttgggccattaagacaaatcactgatttttatatggaacatttactcgtaagtaattccattgtcattgcaggttattttgcgacaggtatttttaaaaagaaaaaagttgtgaattaa

SEQ ID NO: 8922 - DNA, 1842 bp, Staphylococcus aureus
  CDS (1)...(1842)
atgagtcaattcctcacacaattgaaagataatgttttagtagctgatggcgctataggaaccattttatactctgaaggattagacacctgtccagaagcatataatcttagccatccagataaagttgaacgcatccatcgttcatatattgaagccggtgctgatgtcattcaaaccaatacttatggtgcaaattttgaaaagttaaaacgattcggtcttgaagataaagttaaagcaatacatcaagccgccgttcgcatcgcaaaaaaagcagcaaataaagatacgtatatattaggcacagttggtgggtttagaggtatcaaacaagaggatatcagcttacaaactattctttatcatactgaaattcaaatagacaccttaattgaagaaggcgttgacgcgctacttttcgaaacgtattacgacctagaagagttaacaaatgtcatttcacgaacgagaaagaaatacgacattccaatcattgctcaattaaccgcttcaaacacaaattacttagttaatggtcaggcaatcaatgaaggattaaaacaactcgttcaatgtggtgcaaacatcgtgggactcaattgtcatcatggcccgcaccatatgcaagagtctttcacacatattgaattaccagagcacgcattcttatcttgttatccaaatgccagcttattagatattgaaaatagtgaatttaagtatagtgacaatgcacaatatttcggtcaagttgctcaaaatctaattcgcgaaggtgttcgtttaattggtggttgctgtggtacaacgccagagcacatcaaatttattaaagaatctattcagacacttaaacctgttaatgacaaaaaagtgattccgataccaacgaaagcacttttcaatccatctcaaaataaagttagacaatcattaacatctaaggttcaagaacgtccaaccgttattatcgaattggatacaccgaaacatttagacacggatagattttttgaaaatatcgctaaacttgataaagctaatgtagatgcggtaacactcgcagataattcattggcaactgtcagaattagcaatattgctgctgctagcttaattaagcaatattacaatattgaaccactcgtacatattacatgtcgagaccgaaacttaatcggcttgcagtcccatttacttggattatcgctcattggcgttaacgaaatattagccataactggtgatccttcaaaagttggtcacttaccaggtgcaaccaatgtctatgatgttaattctaaaggattaactgaactcgctctaagatttaatcaaggtattaacactgacggtgatgcgctgaagaaacgtacacacttcaacatcgctggcgcctttaaccctaatgttcgtaaattatatggtgccgtcaaaagattagagaaaaagatagaaagcggaatgtcttattttataacacaacccgtgtacagcaaagagaaaatcattgaaatttaccatgccactaagcacttgaacaaaccatttttcataggcattatgcctatcgcaagttacaaaaacgcactctttttgcataatgaagtgccaggaatcaagatgtcagatgaaattttacaacaatttgaagcagttaaagatgataaagccaaaacacgagaactaagtcttaagctttcaaaggatttaatcgatactgttcatgaatattttaatggtttatacattatcacaccgtttcaaaatgtcgaagattcattagaacttgcagcatactcaaaatctattactgctcacaaggaggcaatattatga

SEQ ID NO: 8923 - DNA, 243 bp, Staphylococcus aureus
  CDS (1)...(243)
atggcaggtggaccaagaagaggcggacgtcgtcgtaaaaaagtatgctatttcacagcaaatggtattacacatatcgactacaaagacactgaattattaaaacgttttatctcagaacgcggtaaaattttaccacgtcgtgtaactggtacttcagctaaatatcaacgtatgttgactacagctatcaaacgttctcgtcatatggcattattaccatatgttaaagaagaacaataa

SEQ ID NO: 8924 - DNA, 504 bp, Staphylococcus aureus
  CDS (1)...(504)
atgctaaatagagttgtattagtaggtcgtttaacgaaagatccggaatacagaaccactccctcaggtgtgagtgtagcgacattcactcttgcagtaaatcgtacgttcacgaatgctcaaggggagcgcgaagcagattttattaactgtgttgtttttagaagacaagcagataatgtaaataactatttatctaaaggtagtttagctggtgtagatggtcgcttacaatcccgtaattatgaaaatcaagaaggtcgtcgtgtgtttgttactgaagttgtgtgtgatagcgttcaattccttgaacctaaaaatgcgcaacaaaatggtggccaacgtcaacaaaatgaattccaagattacggtcaaggattcggtggtcaacaatcaggacaaaacaattcgtacaataattcatcaaacacgaaacaatctgataatccatttgcaaatgcaaacggaccgattgatataagtgatgatgacttaccattctaa

SEQ ID NO: 8925 - DNA, 1737 bp, Staphylococcus aureus
  CDS (1)...(1737)
gtgttagtaagggaggataccttggtgaaacattatttgactaaatttgtagcaatgctaataactgctgctatggtgtgtagctttgggttactgaaaagtcaggcagcagaacaacaaagtattagtgatgtatatagtgtgataacggatgcgaaatctgcactttctaataattcgatatcgaatgacaataagcagaaagcaattgagcaagtggtaagtgcagttaagaaattatcgcttgaagataatagtgaaagtaatgctgtcaaatcagatgtgagaaagcttgaagatgcaaaagcgaatgataatcaaaaagatacactttcgcaattaacgaagtcattaattgcttatgaagagaaattggctagtaaagatgcgggttctaaaattaaactattgcaacagcaagtcgatgctaaagatgctgcgatgacaaaagcgattaaagataaaaataaagcggaattagaatctttgaacaatagtttgaatcagatttggacaagtaatgaaacagtgattcgcaattatgacgcaaatcaatatggacaaattgaagtcgcattattacaacttagaattgcaattcataagtcaccattagatacggcaaaagtgtcacatgcttggacaacttttaaatcaaatattgatcatgtcgataaaaaaagtaatacgtctgcaaatgatcaataccatgtatcacaattaaatgatgcgttagagaaggcgattaaagctatcgacgacaatcaattgtcggatgctgatgctgcgcttacacattttatagaaacttggccgtatgttgaaggtcaaattcaaactaaagacggtgctttgtatacgaaaattgaagataaaataccatattatcaaagtgtattagacgaacataataaagcacatgtgaaagatggtttagtagatttaaataaccaaattaaagaggttgttggccatagttatagcttcgtcgatgtgatgattatctttttacgtgaagggctagaagtgttgttaattgtaatgacattgactaccatgacgcgtaatgtaaaagataagaaagggactgcaagtgtgattggtggtgcaattgccggacttgtactgagtattatcttagcaattacgtttgtagaaactttagggaatagtggcattcttcgtgaaagtatggaagcgggattaggtatcgttgcggtcatattaatgtttatcgttggtgtttggatgcacaaacgttcaaatgcaaaacgttggaatgacatgattaaaaatatgtatgctaatgcgattagtaatggtaatttggtattgttagcgacgattggtttaatatctgtgttgcgtgaaggtgtcgaggttatcattttctatatggggatgataggtgagctagcgaccaaagattttattattggtattgctttagctatcgttattttaatcatctttgcattattatttagatttatagttaaattaatacctattttctatatatttagagtgttgtcgatctttatttttattatgggattcaaaatgcttggcgtaagtattcaaaagttacaattattaggtgcgatgccaagacatgttattgaaggattcccaacgattaactggttgggcttttatccaagttatgaaccattgatagcacaaggtgcttatattatggtagttgctatcttaatctttaaatttaaaaaataa

SEQ ID NO: 8926 - DNA, 297 bp, Staphylococcus aureus; identical to SEQ ID NO: 8315
  CDS (1)...(297)

SEQ ID NO: 8927 - DNA, 1098 bp, Staphylococcus aureus
  CDS (1)...(1098)
atggctttaacagcaggtatcgttggattgccaaacgttggtaaatcaacattatttaatgcaataacaaaagcaggtgctttagcagcgaactatccattcgctacgattgatcctaatgtagggatagtagaagtgccagatgctagattacttaaattagaagaaatggttcaacctaaaaagacattgccgactacatttgaatttacagatatcgctggtattgtgaaaggtgcttcaaagggagaagggttaggtaataaattcttatcacatattagagaagtagatgcgatttgtcaggtcgttcgtgcatttgatgatgataacgtaactcatgttgctggtcgagtagaccctattgatgatattgaagttattaatatggaattagtactagcggacttagaatctgttgagaaacgtttgcctagaattgaaaaattagcacgtcaaaaagataagactgctgaaatggaagtacgtattttaacaactattaaagaagctttagaaaatggtaaacccgctcgtagtattgactttaatgaagaagatcaaaaatgggtgaatcaagcgcaattactgacttctaaaaaaatgctttatatcgctaatgttggtgaagatgaaattggtgatgatgataatgataaagtaaaagcgattcgtgaatatgcagcgcaagaagactctgaagtgattgttattagtgcaaaaattgaagaagaaattgctacattagatgatgaagataaagaaatgttcttagaagatttaggtatcgaagaaccaggattagatcgattaattagaacaacttatgaattattaggattatcaacatattttactgctggtgtgcaagaagtacgtgcttggacatttaaacaaggtatgactgcacctcaatgtgctggtatcattcatactgattttgaacgtggatttatccgtgccgaagtaacaagttatgacgactatgtacaatatggtggcgaaagtggcgctaaagaagcgggcagacaacgattagaaggtaaagaatatattatgcaagatggcgatatcgttcatttcagatttaatgtataa

SEQ ID NO: 8928 - DNA, 189 bp, Staphylococcus aureus
  CDS (1)...(189)
atgggtaaacaatgtttcgtaacaggtcgtaaagcttcgactggtaacagacgttcacacgctttaaactctactaaacgtagatggaacgctaaccttcaaaaagttagaatcctagttgacggtaaacctaaaaaagtttgggtttctgcacgtgctttaaaatctggtaaagtaaccagagtttaa

SEQ ID NO: 8929 - DNA, 231 bp, Staphylococcus aureus
  CDS (1)...(231)
gtggtactatcaaattcagtttcaacagtaatcgttgactaccgtggactaacagtagctgaagttactgacttacgttcacaattacgtgaagctggtgttgagtctaaagtatcactcaacactatggtacgtcgtgcagctgaaaaagctggtatcgaaggcttagctgaattcttaacaggtcctactgctatcgcgacttcaagtgatgatgctgttgctgcagtt

SEQ ID NO: 8930 - DNA, 300 bp, Staphylococcus aureus; identical to SEQ ID NO: 8542
  CDS (1)...(300)

SEQ ID NO: 8931 - DNA, 618 bp, Staphylococcus aureus
  CDS (1)...(618)
atgtattcagtgattagtaagattttgaatttcattttagttaaaatgtcaaaatcattatacgtaatcggtaaagataatattcctaaggatagtaaatatgtcgtaacttgtacgcatgaaagttataacgaagtcattatgctaggtatggcattatatcctaatcaaattcattatatggctaaaaaagaattattcaaaaataaatggattggtaaatttttaacgtctttaaatgcatttcctgtagatcgtgaaaatccaggacctagtactttaaaacgcccaatcaatttgttgaaagataataagacagttggtatcttcccaacaggttctcgcacatcgcaagaaggtgcacctttgaaacgtggtgcttcaacaattgcaatgttaagtaagtcaccaatattacctgttgcttatgttggtcctactaagattcacggtcttttaacaggacaagcatacataaatattggcaaaccaatcgatattaacgatttacctaaagatttaaaacgaaacgagcgtatcgattatattacaaaagagattgaaacacgaacagcaaagttacaacaagaattgcatgaaattgtaaaaagtttataa

SEQ ID NO: 8932 - DNA, 204 bp, Staphylococcus aureus; identical to SEQ ID NO: 4808
  CDS (1)...(204)

SEQ ID NO: 8933 - DNA, 168 bp, Staphylococcus aureus
  CDS (1)...(168)
atgaataaagggactgtctataaagaaggctcagcgactgaaattttcgtcaatgcagaagagttcccaagaataggtctagatttgccattcccaatcaacataaatcaaatgctgggacaccatacatcattcttaacttatgaagggctggtcgatcaactatga

SEQ ID NO: 8934 - DNA, 201 bp, Staphylococcus aureus
  CDS (1)...(201)
atgattaagtcagatttctttgtaattaacaaaactgatttagctccctatgtaggtgcatcattagaacaaatggctgaagatactaaagtatttcgtggtaaacgtccatttacttttactaacttaaaaaccgacgaaggtttggatgaagttatcgattggattgaacgcgacactttactcaaaggattatcataa

SEQ ID NO: 8935 - DNA, 399 bp, Staphylococcus aureus
  CDS (1)...(399)
atgacaatgacagatccaatcgcagatatgcttactcgtgtaagaaacgcaaacatggtgcgtcacgagaagttagaattacctgcatcaaatattaaaaaagaaattgctgaaatcttaaagagtgaaggtttcattaaaaatgttgaatacgtagaagatgataaacaaggtgtacttcgtttattcttaaaatatggtcaaaacgatgagcgtgttatcacaggattaaaacgtatttcaaaaccaggtttacgtgtttatgcaaaagctagcgaaatgcctaaagtattaaatggtttaggtattgcattagtatcaacttctgaaggtgtaatcactgacaaagaagcaagaaaaggtaatgttggtggagaaattatcgcatacgtttggtaa

SEQ ID NO: 8936 - DNA, 255 bp, Staphylococcus aureus
  CDS (1)...(255)
atgagtcgtgttggtaagaaaattattgacatccctagtgacgtaacagtaacttttgatggaaatcatgtaactgttaaaggtcctaaaggtgaattatcaagaactttaaatgaaagaatgacattcaaacaagaagataacacaattgaagttgtaagaccatctgattctaaagaagatagaacaaaccatggtacaactcgtgctttattaaacaatatggtacaaggtgtttctcaaggatacgtataa

SEQ ID NO: 8937 - DNA, 234 bp, Staphylococcus aureus
  CDS (1)...(234)
atgcaaggtaaagacttaatccttaacgttggttattctcacccagtagaaattaaagctgaagaaaacattactttctcagttgagaaaaacacagtcgttaaagttgaaggtatttcaaaagaacaagttggagcattagcatctaacatccgttcagtaagacctccagagccttacaaaggtaaaggtattcgttaccaaggtgaatacgttcgccgtaaagcagcgtaa

SEQ ID NO: 8938 - DNA, 378 bp, Staphylococcus aureus
  CDS (1)...(378)
gtgaaaggtatgacaacacagttaaatatcaattcagtcattgaaaatgcgaaacgtgttattacaccattatcaccaatttcgatttttgcagcacgaaatccatgggaaggattagaagcggatacgtttgaagatgtcgcaaaatggttacgtgatgttcgagatgtggatattttcccaaataaagcattaatagaaagcgctgtggcacgtggtgaattagatgaaagtgtctttaatcaacttgttactgatatgttacttgaacatcactacaatatcccgcaacactacatcaatctttatattgataacattaaaacattaaaagacgtacctgcatcatatataatcattcaaatgttggtaccgatt

SEQ ID NO: 8939 - DNA, 345 bp, Staphylococcus aureus
  CDS (1)...(345)
atgggaattattaaaatgaagttacctattgaagatttagagaaaaaacaaaaagaaaaagttaagccaacgaaaatggttacacgtcaaaatcgtcaaacaattaaaactgaacttgacttacgaggctatcgttatgaggatgctttaattgaactagatcaatatttagatcaagccgttttaagtaattacgaacaagtttatatcattcatggtaaaggtacaggtgcacttcaaaaaggtgtacaacaacatttgaaaaagcataaaagtgttagtgactttagaggtggtatgccaagcgaaggtggatttggcgttaccgttgcaacactaaaataa

SEQ ID NO: 8940 - DNA, 270 bp, Staphylococcus aureus; identical to SEQ ID NO: 8864
  CDS (1)...(270)

SEQ ID NO: 8941 - DNA, 705 bp, Staphylococcus aureus; identical to SEQ ID NO: 8867
  CDS (1)...(705)

SEQ ID NO: 8942 - DNA, 741 bp, Staphylococcus aureus; identical to SEQ ID NO: 8888
  CDS (1)...(741)

SEQ ID NO: 8943 - DNA, 303 bp, Staphylococcus aureus; identical to SEQ ID NO: 8767
  CDS (1)...(303)

SEQ ID NO: 8944 - DNA, 1491 bp, Staphylococcus aureus
  CDS (1)...(1491)
gtgaattatcgtgataaaattcaaaagtttagtattcgtaaatatacagttggtacattttcaactgtcattgcgacattggtatttttaggattcaatacatcacaagcacatgctgctgaaacaaatcaaccagcaagcgtggttaaacagaaacaacaaagtaataatgaacagactgagaatcgagaatctcaagtacaaaattctcaaaattcacaaaatggtcaatcattatctgctactcatgaaaatgagcaaccaaatattagtcaagctaattcattagatcaaaaagtagcgcaatcatctactactaatgatgaacaaccatcatctgaaaatgtaaatacaaagaaagattcggcaacggctgcgacaacacaacctgataaagaacagagtcagcataaacaaaacgaaagtcaatctgctaataaaaatggaaacgacaatagagcggctcatgtagaaaatcatgaagcaaatgtagtaacagcttcagattcatctgataatggtaacgtacaacatgaccgaaatgaattacaagcgttttttgatgcaaattatcatgattatcgctttattgaccgtgaaaatgcagattctggcacatttaactatgtaaaaggcatttttgataagattaatacgttattaggcagtaatgatccaataaacaataaagacttgcaacttgcatacaaagaattggaacaagctgttgctttaattcgtacaatgcctcaacgtcaacagactagccgacgttcaaatagaattcaaacgcgttcggttgagtcaagagctgcagagcctagatcagtatcagactatcaaaatgcaaattcatcatattatgttgaaaatgctaatgatggttcgggctatcctgttggtacatatatcaatgcttctagtaaaggggcgccatataatttaccaactacaccatggaatacattgaaggcctctgactcaaaggaaattgctcttatgacagcgaaacaaactggagacgggtaccaatgggttattaagtttaataaaggacatgctccacatcaaaatatgatcttttggtttgcattaccagcagaccaagtgccagtaggaagaactgactttgtaacagttaattcagatggaacaaatgtacaatggagtcatggagcaggagcaggtgcaaataaaccacttcaacaaatgtgggaatatggagtaaatgatcctcatcgttcacatgactttaaaataagaaatagaagtggccaagtaatatatgactggccaactgtccatatttattctttagaagatttatctagagcgagtgattattctagtgaagctggagcgacacctgctactaaagcatttggtagacaaaattatgaatatattaatggtcaaaaacctgctgaatcaccgggtgtacctaaagtttatactttcattcggccaagtgatgcaagttatccaatttaa

SEQ ID NO: 8945 - DNA, 660 bp, Staphylococcus aureus
  CDS (1)...(660)
atgtttggttctgatttagacagtgcacagttattacaagcattgtacgaaacgctatatatggtatctattgctttatttttaggagcagtgattggtattccattaggtgtcttattggtaattactcgaaaacaaggcatatggcccaatatagtgatacatcaagttttaaatcctttaatcaatattttaaggtcactaccatttattattttgttaattgcgattgtgccattcacaaaattagtagtaggtacttcaattggtacgactgctgccatcgtgcctttaacagtatatgtggcaccttacattgcaagacttgttgaaaactcattattggaagtagacgaggggattattgaagcggcgaaagcgatgggcgcttcaccactacaaatcattagatattttttaattcctgaagctttaggttcgttagtattagcaattaccactgcgattattggacttattggaagtacggcgatggcaggagctgttggcggtggtggtataggagacttagctttagtgtatggttatcaaagatttgatacgacggtcattattattaccgttattgtattagtcattattgtccaagtgattcaaacgctagggaatgttctagctagattcatacgtagacattaa

SEQ ID NO: 8946 - DNA, 525 bp, Staphylococcus aureus; identical to SEQ ID NO: 8689
  CDS (1)...(525)

SEQ ID NO: 8947 - DNA, 195 bp, Staphylococcus aureus; identical to SEQ ID NO: 4421
  CDS (1)...(195)

SEQ ID NO: 8948 - DNA, 972 bp, Staphylococcus aureus; identical to SEQ ID NO: 8816
  CDS (1)...(972)

SEQ ID NO: 8949 - DNA, 939 bp, Staphylococcus aureus; identical to SEQ ID NO: 8791
  CDS (1)...(939)

SEQ ID NO: 8950 - DNA, 285 bp, Staphylococcus aureus; identical to SEQ ID NO: 8684
  CDS (1)...(285)

SEQ ID NO: 8951 - DNA, 441 bp, Staphylococcus aureus; identical to SEQ ID NO: 8728
  CDS (1)...(441)

SEQ ID NO: 8952 - DNA, 1293 bp, Staphylococcus aureus; identical to SEQ ID NO: 8727
  CDS (1)...(1293)

SEQ ID NO: 8953 - DNA, 726 bp, Staphylococcus aureus
  CDS (1)...(726)
atgaaacatcaatcaattgtgaatttgaaaagtttgaatgttttacccgataaaaacaatgattggattaatcaacgagacataaactatgagaattatttaccaatgtatgattccaaggatattgaaaattctatatatttagatcaatttaatggagtaaattcagcaagagataattgggtaacaaatttttcgaatgaaaaagcattagtaaatgcaaaattacttgtagataactataattctgaaatagatagattaattgatatcttagattcaagagaacgtataaatttagtgaacaaagatgaaacatttattagttggacacgaggacttacccaaaaattttctaaaggaaaaaatatttcaattaatccagagagaattgttaaatttatgcatagaccatttacaaaaaaatggatagtgtacgacaaaaatattatggaaatgccaagtagatattataatataatggagaatactggacaggtgatttatatacaaggacagggaatgaataaagaattctcggctatgatcacggacatattacctaatttccaatttattggtaatggcaaaggctttgctacatacaaaggtaaagatagtttgaggcttgtagataatatttctaattcttttaaaaagaaaataaatcttaattcagaagagatagtatattatatatatgcaattttgcatcataaatattat

SEQ ID NO: 8954 - DNA, 693 bp, Staphylococcus aureus; identical to SEQ ID NO: 8686
  CDS (1)...(693)

SEQ ID NO: 8955 - DNA, 432 bp, Staphylococcus aureus; identical to SEQ ID NO: 8687
  CDS (1)...(432)

SEQ ID NO: 8956 - DNA, 549 bp, Staphylococcus aureus; identical to SEQ ID NO: 8688
  CDS (1)...(549)

SEQ ID NO: 8957 - DNA, 978 bp, Staphylococcus aureus; identical to SEQ ID NO: 8640
  CDS (1)...(978)

SEQ ID NO: 8958 - DNA, 933 bp, Staphylococcus aureus
  CDS (1)...(933)
atgttaacgacagaaaaactagttgaaacattaaagttagatttaatcgctggtgaagaaggactatcgaagccaattaaaaatgctgatatatcaagaccgggcttagagatggcaggttatttttcacattatgcgtcagatagaatacaactattaggaacaacggaactatcgttttacaatttattaccagataaggatcgcgcaggtcgtatgcgtaaactatgcagaccagaaacgcctgcaattattgtgacacgtggattgcagccaccagaagaattagttgaagctgcaaaagaattaaataccccacttatagttgctaaagatgcgactacaagtttaatgagtcgcttaacaacgtttttagagcatgcacttgcaaagacgacatctttacatggtgttttagtagatgtttacggtgttggtgtactaattaccggtgattcaggaataggtaaaagtgagactgcgttggaattagttaaacgtgggcatagattagtagcagatgataatgtggaaatacgtcaaattaataaagatgaactaatagggaaaccaccaaagttaatagaacatctattagaaatacgtggactaggtattatcaatgttatgactttatttggcgcgggttcaatattaactgaaaaacgaattagattaaatattaatttggaaaactggaacaagcaaaagttatatgaccgcgtaggtcttaatgaagagacgctaagtattttagatactgaaatcactaaaaaaacaatacctgtaagacctggtagaaatgttgcggtaattattgaggtcgctgcaatgaactatcgattaaatatcatgggcattaacacggccgaagaatttagtgaaagattaaatgaagaaattatcaagaacagtcataagagtgaggagtag

SEQ ID NO: 8959 - DNA, 1683 bp, Staphylococcus aureus
  CDS (1)...(1683)
gtgagtagttcgacaagtgagagtacgtcattatcagacagtacatcagaatctggtagcacatcaacatcattaagtaattcaacaagtggtagtacgtccatttcaacatcgacaagtatcagtgaatcaacgtcaacgtttaagagcgagagtgtttcaacatcactgagtatgtcaacgagtacaagtttgtctgactctacaagtttgtcaacatcattaagtgattccacaagtgatagtaagtctgattcattaagtacatcaatgtcgacaagtgattcaatcagtacaagtaaatctgattccattagtacatccacatcattaagtggttctacaagtgaaagtgaatccgactcaacatcatcaagtgaaagtaaatccgattcaacatcaatgagcataagtatgtctcaatcaacatcaggaagtacaagtacgtcaacgagtacaagtttgtctgactcaacgagtacatcattgtcactaagtgcctcaatgaatcaaagcggagtagactcaaactcagcaagccaaagtgcctcaaactcaacaagtacaagcacgagcgaatccgattcacaaagcacatcatcatatacaagtcagtcaacaagccaaagtgaatccacatcgacatcaacgtcactaagcgattcaacaagtatatctaaaagtacgagtcaatcaggttcggtaagcacatcagcgtcattaagtggttcagagagtgaatctgattcacaaagtatctcaacaagtgcaagtgagtcaacatcagaaagtgcgtcaacatcactcagtgactcaacaagtacaagtaactcaggatcagcaagtacgtcaacatcgctcaataactcagcaagcgcaagtgaatccgatttgtcgtcaacatctttaagtgattcaacatctgcgtcaatgcaaagcagtgaatccgattcacaaagcacatcagcatcattaagtgattcgctaagtacatcaacttcaaaccgcatgtcgaccattgcaagtttatctacatcggtaagtacatcagagtctggctcaacatcagaaagtacaagtgaatccgattcaacatcaacatcattaagcgattcacaaagcacatcaagaagtacaagtgcatcaggatcagcaagtacatcaacatcaacaagtgactctcgtagtacatcagcttcaactagtacttcgatgcgtacaagtactagtgattcacaaagtatgtcgctttcgacaagtacatcaacaagtatgagtgattcaacgtcattatctgatagtgttagtgattcaacatcagactcaacaagtgcgagtacatctggttcgatgagtgtgtctatatcgttaagtgattcgacaagtacatcaacatcggctagtgaagtaatgagcgcaagcatatctgattcacaaagtatgtcagaatctgtaaatgattcagaaagtgtaagtgaatctaattctgaaagtgactctaaatcgatgagtggctcaacaagtgtcagtgattctggctcattgagcgtctcaacgtcattaagaaaatcagaaagtgtaagcgagtcaagttcattgagttgctcacaatcgatgagcgattcagtaagcacaaacgattcgtcatcattaagtgtatcgacgttactaagaagtttataa

SEQ ID NO: 8960 - DNA, 1296 bp, Staphylococcus aureus
  CDS (1)...(1296)
atggacacatcaaaacaatttagaggtgacaaccgattgcttttgggtatcgttttaggggttattaccttttggctattcgcgcagtcacttgttaatcttgttgtcccattacaatcaacatatagtagtgacgttggaacgataaatatcgctgttagcttatctgccttatttgctggtttgtttatcgtaggtgctggtgatgttgctgataaatttggtcgcgtcaaaattacttatgtaggattgatattaaatgttgtaggttcattactcatcatcattacacctttgccagcatttttaattataggtagaataattcaaggtttgtctgcagcatgtattatgccatcaacacttgctattattaacgaatattatattggtacaagaagacaacgtgccttaagctattggtctattggttcttggggtggtagtggtatttgtacgttgtttggtggcttaatggctacatatataggttggcgttcaatatttgttgtttcaattctattaacattattagcaatgtacttaatcaaacatgcacctgagactaaagcagaaccaatcaaaggtatgaaagcagaagctaaaaagtttgacgttattggtttagtcattttagtagtgacgatgttaagtttaaatgtaatcatcacacagacgtctcattttggtttagtttcaccgttaattctaggtttaattgttgtgtttatctgttcattagttggttttgtatattacgaaaataaaataaagcatccacttgttgatttttcaatttttaaaaatagaggatacagtggtgcaactatttcaaacttcttattaaatggtgtagcaggtggtgcacttatcgttattaacacgtattatcaacaacaattaggatttaattcttcgcaaacgggttatatttcattaacgtatttaataacagtgttgtcaatgattcgtgtaggtgaaaagattttatctcaacatggtccgaagcgcccactattactaggaagtggctttacagtgattgggttaatcttattgtcgttaacatttttaccagaagtgtggtatatcatatctagtatagttggatatttattgtttggtactggtttaggattatatgctacaccatcaactgatacagcagttgctagtgcgccagatgataagtcgggtgttgcttcaagtgtgtataaaatggcgtcatcattaggaaatgcgtttggagtagcaatatctggtaccgtttatactgtgttagcagctaatttaaat

SEQ ID NO: 8961 - DNA, 204 bp, Staphylococcus aureus
  CDS (1)...(204)
gtggttagaaagctagttgggggcaattacagagtacttattccgttttctacagttattggtgcatggctattgttagtggctgatttattaggacgagtgatacagcctcctttagaaattccagccaatgctattttaatgattgtcggtggtccaatgctaatttacttaatttgtcaaagtcaacgaaatcgaatctaa

SEQ ID NO: 8962 - DNA, 780 bp, Staphylococcus aureus
  CDS (1)...(780)
atgatgataaaaaataaaaagaaactactatttttatgtttgttagtcattttaatcgcaactgcttatatttcgtttgtaaccggtacaattaaattgtcatttaatgacctatttacaaaatttacaactggtagcaatgaagcagtggattcaatcattgatttgcgattgccacgtatattaattgcattgatggttggcgcaatgttagcagtttctggagcattattacaagcagcactacaaaatcctttggcagaggcgaatatcattggcgtttcctcaggtgcacttataatgagagcactttgtatgttgtttattccacaattgtacttttacttaccattattaagttttattggaggtttaataccatttttaataattatattgttgcattctaaatttagattcaatgctgtaagtatgatattagtaggtgttgcgttattcgtattattaaatggtgttttagaaattttaactcaaaaccctttaatgaaaattcctcaaggcttaacaatgaaaatatggagcgacgtatacatattagcagtatcagcattattgggattaatattaacattactattgtcccctaaattgaatttactaaatttagacgacatacaagcgcgaagtatcggttttaatattgatcgttacagatggttaacaggtttattagcagtatttttagcaagtgcaactgttgcgattgttggacaactagcctttttaggtattattgtgcacatgtggttagaaagctag

SEQ ID NO: 8963 - DNA, 645 bp, Staphylococcus aureus
  CDS (1)...(645)
atgtggaaagaaaaagttcaacaatacgaagatcaaatcattaatgacttaaaaggattattagcaattgaaagtgtgagagatgatgcaaaagcatcagaagacgcaccagttggtccaggtcctcgtaaggcattagactacatgtatgaaattgcacatagagatggatttacaacacatgatgtggatcatattgcaggaagaattgaggcaggtaaaggaaatgacgtattaggtatcttatgtcatgttgacgttgttcctgctggtgatggatgggatagtaatccgttcgagccggttgtaacagaagatgctatcatagctagaggtacacttgatgacaaaggtccaacaattgctgcttattatgcaattaagatattagaagatatgaatgtggattggaagaaacgtattcatatgattattggtacggatgaagaatctgattggaaatgtacggatcgctattttaaaacagaagaaatgccaacattaggttttgcaccagatgcagaatttccatgtattcatggtgaaaaaggcattacaacatttgatttagttcaaaataaacttactgaagatcaagatgaacttgattatgaattgggtactgagctcgaattcgtatcatat

SEQ ID NO: 8964 - DNA, 1197 bp, Staphylococcus aureus
  CDS (1)...(1197)
atggttaaatttattcattgttcggatttacatttagatagtcctttcaaatctaagagtcatataagccctaaaatttttgaggatgttcaaaaaagtgcttatgaaagttttaaaaatattgtagatattgcattacaacaagatgttgattttgtaattatcgcgggtgatttatttgatagtgaaaacagaacattacgtgctgaaattttcttaaaacagcaatttgaacgtttacaaaatgaacaaatctttgtttatgtttgtcatggtaatcacgatcctttatcatcaaagatttcatcaaactggccagataatgtttctgtattttcaaataaagttgagacgtatgaagcaattactaaatctggtgaaacaatttatattcacggatttagttatgaaaatagagcaagttatgagaacaagattgatgaatatccatcaagtcaaggccaaaaaggcatacatattggtgtcttgcatggtacgtatagtaaatcttcagttaacgaaagatataccgagttcattttagaagatttaaacagtaaattgtatcattattgggctttaggtcatatacatgaacgtcaacaattaagtgatatgcctgtaattaactattcaggtaatattcaaggtagacattttaatgagcaaggtgaaaaaggttgcttattaatcgagggtgaccacttaaaattaaagactaaattttatcctacacagtatattagatttgaagaagcaactattgaaacggataagacatctaagcaaggtttatacgaggtcattcaaaactttaaagaacaagtgagagaagaaggaaaagccttttatcgtttaacgcttgttattaatagtgagacattaatttcacctcaagatttattacaagttgaagaaatgattacagattatgaagaaaacgaaaatcaatttgtatatattgatgagttaaaaatacaatatgcacaaaatgatgagtcacctttagttaatgaattttcagcggaattattagtcgatcaaactgtttttgataaagcgatgtcagatttatatttaaatccaagggcatctaagttcctagacgattatggaacattcgaccatacagcattagttaatcgtgctgaagaaatattaaaagctgaaatgagaggtgaacaaaatgataattaa

SEQ ID NO: 8965 - DNA, 927 bp, Staphylococcus aureus
  CDS (1)...(927)
atggatgaacagcaacaattgacgaatgcatatcattcaaataaattatcgcatgcctatttatttgaaggtgatgatgcacaaacgatgaaacaagtggcgattaattttgcaaagcttattttatgtcaaacagatagtcaatgtgaaacaaaggttagtacatataatcatccagactttatgtatatatcaacaactgagaatgcaattaagaaagaacaagttgaacaacttgtgcgtcatatgaatcaacttcctatagaaagcacaaataaagtgtacatcattgaagactttgaaaagttaactgttcaaggggaaaacagtatcttgaaatttcttgaagaaccaccggacaatacgattgctattttattgtctacaaaacctgagcaaattttagacacaatccattcaaggtgtcagcatgtatatttcaagcctattgataaagaaaagtttataaatagattagttgaacaaaacatgtctaagccagtagctgaaatgattagtacttatactacgcaaatagataatgcaatggctttaaatgaagaatttgatttattagcattaaggaaatcagttatacgttggtgtgaattgttgcttactaataagccaatggcacttataggtattattgatttattgaaacaggctaaaaataaaaaactgcaatctttaactattgcagctgtgaatggtttcttcgaagatatcatacatacaaaggtaaatgtagaggataaacaaatatatagtgatttaaaaaatgatattgatcaatatgcgcaaaagttgtcgtttaatcaattaattttgatgtttgatcaactgacggaagcacataagaaattgaatcaaaatgtaaatccaacgcttgtatttgaacaaatcgtaattaagggtgtgagttag

SEQ ID NO: 8966 - DNA, 966 bp, Staphylococcus aureus; identical to SEQ ID NO: 8678
  CDS (1)...(966)

SEQ ID NO: 8967 - DNA, 333 bp, Staphylococcus aureus
  CDS (1)...(333)
atgggtcaaaatgatttagttaaaacgttacgaatgaattatttgtttgatttttatcaatccttattgacgaataaacaacgtaattatttggaattattttatcttgaagattattctttaagtgaaatcgcagatacttttaatgtgagtagacaagcagtttatgataatataagaagaactggcgatttagttgaagattatgaaaagaaattggaattataccagaaatttgagcaacgccgagaaatatatgatgaaatgaaacaacatttaagtaatccagaacaaatacaacgttatattcaacaattagaagacttagaatag

SEQ ID NO: 8968 - DNA, 1368 bp, Staphylococcus aureus
  CDS (1)...(1368)
atggcatttgaagggttatcagaacgcttgcaagcgacgatgcaaaaaatgcgtggtaagggtaaacttactgaagctgatataaagataatgatgcgtgaagtaagattagcgttacttgaggctgacgtaaactttaaagtggtaaaagaatttattaaaacagtatcagaacgcgcattaggttccgatgtaatgcaatcattaacaccagggcaacaagttattaaaatagttcaagatgaattaacgcagttgatgggtggagaaaatacgtcgattaatatgtcaaataaaccacctactgttgttatgatggttggtttacaaggtgctggtaaaacaacaactgcaggtaaattagcattattgatgcgtaaaaaatacaacaaaaaacctatgttagttgcagcagatatttatcgtccagcagcgataaatcaattacaaacagtagggaaacaaattgatattcctgtatacagtgaaggagatcaagtaaagccacaacaaattgtaactaatgcattaaaacatgctaaagaagaacatttagactttgtaatcattgatacagcaggtcgattacacatcgatgaagcattgatgaacgaattaaaagaagtaaaagacattgctaaaccaaacgaaattatgttagttgtcgattcaatgacgggtcaagatgctgtcaatgttgcagaatcttttgacgatcaacttgatgtcacaggtgttaccttaactaaattagatggtgatacacgtggtggtgcagctttatctattcgttcggtgacacaaaaaccaattaaatttgttggtatgagtgaaaagttagatggtttagagctattccatcctgaacgtatggcatcacgtattttaggtatgggtgatgtgttaagtttaattgaaaaagcgcaacaagatgtggatcaagaaaaagcaaaagatttagagaaaaagatgcgtgagtcatcgtttactttagatgattttttagaacaacttgatcaggtgaaaaatctaggaccactggatgatattatgaaaatgattccaggtatgaataaaatgaaagggctagataagcttaatatgagtgaaaagcaaattgatcatattaaagcgattatccagtcaatgacgccggctgaaagaaacaatccagacacattgaatgtatcacgtaaaaagcgtattgctaaagggtctggtcgttcattacaagaagtcaatcgtttgatgaaacaatttaacgatatgaagaaaatgatgaaacagttcactggtggcggtaaaggtaaaaaaggtaaacgcaatcaaatgcaaaatatgttaaaaggtatgaatttaccgttttaa

SEQ ID NO: 8969 - DNA, 942 bp, Staphylococcus aureus; identical to SEQ ID NO: 8813
  CDS (1)...(942)

SEQ ID NO: 8970 - DNA, 768 bp, Staphylococcus aureus
  CDS (1)...(768)
atgagtgattttcaaagagaacagagaaaaaatgaacatgttgaaatagcaatggcccaatctgacgcaatgcattcagattttgataagatgcgttttgtgcatcattctatcccatcaattaatgtaaatgatatcgatttgacatcacagacgcctgacttaacgatggcatatccggtttatattaatgcaatgacgggtggtagcgagtggacgaaaaacatcaatgaaaagctagctgtagttgcaagagaaactggcttagcgatggcagttggatcaacacatgcggcattgagaaatccacgcatggctgagacgtttacgattgcgcgaaaaatgaatcctgaaggcatgatttttagcaatgttggtgcggacgtaccagtagaaaaggctttggaagcagttgaattacttgaggcacaagcgttacaaatccatgttaattctcctcaagaattagttatgcctgaagggaatcgtgaatttgtgacttggttagataatatagcgtggattgtatcacgagtgtctgttccagtcattataaaagaagttggatttggtatgagcaaagaattaatgcatgacttacaacaaataggcgtcaagtatgtcgatgttagtggcaaaggtggtactaactttgtagatattgaaaatgaacgtcgtgcaaataaagatatggattacttatcatcatggggacagtctacagttgagtcattacttgaaacaacggcttatcaaagcaaaatttga

SEQ ID NO: 8971 - DNA, 540 bp, Staphylococcus aureus
  CDS (1)...(540)
atggaattacaacaagcaatagctaatagaagaagtgtgaaaaaatttaaaagagatatgcacatagatgacgcattgctatatcaagcaattgagaaagctgctgatgctccaaatcacggaatgagggaaccatggagagttgtgcatgttccgaaagacagattaggagatatgagtaaggatatttctaaatttgcatttcctaatgaattagataagcaacaatgtcattatgatgcagttacgaaactaggtggcatgttattgcttattttaaaaacagatccaagacaacgtcaaaatgatgaaaactactttgcatttggtgcatatgcacaaaatcttatgttgttactttatgaagcgggaataggtacatgttggaaatcgccattatatatctatgatcctaaagtaagaaaaacacttggtataaagaaagatgaagttcttgctggattcttatatttaacggatttagaagaagatatgcctaaagcaccacgtaaaaatagaaacttaattacattatattaa

SEQ ID NO: 8972 - DNA, 978 bp, Staphylococcus aureus; identical to SEQ ID NO: 8681
  CDS (1)...(978)

SEQ ID NO: 8973 - DNA, 450 bp, Staphylococcus aureus; identical to SEQ ID NO: 8838
  CDS (1)...(450)

SEQ ID NO: 8974 - DNA, 999 bp, Staphylococcus aureus
  CDS (1)...(999)
atgactaaaattaccgtttttggtatgggaagttttgggacagcccttgccaatgttcttgcagaaaatggacatgatgttttgatgtggggtaaaaatcaagatgctgttgatgaattaaatacatgtcatacaaataaaaagtatttaaaatacgcgaaattagatgttaacatcatcgctacttcagatatgaccaaagcaattcaatttgcagatatttacttaatggctttacctactaaagcaatgcgagaagttgcttctcaaattaatgataagctgacctctaaaaagacttttatacatgttgctaaaggtattgaaaatgggacgtttaaacgtgtgtcagaaatgattgaagattctatttcacctgaatataatgcaggtattggcgtgttgtcagggccaagtcatgcggaagaagttgtagtcaagcaaccaactacagttgctgcttcatcaaaagataaaagtgtaagtaaattaacgcaagatttatttatgaatgattatttgcgtgtgtacacgaatgatgacttgattggtgttgaacttggtggtgcattgaaaaatatcatcgcagtagcaagtggtatcgtagctggaattggctacggtgataatgcaaaagctgcattaatgactcgtggcttagcggaaattagtagattaggtgaaaagttaggtgccgatcctatgacatttctaggtttaggtggtatcggtgacttaatcgttacttgcacatcaacacattctcggaatttcacattaggatataaacttggacaaggtgaatcaatggatcaagcattatctgaaatgaatatggttgttgaaggtatttatacaactaaatcagtttatcatttagctaaagaaaaaaatgtggatatgccaattacaaatgcattatatagagtattatttgaaaatatctcagtaaaagaatgcgtaaaagatttaatggagcgcgataaaaaatctgaataa

SEQ ID NO: 8975 - DNA, 273 bp, Staphylococcus aureus; identical to SEQ ID NO: 8503
  CDS (1)...(273)

SEQ ID NO: 8976 - DNA, 633 bp, Staphylococcus aureus; identical to SEQ ID NO: 8874
  CDS (1)...(633)

SEQ ID NO: 8977 - DNA, 186 bp, Staphylococcus aureus
  CDS (1)...(186)
atgatcaaacctggtcaagaacttgttgttgataagaagcaaccagcaaaccatgcagatgctaacaaagctcaagcattaccagaaactggtgaagaaaatccattcatcggtacaactgtatttggtggattatcattagccttaggtgcagcgttattagctggacgtcgtcgcgaactataa

SEQ ID NO: 8978 - DNA, 885 bp, Staphylococcus aureus
  CDS (1)...(885)
atgcctaattgggaacctggtaaaaaggtacatcttgtagggcatagtatgggtggtcaaacaattcgtttaatggaagagtttttaagaaatggtaacaaagaagaaattgcctatcataaagcgcatggtggagaaatatcaccattattcactggtggtcataacaatatggttgcatcaatcacaacattagcaacaccacataatggttcacaagcagctgataagtttggaaatacagaagctgttagaaaaatcatgttcgctttaaatcgatttatgggtaacaagtattcgaatatcgatttaggattaacgcaatggggctttaaacaattaccaaatgagagttacattgactatataaaacgcgttagtaaaagcaaaatttggacatcagacgacaatgctgcctatgatttaacgttagatggctctgcaaaattgaacaacatgacaagtatgaatcctaatattacgtatacgacttatacaggtgtatcatctcatactggtccattaggttatgaaaatcctgatttaggtacatttttcttaatggctacaacgagtagaattattggtcatgatgcaagagaagaatggcgtaaaaatgatggtgtcgtaccagtgatttcgtcattacatccgtccaatcaaccatttgttaatgttacgaatgatgaacctgccacacgcagaggtatctggcaagttaaaccaatcatacaaggatgggatcatgtcgattttatcggtgtggacttcctggatttcaaacgtaaaggtgcagaacttgccaacttctatacaggtattataaatgacttgttgcgtgttgaagcgactgaaagtaaaggaacacaattgaaagcaagttaa

SEQ ID NO: 8979 - DNA, 168 bp, Staphylococcus aureus
  CDS (1)...(168)
atggcaccaatttcacctaaaaattacgaaatcactgattatctgttagaaaaagcttgtgaacgtaagggtattccgtttgagcctaaagaaatagataatgaagcggaaatacaagcgaaacaagtattaatagacagagcaaatagacagaagaaatctcgttaa

SEQ ID NO: 8980 - DNA, 585 bp, Staphylococcus aureus
  CDS (1)...(585)
atgcatgaattgactatttatcattttatgtcagataaattgaatttatacagtgatataggaaatattattgctttaagacaacgtgctaaaaaacgaaatattaaagttaatgtcgtagaaatcaatgaaacagaaggtattacctttgatgaatgtgatattttctttatcggtggtggaagtgatagagaacaagcattagcaacaaaagaattaagtaaaattaagacaccacttaaagaagcgattgaagatggtatgccgggattaacgatttgtggaggctatcaatttttagggaaaaaatatatcacgcctgatggtacagaattagaagggttaggtattttagatttttatactgaatcaaagacaaaccgattaacaggagatattgttatcgaaagtgatacttttggaactattgtaggttttgaaaatcacggtggtagaacatatcatgatttcggtacacttggtcatgttacttttggttatggtaataatgatgaagataaaaaagaaggcattcattataaaaatttattaggtacttatttacatggcaccaatttcacctaa

SEQ ID NO: 8981 - DNA, 2478 bp, Staphylococcus aureus
  CDS (1)...(2478)
ttatcattgaacttacatgaaaaagcacacgggccacatggtttagttgctggtaccactggttcagggaaatctgagattatccaatcatacattttatctttagctattaattttcaccctcatgaagttgcattcctattgattgactataaaggtgggggtatggcgaacttatttaaagatttagtccatttagttggtacgattacaaacttagatggcgatgaagcgatgcgtgccttaacatcaatcaaagccgaattgagaaaacgtcaacgtttattcggagagcatgatgttaaccatattaatcaataccataagttatttaaagaaggtattgcgacagaaccaatgccacatttattcattatttccgatgagtttgccgaattaaaatcagaacaacctgattttatgaaagaacttgtatcaacggcacgtattggacgttcgttaggtattcatttaatacttgcgacacaaaaaccatcgggtgttgttgatgaccaaatttggtctaactctaaatttaagttggcattaaaagtacaagatagacaagacagtaatgaaattttaaaaacaccagatgcagcagacattacattaccaggtcgtgcgtatttacaagttggtaataatgaaatttatgaattattccaatctgcatggagtggtgcaacatatgacatcgaaggcgataaattagaagttgaagataagacgatttacatgattaatgactatggtcaacttcaagcaatcaacaaagacttgagtggacttgaagatgaagaaacgaaagaaaatcaaactgagttagaagcggtcatagatcatatcgaatctattacaacacgattagaaatcgaagaagttaagcgtccatggctaccaccattgccagaaaatgtatatcaagaagatttagtagaaacagatttcagaaaattatggtcagatgatgcaaaagaagtggaattaacattaggacttaaagacgtaccagaagaacaatatcaaggaccgatggtattgcaattgaaaaaagctgggcacatcgcgttaatcggaagtccaggatatggtagaacaacgttcttacacaacattattttcgatgttgcaagacaccatcgtcctgatcaagcacacatgtacttgttcgatttcggtaccaatggtttgatgccagttacagacataccacatgtcgctgattactttacagtagatcaagaagacaagattgctaaggcgatacgtatatttaatgatgaaattgatcgtcgtaagaagattttaagtcagtatcgtgtcactagtatttctgaatatcgaaaattaactggtgaaacaattccgcatgtctttattcttattgataactttgacgcagtaaaagattcacctttccaagaagtttttgaaaatatgatgattaaaatgacgcgtgaagggctagcattagacatgcaagtaaccttaactgcttcaagagctaacgctatgaaaacaccaatgtacattaatatgaaaacgcgtatcgcaatgtttttatatgataaatcagaggtgtcgaacgtagtaggacagcaaaaatttgcggttaaagatgttgtgggtcgagcattgttaagtagtgatgacaacgtatcattccatattggccaaccatttaaacatgatgagaccaaatcatataatgatcaaattaatgatgaagtatcggcgatgacagaattttataaaggtgaaacaccaaatgatattcctatgatgccagatgaaattaaatatgaagattacagagaatcattaaacttaccagatatagttgcaaatggtgctttaccaattggattagattatgaaggtgttacactacaaaaaattaaattaactgaaccagcaatgatttcatcagaaaatccgagagaaattgcgcatattgctgaaattatgatgaaagaaattgacatattaaatgaaaaatatgcgatttgtatcgcagactcaagtggagagtttaaagcttataggcatcaagtggctaactttgccgaagaaagagaagacattaaagcgattcatcaactaatgattgaagacttaaagcaaagagaaatggacggcccatttgaaaaagattcactttatattatcaatgattttaaaacatttattgattgcacgtatattccggaagatgatgttaaaaagcttattacaaaaggaccagaacttggcttgaacattttatttgtcggcattcataaagaattaatagatgcttatgataaacagattgatgttgcacgtaaaatgattaaccaatttagtataggtattcgtatttcagaccaacaattctttaaatttagatttattcaacgagaacctgttattaaagaaaatgaagcatatatggtcgcaaaccaagcttatcaaaagattagatggtttaaatag

SEQ ID NO: 8982 - DNA, 2625 bp, Staphylococcus aureus
  CDS (1)...(2625)
gttacacaagcaaatactgcattaaacggtattcaaaacttagatcgtgcgaaacaggctgctaacacagcgattacaaatgcttcggacttaaatacaaaacaaaaagaagcattaaaagcacaagtaacaagtgcaggacgtgtatctgcagcaaatggtgttgaacatactgcgactgaattaaatactgcgatgacagctttaaagcgtgccattgctgataaagctgagacaaaagctagtggtaactatgtcaatgctgatgcgaataaacgtcaagcatatgatgaaaaagttacagctgccgaaaatatcgttagtggtacaccaacaccaacgttaacaccagcagatgttacaaatgcagcaacgcaagtaacgaatgctaagacgcagttaaacggtaatcataatttagaagtagcgaaacaaaatgctaacactgcaattgatggtttaacttctttaaatggtccgcaaaaagcaaaacttaaagaacaagtgggtcaagcgacgacgttgccaaatgttcaaactgttcgtgataatgcacaaacattaaacactgcaatgaaaggtctacgagatagcattgcgaatgaagcaacgattaaagcaggtcaaaactacacagatgcaagtcaaaacaaacaaactgactacaacagtgcagtcactgcagcaaaagcaatcattggtcaaacaactagtccatcaatgaatgcgcaagaaattaatcaagcgaaagaccaagtgacagctaaacaacaagcgttaaacggtcaagaaaacttaagaactgcgcaaacaaatgcgaagcaacatttgaacggcttaagtgacttaactgacgctcaaaaagatgcagtgaaacgtcaaatcgaaggtgcaacgcatgttaatgaagtaacacaagcacaaaataatgcggatgcattaaatacagctatgacgaacttgaaaaatggtattcaagatcagaatacgattaagcaaggtgttaacttcactgatgccgacgaagcgaaacgtaatgcatatacaaatgcagtgacgcaagctgaacaaattttaaataaagcacaaggtccaaatacttcaaaagacggtgtcgaaactgcgttagaaaatgtacaacgtgctaaaaacgaattgaacggtaatcaaaatgttgcgaacgctaagacaactgcgaaaaatgcattgaataacctaacatcaattaataatgcacaaaaagaagcattgaaatcacaaattgaaggtgcgacaacagttgcaggtgtaaatcaagtgtctacaacggcatctgaattaaatacagcaatgagcaacttacaaaatggtattaatgatgaagcagctacaaaagcagcgcttaatggtactcaaaaccttgaaaaagctaaacaacacgcaaatacagcaattgacggtttaagccatttaacaaatgcacaaaaagaggcattaaaacaattggtacaacaatcgactactgttgcagaagcacaaggtaatgagcaaaaagcaaacaatgttgatgcagcaatggacaaattacgtcaaagtattgcagataatgcgacaacaaaacaaaaccaaaattatactgatgcaagtcagaataaaaaggatgcgtacaataatgctgtcacaactgcacaaggtattattgatcaaactacaagtccaactttagatccgactgttatcaatcaagctgctggacaagtaagcacaactaaaaatgcattaaatggtaatgaaaacctagaggcagcgaaacaacaagcgtcacaatcattaggttcattagataacttaaataatgcgcaaaaacaaacagttactgatcaaattaatggcgcgcatactgttgatgaagcaaatcaaattaagcaaaatgcgcaaaacttaaatacagcgatgggtaacttgaaacaagcgatagctgacaaagatgctacgaaagcgacagttaacttcactgatgcagatcaagcaaaacaacaagcatataacactgctgttacaaatgctgaaaatatcatttcaaaagctaatggcggcaatgcaacacaagctgaagttgaacaagcaatcaaacaagttaatgctgcaaaacaagcattaaatggtaatgccaacgttcaacatgcaaaagacgaagcaacagcattaattaatagctctaatgaccttaaccaagcacaaaaagacgcattaaaacaacaagttcaaaatgcaactactgtagctggtgtaaacaatgttaaacaaacagcacaagagttaaacaatgctatgacacaattaaaacaaggcattgcagataaagaacaaacaaaagctgatggtaactttgtcaatgcagatcctgataagcaaaatgcatataatcaagcagtagcgaaagctgaagcattaattagtgctacgcctgatgttgtcgttacacctagcgaaattactgcagcgttaaataaagttacgcaagctaaaaatgatttaaatggtaatacaaacttagcaacggcgaaacaaaatgttcaacatgctattgatcaattgccaaacttaaaccaagcgcaacgtgatgaatacagcaaacaaatcatt

SEQ ID NO: 8983 - DNA, 357 bp, Staphylococcus aureus; identical to SEQ ID NO: 8907
  CDS (1)...(357)

SEQ ID NO: 8984 - DNA, 1278 bp, Staphylococcus aureus; identical to SEQ ID NO: 8895
  CDS (1)...(1278)

SEQ ID NO: 8985 - DNA, 3144 bp, Staphylococcus aureus
  CDS (1)...(3144)
agtgccgaaacaatcattaatcaaacaacaaatccaacgatgtctgttgatgatgttaatcgtgcaacttcagctgttacttctaataaaaatgcattaaatggttatgaaaaattagcacaatctaaaacagatgctgcaagagcaattgatgcattaccacatttaaataatgcacaaaaagcagatgttaaatctaaaattaatgctgcatcaaatattgctggcgtaaatactgttaaacaacaaggtacagatttaaatacagcgatgggtaacttgcaaggtgcaatcaatgatgaacaaacgacgcttaatagtcaaaactatcaagatgcgacacctagtaagaaaacagcatacacaaatgcggtacaagctgcgaaagatattttaaataaatcaaatggtcaaaataaaacgaaagatcaagttactgaagcgatgaatcaagtgaattctgctaaaaataacttagatggtacgcgtttattagatcaagcgaagcaaacagcaaaacagcagttaaataatatgacgcatttaacaactgcacaaaaaacgaatttaacaaaccaaattaatagtggtactactgtcgctggtgttcaaacggttcaatcaaatgccaatacattagatcaagccatgaatacgttaagacaaagtattgccaacaaagatgcgactaaagcaagtgaagattacgtagatgctaataatgataagcaaacagcatataacaacgcagtagctgctgctgaaacgattattaatgctaatagtaatccagaaatgaatccaagtacgattacacaaaaagcagagcaagtgaatagttctaaaacggcacttaacggtgatgaaaacttaactgctgcaaaacaaaatgcgaaaacgtacttaaacacattgacaagtattacagatgctcaaaagaacaatttgattagtcaaattactagtgcgacaagagtgagtggtgttgatactgtaaaacaaaatgcgcaacatctagaccaagctatggctagcttacagaatggtattaacaacgaatctcaagtgaaatcatctgagaaatatcgtgatgctgatacaaataaacaacaagagtatgataatgctattactgcagcgaaagcgattttaaataaatcgacaggtccaaacactgcgcaaaatgcagttgaagcagcattacaacgtgttaataatgcgaaagatgcattgaatggtgatgcaaaattaattgcagctcaaaacgcagcgaaacaacatttaggtactttaacgcatatcactacagctcaacgtaatgatttaacaaatcaaatttcacaagctacaaacttagctggtgttgaatctgttaaacaaaatgcgaatagtttagatggtgctatgggtaacttacaaacggctatcaacgataagtcaggaacattagcgagccaaaacttcttggatgctgatgagcaaaaacgtaatgcatacaatcaagctgtatcagcagccgaaaccattttaaataaacaaactggaccgaatacagcgaaaacagcagtcgaacaagcacttaataatgttaataatgcgaaacatgcattaaatggtacgcaaaacttaaacaatgcgaaacaagcagcgattacagcaatcaatggcgcatctgatttaaatcaaaaacaaaaagatgcattaaaagcacaagctaatggtgctcaacgcgtatctaatgcacaagatgtacagcacaatgcgactgaactgaacacggcaatgggcacattaaaacatgccatcgcagataagacgaatacgttagcaagcagtaaatatgttaatgccgatagcactaaacaaaatgcttacacaactaaagttaccaatgctgaacatattattagcggtacgccaacggttgttacgacaccttcagaagtaacagctgcagctaatcaagtaaacagcgcgaaacaagaattaaatggtgacgaaagattacgtgaagcaaaacaaaacgccaatactgctattgatgcattaacacaattaaatacacctcaaaaagctaaattaaaagaacaagtgggacaagccaatagattagaagacgtacaaactgttcaaacaaatggacaagcattgaacaatgcaatgaaaggcttaagagatagtattgctaacgaaacaacagtcaaaacaagtcaaaactatacagacgcaagtccgaataaccaatcaacatataatagcgctgtgtcaaatgcgaaaggtatcattaatcaaactaacaatccgactatggatactagtgcgattacccaagctacaacacaagtgaataatgctaaaaatggtttaaacggtgctgaaaacttaagaaatgcacaaaacactgctaagcaaaacttaaatacattatcacacttaacaaataaccaaaaatctgccatctcatcacaaattgatcgtgcaggtcatgtgagtgaggtaactgctactaaaaatgcagcaactgagttgaatacgcaaatgggtaacttggaacaagctatccatgatcaaaacacagttaaacaaagtgttaaatttactgatgcagataaagctaaacgtgatgcgtatacaaatgcggtaagcagagctgaagcaattctgaataaaacgcaaggtgcaaatacgtctaaacaagatgttgaagcggctattcaaaatgtttcaagtgctaaaaatgcattgaatggtgatcaaaacgttacaaatgcgaagaatgcagctaaaaatgcattaaataacttaacgtcaattaataatgcacaaaaacgtgacttaacaactaaaattgatcaagcaacaactgtagctggtgttgaagctgtatctaatacgagtacacaattgaatacagcgatggctaacttgcaaaatggtattaatgataaaacaaatacactagcaagtgaaaactatcatgatgctgattcagataagaaaactgcttatactcaagccgttacgaacgcagaaaatattttaaataaaaatagtggatcaaatttagacaaaactgccgttgaaaacgcgttgtcacaagttgctaatgcgaaaggtgccctaaatggtaaccataatttactg

SEQ ID NO: 8986 - DNA, 648 bp, Staphylococcus aureus; identical to SEQ ID NO: 8858
  CDS (1)...(648)

SEQ ID NO: 8987 - DNA, 798 bp, Staphylococcus aureus; identical to SEQ ID NO: 4851
  CDS (1)...(798)

SEQ ID NO: 8988 - DNA, 900 bp, Staphylococcus aureus; identical to SEQ ID NO: 8806
  CDS (1)...(900)

SEQ ID NO: 8989 - DNA, 927 bp, Staphylococcus aureus
  CDS (1)...(927)
atggttgaaacgccttattttacaaaagaaactgttgataaagaaaaaggtattattgcagaagaaataaaaatgtatcaagagcaacctggatataaattaatgtttaatacattgcgtgcaatgtatcaacaacatccaatacgtgttgatattgccggtagtgtagaaagtatatacgatattacaaaagatgatttgtatctatgttatgaaacgttttatcatccatcaaatatggttttatttgttgttggcgatgtggatcctgaagcaatatgtcgaatagtaaaacaacacgaggatgctcgtaataaagttaaccaacccaaaatcgaacgaggacttgttgatgaaccggaggatgttaaagaagcatttgttactgaatctatgaaaattcaatcaccaagactaatgcttggttttaaaaataaaccattacaagaagcgcctcaaaaatatgtacaacgtgatttagaaatgtcattattctttgagttaatttttggggaagaaacagatttttatcagaatttattaaacgaaggacttatcgatgatacatttggttatcaatttgtactagagccgacgtatagtttttcaatcgtgacaagtgctactgaagaaccagataaattaaaaaaattattattagatgagttgcgtgataaaaaaggcaatttccaagatgcagaagcatttgaacttttgaaaaagcaatttataggtgaattcatatcaagtttaaactcacttgaatatattgctaatcaatatactaaattgtattttgaaggtgttagcgtgtttgacatgttagacattgttgaaaatatcacgttagatagtattaacgaaacgtcatcgttatatttaaatttagatcagcaagtcgatagtcgtttggagattaaaaagtaa

SEQ ID NO: 8990 - DNA, 900 bp, Staphylococcus aureus; identical to SEQ ID NO: 8860
  CDS (1)...(900)

SEQ ID NO: 8991 - DNA, 537 bp, Staphylococcus aureus
  CDS (1)...(537)
atgattactgttttgtttggtgggagtagaccaaacggtaatactgcacaattaacaaaattcgctttgcaagatttagagtatcaatggattgacgtgacacaacatcagtttaaaccgatacgtgacgtgagacatacagcagagactattacttcatatgacgatgactatttgccgattctagataaaatattggctagtgatacaattatttttgcatcaccagtgtattggtatagcatttcagcaccattgaaagcatttatcgaacattggtcagaaacattacaagataaacgatatcctaattttaaggcacaaatggccgaaaaggattttagagttattttagttggtggagattgtccaaaaataaaagcgaagccagcaattacgcaaatgaaatatagtttagactttttaggtgccactttaaatggttatattattggaactgctgaaaagcctggtgacatcatgaaagacaactatgccttagcacgtgcaactgagtggaatagtatattgcaataa

SEQ ID NO: 8992 - DNA, 669 bp, Staphylococcus aureus
  CDS (1)...(669)
gtgaaagataatttacaacaaatctcaacacaaattaatgacaaaagtgaaaaaaataatttttcaacaaaaccaaacgtgattgcagttacaaaatatgttacaatagagcgagctaaagaagcgtatgaggctggaataagacattttggtgagaatagattggaaggcttttttcaaaagaaagaagcattaccatcagatgcggtgatccattttataggatcattacaatctcgaaaagttaaggacgttataaacgacgtagattatttccatgctttagatcgattgagcttagccaaagaaattaacaaacgtgcagaacataaaattaaatgtttcttgcaagtgaacgtttcgggagaagcttctaaacatggtattgctttagaagatgttgatcagtttatagatgatcttaaaaaatatgacaaaatcgaaattgtaggtttaatgacgatggcaccattgacagatgatgaagcatatattagatcgttatttaaacagttacgtttgaaaaaagaagaaatacaacgactcaatttagaatatgcgccttgtgatgaattatcaatgggaatgagtaatgactatcttattgcagttgaagaaggtgcgacgtttgttagaattgggactaaacttgtaggagaagaggagtga

SEQ ID NO: 8993 - DNA, 564 bp, Staphylococcus aureus; identical to SEQ ID NO: 8080
  CDS (1)...(564)

SEQ ID NO: 8994 - DNA, 198 bp, Staphylococcus aureus
  CDS (1)...(198)
atgcgtcaatctacagatctttttgcaagaggtgttggtgattcaaccgatgtcgtacaaaaagaaatgtatacatttaaagataaaggcgatagaagtattacattaagacctgagggaacagctgcagttgcgcgttcatatattgaacataaaatgcaaggttatccaaaccaaccaattgaactttattacaac

SEQ ID NO: 8995 - DNA, 1884 bp, Staphylococcus aureus
  CDS (1)...(1884)
gatagtcaaacagaagaggaatttaataaatttgctaagggtgctgtagacaaaacttttaatacctcgcaactggtacgccaactaaatgataaaagtttgccacttattgtaacgacgattcaaaaaatggctaaagcgattcaagggaatgcccctttattagaacagtataaaacgaataaagttgtatttattattgatgagtgtcatcgcagtcaatttggtgacatgcatcgtctagttaaacaacatttcaaaaatgcccaatactttggattcactggtacgccacgttttccagaaaatagtagtcaagatggtagaacaactgcagatattttcggtagatgcttacatacgtatttaattagagatgccattcatgatggtaatgtacttggtttctcagttgactatattaatacttttaaaaataaagctttaaaagcagaagataacagcatggttgaagcaattgatacggaagaagtatggttagcggataaacgtgtggaattagtaacacgacatatcatcaataatcatgataaatatacacgtaatcgtcaatattcaagtatatttacagtccaaagtattcacgcgcttattaaatattatgagacatttaagcgacttaacaaaaagttggaacaaccgttaacgatagctggtatatttacgtttaaacctaatgaagatgatcgtgatggtgaagtgccatatcattcacgtgaaaaattagagataatgattagtgattataataaaaagttcgagacgaatttttcaacagacacaactaatgagtattttaatcatatttcaaaaaacgttaaaaagggcgttaaagatagtaaaattgatatcttaatcgttgttaatatgttcttaactggttttgatagtaaagtactgaacactttatatgttgataagaatttaatgtatcatgatttaattcaagcgtattcacgtacaaatagggttgaaaaagaatcaaagccatttggtaaaattgtaaactatcgtgacttgaaaaaagagacagacgatgcactgagagtattctcacaaacaaatgatacggatacaattttaatgcgcagttatgaagagtataaaaaagaatttatggacgcttatcgtgagcttaaaatgattgtgccgacaccacacatggttgatgacattcaagatgaagaagagctaaagcgctttgttgaagcttatcgtttattagctaaaataatattacgtttaaaagcatttgacgagtttgagtttacaattgatgaaattggaatggatgaacaagagaatgaagactataaaagtaaatatttagctgtgtacgatcaagtaaaaagagcgacggctgagaaaaataaagtatccattttaaatgatattgatttcgaaatagaaatgatgcgtaatgatacgattaatgtgaattatattatgaatatattgagacaaattgatcttgaagacaaagcggaacaacgtcgtaaccaagaacaaattagacgcattttagatcatgcagatgatccgacattgaggttaaaacgagatctaattagagaattcatcgacaatgttgtaccttctttaaataaggatgatgatatcgatcaagaatatgttaatttcgaaagtattaaaaaagaagcggagttcaaaggatttgctggagagagatctatcgatgaacaagccctaaaaacaatttcaaatgactaccagtatagtggtgttgtaaacccacatcaccttaaaaaaatgattggtgatttgccattgaaagaaaagcgtaaagcaagaaaagccattgaatctttcgtggcagaaacaactgaaaaatacggtgtgtaa

SEQ ID NO: 8996 - DNA, 354 bp, Staphylococcus aureus; identical to SEQ ID NO: 8335
  CDS (1)...(354)

SEQ ID NO: 8997 - DNA, 240 bp, Staphylococcus aureus; identical to SEQ ID NO: 4806
  CDS (1)...(240)

SEQ ID NO: 8998 - DNA, 207 bp, Staphylococcus aureus; identical to SEQ ID NO: 8846
  CDS (1)...(207)

SEQ ID NO: 8999 - DNA, 639 bp, Staphylococcus aureus; identical to SEQ ID NO: 8851
  CDS (1)...(639)

SEQ ID NO: 9000 - DNA, 333 bp, Staphylococcus aureus; identical to SEQ ID NO: 8916
  CDS (1)...(333)

SEQ ID NO: 9001 - DNA, 804 bp, Staphylococcus aureus
  CDS (1)...(804)
atgacagagatgatcaggctcggaggaaagaccatgtttaaaaagctaataaataaaaagaacactataaataattataatgaagaattagactcgtctaatatacctgaacatatcgctattattatggatggtaatgggcgatgggctaagaagcgaaaaatgcctagaattaaaggtcattacgaaggtatgcaaacaataaaaaaaattactagggtagctagtgatattggtgttaagtacttaactttatacgccttttccactgaaaattggtcaagacctgaaagtgaagtaaattatattatgaatttgcctgtcaatttcttaaagacattcttaccggaactaattgaaaaaaatgtcaaagttgaaacaattggatttactgataagttgccaaaatcaacgatagaagcaattaataatgctaaagaaaagacagctaataataccggcttaaaattaatatttgcaattaattatggtggcagagcagaacttgttcatagtattaaaaatatgtttgacgagcttcatcaacaaggtttaaatagtgatatcatagatgaaacatatataaacaatcatttaatgacaaaagactatcctgatccagagttgttaattcgtacttcaggagaacaaagaataagtaatttcttgatttggcaagtttcgtatagtgaatttatctttaatcaaaaattatggcctgactttgacgaagatgaattaattaaatgtataaaaatttatcagtcacgtcaaagacgctttggcggattgagtgaggagtag

SEQ ID NO: 9002 - DNA, 741 bp, Staphylococcus aureus; identical to SEQ ID NO: 8705
  CDS (1)...(741)

SEQ ID NO: 9003 - DNA, 234 bp, Staphylococcus aureus; identical to SEQ ID NO: 8704
  CDS (1)...(234)

SEQ ID NO: 9004 - DNA, 1017 bp, Staphylococcus aureus
  CDS (1)...(1017)
atgattaaacaactatgtaaaaatatcacaatttgtacgttagcactatcgactactttcactgtattaccagctacttcatttgcaaagattaattctgaaatcaaacaagtttctgagaagaatcttgatggtgatactaaaatgtatacacgtacagctacaacaagtgatagtcaaaaaaatattactcaaagcttacaatttaatttcttaactgaacctaattatgataaagaaacagtatttattaaagcaaaaggtacaattggtagtggtttgagaattttagacccaaatggttattggaatagtacattaagatggcctggatcttattcagtttcaattcaaaatgttgatgacaacaacaatacaaatgtgactgactttgcaccaaaaaatcaggatgaatcaagagaagttaaatatacgtatggttataaaacaggtggagatttttcgattaatcgtggaggcttaactggaaatattacaaaagagagtaattattcagagacgattagttatcaacaaccatcatatcgtacattacttgatcaatctacgtcacataaaggtgtaggttggaaagtagaagcacatttgataaataatatgggacatgaccatacgagacaattaactaatgatagtgataatagaactaaaagtgaaattttttctttaacacgaaatggaaatttatgggcgaaagataatttcacacctaaagacaaaatgcctgtaactgtgtctgaagggtttaatccagaatttttagctgttatgtcacatgataaaaaagacaaaggtaaatcacaatttgttgttcattataaaagatcaatggatgagtttaaaatagattggaatcgccatggtttctggggctattggtctggtgaaaaccatgtagataaaaaagaagaaaaattatcagcattatatgaagttgattggaagacacataatgtgaagtttgtaaaagtacttaatgataatgaaaagaaataa

SEQ ID NO: 9005 - DNA, 474 bp, Staphylococcus aureus
  CDS (1)...(474)
gtgcatatcctggtaaagctgctgaagaacgtggacaaagtgaatctatcgcaacaaaatttgattgagatggcttcattaaaagtaccagttattgcgattgtcattggtgaaggtggcagtggaggtgctctaggtattggtattgccaataaagtattgatgttagagaatagtacttactctgttatatctcctgaaggtgcagcggcattattatggaaagacagtaatttggctaaaattgcagctgaaacaatgaaaattactgcccatgatattaagcaattaggtattatagatgatgtcatttctgaaccacttggcggtgcacataaagatattgaacagcaagctttagctattaaatcagcgtttgttgcacagttagattcacttgagtcattatcacgtgatgaaattgctaatgatcgctttgaaaaattcagaaatatcggttcttatatagaataa

SEQ ID NO: 9006 - DNA, 540 bp, Staphylococcus aureus
  CDS (1)...(540)
atgttagattttgaaaaaccactttttgaaattcgaaataaaattgaatctttaaaagaatctcaagataaaaatgatgtggatttacaagaagaaattgacatgcttgaagcgtcattggaacgagaaactaaaaaaatatatacaaatctaaaaccatgggatcgtgtgcaaattgcgcgtttgcaagaaagacctacgaccctagattatattccatatatctttgattcgtttatggaactacatggtgatcgtaattttagagatgatccagcaatgattggtggtattggctttttaaatggtcgtgctgttacagttattggacaacaacgtggaaaagatacaaaagataatatttatcgaaattttggtatggcgcatccagaaggttatcgaaaagcattacgtttaatgaaacaagctgaaaaattcaatcgtcctatctttacatttatagatacaaaaggtgcatatcctggtaaagctgctgaagaacgtggacaaagtgaatctatcgcaacaaaatttgattga

SEQ ID NO: 9007 - DNA, 927 bp, Staphylococcus aureus; identical to SEQ ID NO: 4852
  CDS (1)...(927)

SEQ ID NO: 9008 - DNA, 480 bp, Staphylococcus aureus; identical to SEQ ID NO: 8756
  CDS (1)...(480)

SEQ ID NO: 9009 - DNA, 942 bp, Staphylococcus aureus
  CDS (1)...(942)
gtgaatatgatggcgaaaatagtagtagcattaggtggtaatgctttaggaaaatcacctcaagaacaactcgagcttgttaaaaatactgcgaaatcattagtaggattaataacaaaaggacatgagattgttattagtcatggtaatggaccacaggttggaagcattaatttgggacttaactatgctgcagaacataaccaaggtccggcatttccatttgctgaatgtggcgcaatgagtcaagcttacatcggctatcaattacaagaaagcttacaaaatgaattgcattctattggaatggataaacaagtggtaacactagtgacacaagttgaagttgatgaaaatgatccggcatttaacaatccttcaaaaccaattgggttattttacaacaaagaagaagctgaacaaattcaaaaagaaaaaggatttatatttgttgaagatgctggaagaggatatagacgcgttgttccttcaccacaacccatctctattattgaattagagagtattaaaacacttattaaaaatgatacactcgttattgctgctggtggtggaggtataccagtaattagagagcaacatgatggttttaaaggtattgatgcagttatagacaaagataaaacaagtgcgttgttgggtgctaatattcaatgcgatcaattgattattttaacagcaattgattatgtatatattaattttaacactgaaaaccaacagcctttgaaaacaacaaatgttgatgaattaaaacgatatatagacgaaaatcaatttgcaaaaggaagtatgttaccaaaaattgaagcagccatatcatttattgaaaacaatccaaaaggaagtgtgcttataacatcattaaatgaattagatgctgccttagagggtaaagtaggtactgtgattaaaaagtaa

SEQ ID NO: 9010 - DNA, 861 bp, Staphylococcus aureus; identical to SEQ ID NO: 8879
  CDS (1)...(861)

SEQ ID NO: 9011 - DNA, 1290 bp, Staphylococcus aureus; identical to SEQ ID NO: 8793
  CDS (1)...(1290)

SEQ ID NO: 9012 - DNA, 255 bp, Staphylococcus aureus; identical to SEQ ID NO: 8279
  CDS (1)...(255)

SEQ ID NO: 9013 - DNA, 870 bp, Staphylococcus aureus
  CDS (1)...(870)
gtggacattactggtaaagatcaactttatttctatgatgcggctgctccaattattgaaaaagaatctattgatatggataaagtttacttaaagtcccgttatgataaaggtgaagctgcatatttaaactgtcctatgactgaggatgaatttaatcgcttttatgatgcagtattagaagctgaagttgcgcctgtaaattcatttgaaaaagaaaaatatttcgagggttgtatgccttttgaagtaatggcagaacgcggacgcaagacattactatttggaccaatgaaaccagtaggattagaagatccaaagactgggaaacgtccttatgcggtggttcaattaagacaagatgacgctgctggtacactctacaatattgttggcttccaaacgcatttaaaatggggagctcaaaaagaagtcattaaattaattccaggcttagaaaatgttgatattgttagatatggtgtgatgcatagaaataccttcattaattcaccggacgtattaaacgagaaatatgaattgatttcacaaccaaacatacagtttgcgggacaaatgactggtgttgaaggttatgtagaaagcgcagctagcggcttagttgcaggtatcaatcttgcgcataaaatattaggcaagggtgaggtagtatttccgagagaaacaatgattggaagtatggcttactatatttctcatgctaaaaacaataagaatttccaacctatgaatgctaacttcgggttattaccatctttagaaactagaattaaagataaaaaagaacgctatgaagcacaagctaatagagctttggattacttagaaaatttcaaaaaaactttataa

SEQ ID NO: 9014 - DNA, 330 bp, Staphylococcus aureus
  CDS (1)...(330)
atgactcaaactgtaaatgtaataggtgctggtcttgccggttcagaagcggcatatcaattagctgaaagaggaattaaagttaatctaatagagatgagacctgttaaacaaacaccagcgcaccatactgataaatttgcggaacttgtatgttccaattcattacgcggaaatgctttaactaatggtgtgggtgttttaaaagaagaaatgagaagattgaattctataattattgaagcggctgataaggcacgagttccagctggtggtgcattagcagttgatagacacgatttttcaggttatattactgaaaacacttaa

SEQ ID NO: 9015 - DNA, 3807 bp, Staphylococcus aureus
  CDS (1)...(3807)
cataacttacaagttgctaaagacaatgcaaatacagccattgatcagttaccaaacttaaatcaaccacaaaaaacagcattaaaagaccaagtgtcgcatgcagaacttgttacaggtgttaatgctattaagcaaaatgctgatgcgttaaataatgcaatgggtacattgaaacaacaaattcaagcgaacagtcaagtaccacagtcagttgactttacacaagcggatcaagacaaacaacaagcatataacaatgcggctaaccaagcgcaacaaatcgcaaatggcataccaacacctgtattgacgcctgatacagtaacacaagcagtgacaactatgaatcaagcgaaagatgcattaaacggtgatgaaaaattagcacaagcgaaacaagaagctttagcaaatcttgatacgttacgcgatttaaatcaaccacaacgtgatgcattacgtaaccaaatcaatcaagcacaagcgttagctacagttgaacaaactaaacaaaatgcacaaaatgtgaatacagcaatgagtaacttgaaacaaggtattgcaaacaaagatactgtcaaagcaagtgagaactatcatgatgctgatgccgataagcaaacagcatatacaaatgcagtgtctcaagcggaaggtattatcaatcaaacgacaaatccaacgcttaacccagatgaaataacacgtgcattaactcaagtgactgatgctaaaaatggcttaaacggtgaagctaaattggcaactgaaaagcaaaatgctaaagatgccgtaagtgggatgacgcatttaaacgatgctcaaaaacaagcattaaaaggtcaaatcgatcaatcgcctgaaattgctacagtgaaccaagttaaacaaacagcaacgagcctagatcaagcaatggatcaattatcacaagctattaatgataaagctcaaacattagcggacggtaattacttaaatgcagatcctgacaaacaaaatgcgtataaacaggcagtagcaaaagctgaagcattattgaataaacaaagtggtactaatgaagtacaagcacaagttgaaagcatcactaatgaagtgaacgcagcgaaacaagcattaaatggtaatgacaatttggcaaatgcaaaacaacaagcaaaacaacaattggcgaacttaacacacttaaatgatgcacaaaaacaatcatttgaaagtcaaattacacaagcgccacttgttacagatgtcactacgattaatcaaaaagcacaaacgttagatcatgcgatggaattattaagaaatagtgttgcggataatcaaacgacattagcgtctgaagattatcatgatgcaactgcgcaaagacaaaatgactataaccaagctgtaacagctgctaataatataattaatcaaactacatcgcctacgatgaatccagatgatgttaatggtgcaacgacacaagtgaataatacgaaagttgcattagatggtgatgaaaaccttgcagcagctaaacaacaagcaaacaacagacttgatcaattagatcatttgaataatgcgcaaaagcaacagttacaatcacaaattacgcaatcatctgatattgctgcagttaatggtcacaaacaaacagcagaatctttaaatactgcgatgggtaacttaattaatgcgattgcagatcatcaagccgttgaacaacgtggtaacttcatcaatgctgatactgataaacaaactgcttataatacagcggtaaatgaagcagcagcaatgattaacaaacaaactggtcaaaatgcgaaccaaacagaagtagaacaagctattactaaagttcaaacaacacttcaagcgttaaatggagaccataatttacaagttgctaaaacaaatgcgacgcaagcaattgatgctttaacaagcttaaatgatcctcaaaaaacagcattaaaagaccaagttacagctgcaactttagtaactgcagttcatcaaattgaacaaaatgcgaatacgcttaaccaagcaatgcatggtttaagacagagcattcaagataacgcagcaactaaagcaaatagcaaatatatcaacgaagatcaaccagagcaacaaaactatgatcaagctgttcaagccgcaaataatattatcaatgaacaaactgcaacattagataataatgcgattaatcaagcagcgacaactgtgaatacaacgaaagcagcattacatggtgatgtgaagttacaaaatgataaagatcatgctaagcaaacggttagtcaattagcacatctaaacaatgcacaaaaacatatggaagatacgttaattgatagtgaaacaactagaacagcagttaagcaagatttgactgaagcacaagcattagatcaacttatggatgcattacaacaaagtattgctgacaaagatgcaacacgtgcgagcagtgcatatgtcaatgcagaaccgaataaaaaacaatcctatgatgaagcagttcaaaatgctgagtctatcattgcaggattaaataatccaactatcaataaaggtaatgtatcaagtgcgactcaagcagtaatatcatctaaaaatgcattagatggtgttgaacgattagctcaagataagcaaactgctggaaattctctaaatcatttagatcaattaacaccagctcaacaacaagcgctagaaaatcaaattaataatgcaacaactcgtgataaagtggctgaaatcattgcacaagcgcaagcattaaatgaagcgatgaaagcattaaaagaaagtattaaggatcaaccacaaactgaagcaagtagtaaatttattaacgaggatcaagcgcaaaaagatgcttatacgcaagcagtacaacacgcgaaagatttgattaacaaaacaactgatcctacattagctaaatcaatcattgatcaagcgacacaggcagtgacagatgctaaaaacaatttacatggtgatcaaaaactagctcaagataagcaacgtgcaacagaaacgttaaataacttgtctaacttgaatacaccacaacgtcaagcacttgaaaatcaaattaataatgcagcaactcgtggcgaagtagcacaaaaattaactgaagcacaagcacttaaccaagcaatggaagctttacgtaatagcattcaagatcaacagcaaacggtagcgggaagcaagtttatccatgtagataaaccacaaaaagatgcttaccaagcagcagttcaaaatgcaaaagatttaattaatcaaactaacaatccaacgcttgataaagcacaagttgaacaattgacacaagctgttaaccaagctaaagataacctacacggtgatcaaaaacttgcagacgataaacaacatgcggttactgatttaaatcaattaaatggtttgaataatccgcaacgtcaagcacttgaaagccaaataaacaacgcagcaactcgtggcgaagtagcacaaaaattagctgaagcaaaagcgcttgatcaagcaatgcaagcattacgtaatagtattcaagatcaacaacaaacagaatctggtagcaagtttatcaatgaagataaaccgcaaaaagatgcttaccaagcagcagttcaaaatgcaaaagatttaattaaccaaacaggtaatccaacactcgacaaatcacaagtagaacaattgacacaagcagtaacaactgcaaaagataatctacatggtgatcaaaaacttgctcgtgatcaacaacaagca

SEQ ID NO: 9016 - DNA, 804 bp, Staphylococcus aureus; identical to SEQ ID NO: 4854
  CDS (1)...(804)

SEQ ID NO: 9017 - DNA, 771 bp, Staphylococcus aureus; identical to SEQ ID NO: 4855
  CDS (1)...(771)

SEQ ID NO: 9018 - DNA, 768 bp, Staphylococcus aureus; identical to SEQ ID NO: 4793
  CDS (1)...(768)

SEQ ID NO: 9019 - DNA, 1179 bp, Staphylococcus aureus; identical to SEQ ID NO: 8657
  CDS (1)...(1179)

SEQ ID NO: 9020 - DNA, 831 bp, Staphylococcus aureus
  CDS (1)...(831)
atgactatgattacaccaattgataaaaatgatgatgagttattaaatagttttgaacgccgaaatcgttcaaaagtgcgcttggctttaaagcgaggtacgacagtagaacgatctgatagagaaggtttaaaaacatttgctgagttaatgaaaatcactggggaacgcgatggcttcttaacgcgtgatattagttactttgaaaatatttatgatgcgttgcatgaagatggagatgctgaactatttttagtaaagttggatccaaaagaaaatatagcgaaagtaaatcaagaattgaatgaacttcatgccgaaattgctaaatggcagcagaagatgaaaacatctgaaaagcaagctaaaaaagcgcaaaatatgattaatgatgcgcaaaataaaattgctaaaaatgaagatttaaaacgagacctagaagctttagaaaaggaacatcctgaaggtatttatctttctggtgcactattaatgtttgctggctcaaaatcatattacttatatggtgcgtcttctaatgaatttagagattttttaccaaatcatcatatgcagtatacgatgatgaagtatgcacgtgaacatggtgcaacaacttacgatttcggtggtacagataatgatccagataaagactcagaacattatggattatgggcatttaaaaaagtgtggggaacatacttaagtgaaaagattggtgaatttgattatgtattgaatcagccattgtaccaattaattgagcaagttaaaccgcgtttaacaaaagctaaaattaaaatatctcgtaaattaaaacgaaaatag

SEQ ID NO: 9021 - DNA, 1176 bp, Staphylococcus aureus; identical to SEQ ID NO: 8855
  CDS (1)...(1176)

SEQ ID NO: 9022 - DNA, 537 bp, Staphylococcus aureus; identical to SEQ ID NO: 8914
  CDS (1)...(537)

SEQ ID NO: 9023 - DNA, 1170 bp, Staphylococcus aureus
  CDS (1)...(1170)
atggctaaggaaattgtgcgattccactcaattatttggcctattttattgatggcattagacttaccgttacctaaaaaagtctttgcacatggttggattttgatgaaagatggaaaaatgagtaaatctaaaggtaatgtcgtagaccctaatattttaattgatcgctatggtttagatgctacacgttattatctaatgcgtgaattaccatttggttcagatggcgtatttacacctgaagcatttgttgagcgtacaaatttcgatctagcaaatgacttaggtaacttagtaaaccgtacgatttctatggttaataagtactttgatggcgaattaccagcgtatcaaggtccacttcatgaattagatgaagaaatggaagctatggctttagaaacagtgaaaagctacactgaaagcatggaaagtttgcaattttctgtggcattatctacggtatggaagtttattagtagaacgaataagtatattgacgaaacaacgccttgggtattagctaaggacgatagccaaaaagatatgttaggcaatgtaatggctcacttagttgaaaatattcgttatgcagctgtattattacgtccattcttaacacatgcgccgaaagagatttttgaacaattgaacattaacaatcctcaatttatggaatttagtagtttagagcaatatggtgtgcttaatgagtcaattatggttactgggcaacctaaacctattttcccaagattggatagcgaagcggaaattgcatatatcaaagaatcaatgcaaccgcctgctactaaagaggaaaaagaagagattcctagcaaacctcaaattgatattaaagactttgataaagttgaaattaaggcagcaacgattattgatgctgaacatgttaagaagtcagataagcttttaaaaattcaagtagacttagattctgaacaaagacaaattgtatcaggaattgccaaattctatacaccagatgatattattggtaaaaaagtagcagttgttactaacctgaaaccagctaaattaatgggacaaaaatctgaaggtatgatattatctgctgaaaaagatggtgtattaaccttagtaagtttaccaagtgcaattccaaatggtgcagtgattaaataa

SEQ ID NO: 9024 - DNA, 639 bp, Staphylococcus aureus; identical to SEQ ID NO: 8825
  CDS (1)...(639)

SEQ ID NO: 9025 - DNA, 87 bp, Staphylococcus aureus; identical to SEQ ID NO: 8826
  CDS (1)...(87)

SEQ ID NO: 9026 - DNA, 792 bp, Staphylococcus aureus
  CDS (1)...(792)
atgacatcaaaacatcaacaaaaggggtctatcgtcaatcgtttcttgaatagtgttgaaaaaatcggaaataaattgccagatcctagcgtcttattctttttaatgtgtgtgggcttagccattatgacatgggttatctcattatttaatgtatctgttaagcatccaggtacgcatcaaaccatttatattaaaaatataattagccatgatggatttacgatgataatgaatgatacgattaaaaatttctcagagttcccagcattaggcttagtactagcagtgatgattggtattggtgttgcagagaaaacaggatacttcgataagttaatgatttctgttgtgaatcgcgcaccacgtttcttaattttaccgactattatattaattggtattttaggtagtacagccggcgatgctgcgacaattatcttgccgccgcttgcagcaatgctttttattaaaattggctatcaccctatcgctggactaacgatggcatatgcttccgctgttggaggatttgcagcaaatatagttgttggtatgcaagatgctttggtctattcatttacagaaccggcaacacgtatcgtttcagattctattaaaacaaacgttgctatgaactggtactttatcgcagcgagtgtcgttgtattacttcctacgatattgctagttacaactaagctcattattcctagattaggaaaatatgatgacagtttaatgcatgatgaccatgaagaaacatcttcacatattactgacaaagaagct

SEQ ID NO: 9027 - DNA, 1008 bp, Staphylococcus aureus; identical to SEQ ID NO: 8682
  CDS (1)...(1008)

SEQ ID NO: 9028 - DNA, 582 bp, Staphylococcus aureus
  CDS (1)...(582)
atggcaaatatgaaaaatagtaatgatcgtattattttatttagaaaagctggcgaaaaagtagatgctactaaaatgctttttttaactgaatacggcttatcacatgaagctgatacagatacagaggatacaatggacggttcttataacactggtggttctgttgagtcaacaatgtctggtactgctaaaatgttttatggtgacgattttgcagatgaaattgaagatgcagttgtagatcgcgtattgtatgaagcttgggaagttgaaagtagaataccaggcaaaaatggggattccgctaaatttaaagcgaaatatttccaaggtttccacaataaatttgaattaaaagcagaagctaacggtattgatgaatatgaatatgaatatggagtgaatggtcgtttccaacgtggatttgcaacactacctgaggctgtaacaaagaaacttaaggcgactggatacagattccacgacactacaaaagcagatgcattaactggcgaagatttaacagcaattccacaacctaaagtagattcaccaccggttgcaccaagagaggtataa

SEQ ID NO: 9029 - DNA, 1356 bp, Staphylococcus aureus
  CDS (1)...(1356)
atgaaaaaggttttaattgcaaaccgcggtgaaatcgcagttaggattattcgcgcttgtcgtgatttaggcatccaaactgttgcaatctattctgaaggggataaagatgcgctacatactcaaattgctgatgaagcatattgcgtaggtcccactttgtctaaagattcatatttaaatattccgaacatcttatctattgcaacttctacaggttgtgatggcgttcatccgggttatggctttttagctgaaaatgctgattttgcagaattatgcgaagcatgccaattgaagttcattggaccaagttatcaatctatccaaaaaatgggtatcaaagatgttgctaaggcagaaatgatcaaagccaatgttccagttgttcctggtagtgacggtttaatgaaagacgtctcagaagctaagaaaatcgccaaaaaaattggctatccggtcatcattaaagctactgctggcggtggcggaaaaggtatccgtgttgctcgtgatgaaaaagaacttgaaactggcttccgaatgacagaacaagaagctcaaactgcatttggtaatggtggactttatatggagaaattcatcgaaaacttccgccatattgaaatccaaattgttggggacagctatggtaatgtaattcatttaggagaacgtgattgtacaattcaaagacgtatgcagaaattagtggaagaagcaccttccccaattttagatgatgaaacacgtcgtgaaatgggaaatgccgcagttcgtgcagcgaaagctgtaaattatgaaaatgcgggaacaattgagtttatatatgatttaaatgataataaattttattttatggaaatgaatacacgtattcaagtagaacatcctgtaactgaaatggtaacaggaattgatttagttaaattacaattacaagttgctatgggtgacgtgttaccgtataaacaagaagatattaaattaacaggacacgcaattgaatttagaattaatgctgaaaatccttacaagaactttatgccatcaccaggtaaaattgagcaatatcttgcaccaggtggatatggtgttcgaatagagtcagcatgttatactaattatacgataccgccatattatgattcgatggtagcgaaattaatcatacatgaaccgacacgagatgaagcgattatggctggcattcgtgcactaagtgaatttgtggttcttggtattgatacaactattccattccatattaaattattgaataacgatatatttagaagcggtaaatttaatacaaactttttagagcaaaatagcattatgaatgatgaaggttaa

SEQ ID NO: 9030 - DNA, 1305 bp, Staphylococcus aureus
  CDS (1)...(1305)
atgccaattattacagatgtttacgctcgcgaagtcttagactctcgtggtaacccaactgttgaagtagaagtattaactgaaagtggcgcatttggtcgtgcattagtaccatcaggtgcttcaactggtgaacacgaagctgttgaattacgtgatggagacaaatcacgttatttaggtaaaggtgttactaaagcagttgaaaacgttaatgaaatcatcgcaccagaaattattgaaggtgaattttcagtattagatcaagtatctattgataaaatgatgatcgcattagacggtactccaaacaaaggtaaattaggtgcaaatgctattttaggtgtatctatcgcagtagcacgtgcagcagctgacttattaggtcaaccactttacaaatatttaggtggatttaatggtaagcagttaccagtaccaatgatgaacatcgttaatggtggttctcactcagatgctccaatttcattccaagaattcatgattttacctgtaggtgctacaacgttcaaagaatcattacgttggggtactgaaattttccacaacttaaaatcaattttaagcaaacgtggtttagaaactgcagtaggtgacgaaggtggtttcgctcctaaatttgaaggtactgaagatgctgttgaaacaattatccaagcaatcgaagcagctggttacaaaccaggtgaagaagtattcttaggatttgactgtgcatcatcagaattctatgaaaatggtgtatatgactacagtaagttcgaaggcgaacacggtgcaaaacgtacagctgcagaacaagttgactacttagaacaattagtagacaaatatcctatcattacaattgaagacggtatggacgaaaacgactgggatggttggaaacaacttacagaacgtatcggtgaccgtgtacaattagtaggtgacgatttattcgtaacaaacactgaaattttagcaaaaggtattgaaaacggaattggtaactcaatcttaattaaagttaaccaaatcggtacattaactgaaacatttgatgcaatcgaaatggctcaaaaagctggttacacagcagtagtttctcaccgttcaggtgaaacagaagatacaacaattgctgatattgctgttgctacaaacgctggtcaaattaaaactggttcattatcacgtactgaccgtattgctaaatacaatcaattattacgtatcgaagatgaattatttgaaactgctaaatatgacggtatcaaatcattctataacttagataaataa

SEQ ID NO: 9031 - DNA, 1269 bp, Staphylococcus aureus; identical to SEQ ID NO: 8861
  CDS (1)...(1269)

SEQ ID NO: 9032 - DNA, 315 bp, Staphylococcus aureus; identical to SEQ ID NO: 3799
  CDS (1)...(315)

SEQ ID NO: 9033 - DNA, 936 bp, Staphylococcus aureus; identical to SEQ ID NO: 8698
  CDS (1)...(936)

SEQ ID NO: 9034 - DNA, 909 bp, Staphylococcus aureus; identical to SEQ ID NO: 8780
  CDS (1)...(909)

SEQ ID NO: 9035 - DNA, 408 bp, Staphylococcus aureus
  CDS (1)...(408)
gtgaccccattaacagttgaaaaagttggcgagggtcaaccatcagaagggttcacaaaccaaccagtatataagattgtagagttcggtgcacaggaaccaaaagatccaaaaggacctgaaaacccagagaagccgagcagaccaactcatccaattggcccagtaaatcctaacaatccaggattatcgaaagtcagagcaaaaccaaatggcccagttcattcaatggataaaaatgataaagttaaaaaatctaaaattgctaaagaatcagtagctaatcaagagaaaaaacgagcagaattaccaaaaacaggtttagaaagcacgcaaaaaggtttgatctttagtagtataattggaattgctggattaatgttattggctcgtagaagaaagaattaa

SEQ ID NO: 9036 - DNA, 729 bp, Staphylococcus aureus; identical to SEQ ID NO: 8720
  CDS (1)...(729)

SEQ ID NO: 9037 - DNA, 522 bp, Staphylococcus aureus; identical to SEQ ID NO: 8288
  CDS (1)...(522)

SEQ ID NO: 9038 - DNA, 2403 bp, Staphylococcus aureus
  CDS (1)...(2403)
gtgagtgaaataattcaagatttatcacttgaagatgttttaggtgatcgctttggaagatatagtaaatatattattcaagagcgtgcattgccagatgttcgtgatggtttaaaaccagtacaacgtcgtattttatatgcaatgtattcaagtggtaatacacacgataaaaatttccgtaaaagtgcgaaaacagtcggtgatgttattggtcaatatcatccacatggagactcctcagtgtacgaagcaatggtccgtttaagtcaagactggaagttacgacatgtcttaatagaaatgcatggtaataatggtagtatcgataatgatccgccagcggcaatgcgttacactgaagctaagttaagcttactagctgaagagttattacgtgatattaataaagagacagtttctttcattccaaactatgatgatacgacactcgaaccaatggtattgccatcaagatttcctaacttactagtgaatggttctacaggtatatctgcaggttacgcgacagatataccaccacataatttagctgaagtgattcaagcaacacttaaatatattgataatccggatattacagtcaatcaattaatgaaatatattaaaggtcctgattttccaactggtggtattattcaaggtattgatggtattaaaaaagcttatgaatcaggtaaaggtagaattatagttcgttctaaagttgaagaagaaactttacgcaatggacgtaaacagttaattattactgaaattccatatgaagtgaacaaaagtagcttagtaaaacgtatcgatgaattacgtgctgacaaaaaagtcgatggtatcgttgaagtacgtgatgaaactgatagaactggtttacgaatagcaattgaattgaaaaaagatgtgaacagtgaatcaatcaaaaattatctttataaaaactctgatttacagatttcatataatttcaacatggtcgctattagtgatggtcgtccaaaattgatgggtattcgtcaaattatagatagttatttgaatcaccaaattgaggttgttgcaaatagaacgaagtttgaattagataatgcagaaaaacgtatgcatatcgttgaaggtttgattaaagcgttgtcaattttagataaagtaatcgaattgattcgtagctctaaaaacaagcgtgacgctaaagaaaaccttatcgaagtatacgagttcacagaagaacaggctgaagcaattgtaatgttacagttatatcgtttaacaaatactgacatagttgcgcttgaaggtgaacataaagaacttgaagcattaatcaaacaattacgtcatattcttgataaccatgatgcattattgaatgtcataaaagaagaattgaatgaaattaaaaagaaattcaaatctgaacgactgtctttaattgaagcagaaattgaagaaattaaaattgacaaagaagttatggtgcctagtgaagaagttattttaagtatgacacgtcatggatatattaaacgtacttctattcgtagctttaatgctagcggtgttgaagatattggtttaaaagatggtgacagtttacttaaacatcaagaagtaaatacgcaagataccgtactagtatttacaaataaaggtcgttatctatttataccggttcataaattagcagatattcgttggaaagaattgggacaacatgtatcacaaatagttcctatcgaagaagatgaagtggttattaatgtctttaatgaaaaggactttaatacagatgcattttatgtttttgcgactcaaaatggcatgattaagaaaagtacagtgcctctatttaaaacaacgcgttttaataaacctttaattgctactaaagttaaagaaaatgatgatttgattagtgttatgcgctttgaaaaagatcaattaattaccgtcattactaataaaggtatgtcattaacgtataatacaagtgaactatcagataccggattaagggcagctggtgttaaatcaataaatcttaaagctgaagatttcgttgttatgacagaaggtgtttctgaaaatgatactatattgatggccacacaacgcggctcgttaaaacgtattagttttaaaatcttacaagttgctaaaagagcacaacgtggaataactttattaaaagaattaaagaaaaatccacatcgtattgtagctgcacatgtagtgacaggtgaacatagtcaatatacattatattcaaaatcaaatgaagaacatggtttaattaatgatattcataaatctgaacaatatacaaatggctcattcattgtagatacagatgattttggtgaagtaatagacatgtatattagctaa

SEQ ID NO: 9039 - DNA, 4050 bp, Staphylococcus aureus
  CDS (1)...(4050)
atgctaaacagagaaaataaaacggcaataacaaggaaaggcatggtatccaatcgattaaataaattttcgattagaaagtacacagtgggaacagcatcaattttagtaggtacaacattaatttttggtctggggaaccaagaagcaaaggctgcagaaagtactaataaagaattgaacgaagcgacaacttcagcaagtgataatcaatcgagtgataaagttgatatgcagcaactaaatcaagaagacaatactaaaaatgataatcaaaaagaaatggtatcatctcaaggtaatgaaacgacttcaaatgggaataaattaatagaaaaagaaagtgtacaatctaccactggaaataaagttgaagtttcaactgccaaatcagatgagcaagcttcaccaaaatctacgaatgaagatttaaacactaaacaaactataagtaatcaagaagcgttacaacctgatttgcaagagaataaatcagtggtaaatgttcaaccaactaatgaggaaaacaaaaaggtagatgccaaaactgaatcaactacattaaatgttaaaagtgatgctatcaagagtaatgatgaaactcttgttgataacaatagtaattcaaataatgaaaataatgcagatatcattttgccaaaaagtacagcacctaaacgtttgaatacaagaatgcgtatagcagcagtacagccatcatcaacagaggctaaaaatgttaatgatttaatcacatcaaatacaacattaactgtcgttgatgcagataaaaacaataaaatcgtaccagcccaagattatttatcattaaaatcacaaattacagttgatgacaaagttaaatcaggtgattatttcacaattaaatactcagatacagtacaagtatatggattgaatccggaagatattaaaaatattggtgatattaaagatccaaataatggtgaaacaattgcgactgcaaaacatgatactgcaaataatttaattacatatacatttacagattatgttgatcgatttaattctgtacaaatgggaattaattattcaatttatatggatgctgatacaattcctgttagtaaaaacgatgttgagtttaatgttacgataggtaatactacaacaaaaacaactgctaacattcaatatccagattatgttgtaaatgagaaaaattcaattggatcagcgttcactgaaacagtttcacatgttggaaataaagaaaatccagggtactataaacaaacgatttatgtaaatccatcggaaaattctttaacaaatgccaaactaaaagttcaagcttaccactcaagttatcctaataatatcgggcaaataaataaagatgtaacagatataaaaatatatcaagttcctaaaggttatacattaaataaaggatacgatgtgaatactaaagagcttacagatgtaacaaatcaatacttgcagaaaattacatatggcgacaacaatagcgctgttattgattttggaaatgcagattctgcttatgttgtaatggttaatacaaaattccaatatacaaatagcgaaagcccaacacttgttcaaatggctactttatcttcaacaggtaataaatccgtttctactggcaatgctttaggatttactaataaccaaagtggcggagctggtcaagaagtatataaaattggtaactacgtatgggaagatactaataaaaacggtgttcaagaattaggagaaaaaggcgttggcaatgtaactgtaactgtatttgataataatacaaatacaaaagtaggagaagcagttactaaagaagatgggtcatacttgattccaaacttacctaatggagattaccgtgtagaattttcaaacttaccaaaaggttatgaagtaaccccttcaaaacaaggtaataacgaagaattagattcaaacggcttatcttcagttattacagttaatggcaaagataacttatctgcagacttaggtatttacaaacctaaatacaacttatgtgactatgtctgggaagatacaaataaaaatggtatccaagaccaagatgaaaaaggtatatctggcgtaacggtaacattaaaagatgaaaacggtgacgtgttaaaaacagttacaacagacgctgatggcaaatataaatttactgatttacataatggtaattataaagttgaatttactacaccagaaggctatacaccgactacagtaacatctggtagcgacattgaaaaagactctaatggtttaacaacaacaggtgttattaatggtgctgataacatgacattagatagtggattctacaaaacaccaaaatataatttaggtaattatgtatgggaagatacaaataaagatggtaagcaggattcaactgaaaaaggtatttcaggcgtaacagttacattgaaaaatgaaaacggtgaagttttacaaacaactaaaacagataaagatggtaaatatcaatttactggattagaaaatggaacttataaagttgaattcgaaacaccatcaggttacacaccaacacaagtaggttcaggaactgatgaaggtatagattcaaatggtacatcaacaacaggtgtcattaaagataaagataacgatactattgactctggtttctacaaaccgacttacaacttaggtgactatgtatgggaagatacaaataaaaacggtgttcaagataaagatgaaaagggcatttcaggtgtaacagttacgttaaaagatgaaaacgacaaagttttaaaaacagttacaacagatgaaaatggtaaatatcaattcactgatttaaacaatggaacttataaagttgaattcgagacaccatcaggttatacaccaacttcagtaacttctggaaatgatactgaaaaagattctaatggtttaacaacaacaggtgtcattaaagatgcagataacatgacattagacagtggtttctataaaacaccaaaatatagtttaggtgattatgtttggtacgacagtaataaagacggcaaacaagattcaactgaaaaaggtatcaaagatgttaaagttactttattaaatgaaaaaggcgaagtaattggaacaactaaaacagatgaaaatggtaaatactgctttgataatttagatagcggtaaatacaaagttatttttgaaaagcctgctggcttaacacaaacagttacaaatacaactgaagatgataaagatgcagatggtggcgaagttgacgtaacaattacggatcatgatgatttcacacttgataacggatacttcgaagaagatacatcagacagcgattcagactcagatagtgactcagacagcgactcagactcagacagcgactcagactcagacagtgattcagattcagacagcgactcagattcagatagcgactcagattcggacagcgattcagactcagatagcgactcagattcagatagcgattcagactcagacagcgactcagattcagatagcgattcggactcagacagcgattcagactcagatagcgactcagactcagacagcgactcagattcagatagcgattcggactcagatagcgactcagattcagacagcgattcagactcagatagcgactcagattcagacagcgattcagactcagatagcgactcagactcagacagtgattcagattcagacagcgactcagactcagatagcgactcagattcggacagcgactcagactctgatagcgactcagactcagacagtgattcagacagcgattcagactcggatgctggaaaacgtacacctgttaaaccaatgagtactactaaagaccatcacaataaagcaaaagcattaccagaaacaggtagtgaaaataacggctcaaataacgcaacgttatttggtggattatttgcagcattaggttcattattgttattcggtcgtcgcaaaaaacaaaacaaataa

SEQ ID NO: 9040 - DNA, 1023 bp, Staphylococcus aureus
  CDS (1)...(1023)
gtgaggtgcaacatgatgacgcataatattcatgataatatcagccaatggatgaaaagtaatgaagaaacaccaattgttatgtcttctagaattcggttagcgcgtaatttagaaaatcatgtgcatccactaatgtatgctactgaaaatgatggatttagagttataaatgaggtacaagatgccttgccaaactttgaattaatgcgtcttgatcaaatggatcaacaaagtaaaatgaaaatggttgcaaagcatttgattagtcctgaactaataaaacaaccagcagccgcagtattagtgaatgacgatgaatctttaagtgtcatgataaatgaagaggaccatattcgtattcaagctatgggaactgacacgacattacaggctttatataatcaagcttcatcaattgatgatgaattagatcgaagccttgatataagttatgatgaacaacttggttatttaactacatgtcctaccaatataggtactggtatgagagcaagcgtgatgctacatttgccaggtctatctattatgaaaagaatgacacggattgctcaaaccattaatcgttttggatatacaatcagaggtatttacggtgaaggttcgcaagtttatggacatacttatcaagtatccaaccaacttacacttggtaaatctgagttagaaatcatagaaacattaacagaagttgttaatcaaatcattcatgaagaaaaacaaatacgacaaaagttagacacttataatcaattagaaacacaagaccgtgtttttcgctcgctaggtattttacaaaactgtagaatgataactatggaagaggcttcttatagattaagcgaagttaaacttggtatagatttaaattacattgaattacaaaactttaaatttaatgaattgatggtagctatacagtcaccatttttattagatgaagaagatgacaaatctgtaaaagaaaaacgagcagatatactaagagaacatataaagtag

SEQ ID NO: 9041 - DNA, 567 bp, Staphylococcus aureus
  CDS (1)...(567)
gtgctttgtgaaaattgtcaacttaatgaagcggaattaaaagttaaagttacaagtaaaaataaaacagaagaaaaaatggtgtgtcaaacttgtgctgaggggcaccatccgtggaatcaagctaatgaacaacctgaatatcaagaacatcaagataatttcgaagaagcatttgttgttaagcaaattttacaacatttagctacgaaacatggaattaattttcaagaagtagcgtttaaagaagaaaaacgttgcccatcatgtcatatgactttgaaagatattgcacatgttggtaaatttgggtgtgctaattgttatgcaacatttaaagatgacatcattgatatcgtccgcagagttcaaggtggacaatttgagcacgttggaaagacaccacattcttcacataaaaagatagctttaaagcgaaaaatcgaagaaaagaatgaatatttgaaaaaacttattgaaatccaagattttgaggaagcagccattgttagagatgaaattaaagcactaaaagctgagagtgaggtgcaacatgatgacgcataa

SEQ ID NO: 9042 - DNA, 2301 bp, Staphylococcus aureus; identical to SEQ ID NO: 4844
  CDS (1)...(2301)

SEQ ID NO: 9043 - DNA, 474 bp, Staphylococcus aureus; identical to SEQ ID NO: 4800
  CDS (1)...(474)

SEQ ID NO: 9044 - DNA, 570 bp, Staphylococcus aureus; identical to SEQ ID NO: 8654
  CDS (1)...(570)

SEQ ID NO: 9045 - DNA, 816 bp, Staphylococcus aureus; identical to SEQ ID NO: 8776
  CDS (1)...(816)

SEQ ID NO: 9046 - DNA, 798 bp, Staphylococcus aureus; identical to SEQ ID NO: 8772
  CDS (1)...(798)

SEQ ID NO: 9047 - DNA, 567 bp, Staphylococcus aureus; identical to SEQ ID NO: 8651
  CDS (1)...(567)

SEQ ID NO: 9048 - DNA, 996 bp, Staphylococcus aureus; identical to SEQ ID NO: 4857
  CDS (1)...(996)

SEQ ID NO: 9049 - DNA, 267 bp, Staphylococcus aureus; identical to SEQ ID NO: 8834
  CDS (1)...(267)

SEQ ID NO: 9050 - DNA, 2763 bp, Staphylococcus aureus; identical to SEQ ID NO: 8897
  CDS (1)...(2763)

SEQ ID NO: 9051 - DNA, 360 bp, Staphylococcus aureus; identical to SEQ ID NO: 8884
  CDS (1)...(360)

SEQ ID NO: 9052 - DNA, 1032 bp, Staphylococcus aureus; identical to SEQ ID NO: 8883
  CDS (1)...(1032)

SEQ ID NO: 9053 - DNA, 399 bp, Staphylococcus aureus; identical to SEQ ID NO: 8205
  CDS (1)...(399)

SEQ ID NO: 9054 - DNA, 792 bp, Staphylococcus aureus; identical to SEQ ID NO: 8920
  CDS (1)...(792)

SEQ ID NO: 9055 - DNA, 915 bp, Staphylococcus aureus; identical to SEQ ID NO: 8919
  CDS (1)...(915)

SEQ ID NO: 9056 - DNA, 444 bp, Staphylococcus aureus; identical to SEQ ID NO: 8870
  CDS (1)...(444)

SEQ ID NO: 9057 - DNA, 396 bp, Staphylococcus aureus
  CDS (1)...(396)
atgagctggtttgataaattattcggcgaagataatgattcaaatgatgacttgattcatagaaagaaaaaaagacgtcaagaatcacaaaatatagataacgatcatgactcattactgcctcaaaataatgatatttatagtcgtccgaggggaaaattccgttttcctatgagcgtagcttatgaaaatgaaaatgttgaacaatctgcagatactatttcagatgaaaaagaacaataccatcgagactatcgcaaacaaagccacgattctcgttcacaaaaacgacatcgccgtagaagaaatcaaacaactgaagaacaaaattatagtgaacaacgtgggaattctaaaatatcacagcaaagtatgggaaccgagctcaaacgtcat

SEQ ID NO: 9058 - DNA, 681 bp, Staphylococcus aureus
  CDS (1)...(681)
atgaaatttaaagcgatagcaaaagcaagtttagcattgggaatgttagcaacaggtgtaattacatcgaatgtacaatcagtacaagcgaaagcagaagttaaacaacaaagtgaatcagagttaaaacactattataataaaccaattttagagcgtaaaaatgtgactggatttaaatatactgatgagggtaaacactatttagaagtcacagtagggcaacagcattctcgaatcactttacttggatctgataaagataaatttaaagacggagaaaactcaaatatagatgtgtttatccttagagaaggtgacagtagacaagcaacaaattactcaattggtggcgttacaaaatcaaatagtgtgcagtatattgattatatcaatacgccaattttagaaatcaagaaagataatgaagatgtacttaaagatttttactacatttcaaaagaagacatctcattaaaagaacttgattatagattaagagaacgtgcgattaaacaacacggcttgtattcaaatggtcttaaacaaggtcaaattacaattacaatgaatgatggcacaacacatacaatcgatttaagtcaaaaacttgaaaaagaacgtatgggtgagtcaatcgacggcactaagattaataaaattctagtagaaatgaaataa

SEQ ID NO: 9059 - DNA, 984 bp, Staphylococcus aureus
  CDS (1)...(984)
atgaaaatgaaaaaattagtcaaatcatcagttgcttcatcaattgcactgcttttgctatcgaatacagttgatgcagctcaacatatcacacctgtaagcgagaaaaaagtagatgacaaaatcactttatacaaaacaacagcaacatctgataatgataaattgaatatttctcaaattttaacgtttaatttcattaaggataaaagttatgacaaagatacgttagtacttaaggcagccggaaacattaattcaggttataaaaagcctaatccaaaagattacaattactcacagttttattggggcggtaagtataatgtttcggttagttcagaatcaaatgatgctgtaaatgttgttgactatgcacctaaaaatcaaaatgaagaattccaagttcaacaaacattaggttattcttatggcggagatattaatatatctaatggcttatcaggtggattaaatggatcaaaatcattttcagaaacgataaattataaacaagaaagttacagaactacgattgatagaaaaacaaatcataaatcaattggctggggtgttgaggcgcacaaaattatgaataatggttggggaccatatggtagagatagttatgacccaacatatggtaatgaactgtttttaggtggtagacaaagtagttcaaatgctggtcaaaatttcttgccaacacatcaaatgcctttattggcgcgtggtaactttaacccagaatttataagcgtactttctcataaacaaaatgatacaaaaaaatctaaaatcaaagtaacttaccaaagagaaatggatagatatactaatcaatggaatcgactacactgggttggaaataactacaaaaatcaaaatacagtaacgtttacatctacttatgaagttgactggcaaaaccatactgttaaattaatcggtacggattctaaagaaactaatcctggagtataa

SEQ ID NO: 9060 - DNA, 3009 bp, Staphylococcus aureus; identical to SEQ ID NO: 8801
  CDS (1)...(3009)

SEQ ID NO: 9061 - DNA, 558 bp, Staphylococcus aureus; identical to SEQ ID NO: 8877
  CDS (1)...(558)

SEQ ID NO: 9062 - DNA, 276 bp, Staphylococcus aureus; identical to SEQ ID NO: 4859
  CDS (1)...(276)

SEQ ID NO: 9063 - DNA, 255 bp, Staphylococcus aureus; identical to SEQ ID NO: 4860
  CDS (1)...(255)

SEQ ID NO: 9064 - DNA, 1473 bp, Staphylococcus aureus
  CDS (1)...(1473)
gtgaatcaggatcaggaaaaagtattaccgactgcatctattttagggttaataccagattatccagatcacacattaacaggagaaattatttttaatgggcaatcgttaaataatttatcaacttcagcgttacaacaaattcgaggtaaggatatttcaatgatttttcaagatccactctcttcgttgaatccaagattaacgattggcaaacaaattacagaagtaatatttcaacataaacgtgtatctaaatctgaagcaaagtcgatgacaatagacattttagaaaaagtaggtataaaacatgcaactcgacaatttgatgcttatccacatgaactttctggtggtatgcgtcaacgtgtcatgatagcaatggcattgattttaaagccacaaattttaatcgcagatgaaccaacaacggcattagatgccagtacacaaaatcaattactgcagttaatgaagtccctttatgagtacacagaaacatctattatttttatcactcacgatttaggcgctgtgtatcaattttgcgacgatgtgattgtaatgaaagatggaagtgtcgttgaaagtggcacggttgaaagtatttttaaatcgccacaacatacctatacaaaacgcttaatagatgcgattcctgatattcatcaaacgcgtccgccaagaccgttaaacaatgatattttattaaaattcgatcgcgtgagcgtggattacacatcaccgagtggcagcctataccgagcagttaatgatattaacttggctattagaaaaggcgaaacattaggcattgtcggtgaatcagggtcagggaaatcgacattagctaagacggtcgtcggtctaaaggaagtgtcagaaggctttatttggtataacgaattaccattaagtttatttaaagatgatgaattgaaatctttacgacaagagatacaaatgatttttcaagatccattcgcatctattaatccaagatttaaagtcattgatgtgattaaacgaccactaatcattcatgggaaagtcaaagataatgatgacattattaaaactgtcgtatcgttgttagaaaaggttggcctagatcaaactttcttatatcgctatccacacgaattatctggtgggcaacgtcagcgtgtaagtatcgcgagagcacttgctgttgaacctaaagtgattgtttgcgacgaggcagtgtccgctttagacgtttcaattcaaaaagatatcatcgagttattaaaacaattacagttagacttcggcatcacttatttattcatcacacatgacatgggtgttatcaatgaaatatgtgatcgcgttgcagttatgaaaaatggcgaaatcgttgaactgaataacacagaagatattatcaaacatccgcagtcagactatgcaaagcaacttatttcagaagtagcagttattgctaaataa

SEQ ID NO: 9065 - DNA, 318 bp, Staphylococcus aureus; identical to SEQ ID NO: 8707
  CDS (1)...(318)

SEQ ID NO: 9066 - DNA, 597 bp, Staphylococcus aureus; identical to SEQ ID NO: 8708
  CDS (1)...(597)

SEQ ID NO: 9067 - DNA, 591 bp, Streptococcus pneumoniae
  CDS (1)...(591)
atgagtaaaatgtattatgcagaaaatcctgacgctgctcacgacattcatgagttgagagtagagttgttgggacaaaaaatgacctttttaacggatgcgggtgtttttagcaagaaaatagttgactttggaagtcaactattgctcaagtgtcttgaggtcaaccaaggagaaactgtccttgatgtaggctgtggttacggacctttgggtttgtccttagctaaggcttatggagttcaggctactatggttgatatcaacactcgtgccttagatttagctcggagaaatgctgaaaaaaataatgcaaaagcgacgattttccagtccaacatctatgaacaagttgaaggacattttgatcatgtcatttccaatcctcctatccgtgcgggcaagcaagtcgttcatgaaatcattgagaaaagtaaagatttcttggaaactagtggggatttgacaatcgtcatccagaaaaaacaaggggctccaagtgctaagtccaagatggaggatgtgtttggtaattgtgaaatccttaaaaaagacaagggatactatatccttagaagtgtgaaagaatga

SEQ ID NO: 9068 - DNA, 1278 bp, Streptococcus pneumoniae
  CDS (1)...(1278)
atgagagcagttgatttaatacaaaaaaaacgagacggtcaagaactgacttcaagtgaaattgaatggctggtagaaggctatgtgtcaggaactgttcctgattatcagatgtctgcctttgctatggctgtttattttaaaggaatgacgactcgagaaatctctgatttaacgatgaatatggttaagactgggcaagagtttgacctgtcagccattgatggtgtgaaagttaccaagcattctactggtggtgtcggcgataaggtaaccttgattttagttcctcttgttgctagcttcggtgtgcctgtagcaaaaatgagtggtcgtggtcttggccatacaggcggaacaattgataaattggagtccattaagggctatcaagtagaacgtagtcaagaggattttattcgtcaggttcaggatattggagtatctgtcattgggcaatcagaccagctggtcaaagcagataagcttctctatgcccttcgtgatgtgaccgcaactgtcgacacgattcctttgattgcgagttcggtgatgagcaagaaaattgcggcaggggcggatgctattttgctagacgtgactgtcggtgagggtgccttcatgaagacggttgatgaggcgcgtgagttggctcaaactatggtagatcttggtaaggttgttggacggaagacagtagcagtgattacggatatgagccagcctttgggacgagcgattggaaatcgtctggaaatccttgaagcattggagattttgcaaggtcaaggacgtcaggatattacccactttatttgtgaattggctcaaattatgcttggtttggcaaatgttaacaaaactgttgaagaagttcgccaacatcttgagaatggtcaagcactggctaagtttgaggaaatggtgcaagcccaaggtggagacttggaagacctctatcgtcctgtaaatgtagctcatgtggtggaaatccctgctcaggaaacgggtgtcatttcagctcttccagctatggactttggtctttatgccatgaggctgggtgctggtcgtgcagttaagtctgatgccttggactatgaaacaggaattgtttttgaaaagaagattgaagactccgttcaaaagggtgaaattgttgcaaaagtatacacaaatgaaaaaattccacctcaactagttacagatttccaaaaatgtgttaaaataagtgatgaagtaaaaaaaatccgtgaaattgtagaaatcatctcctaa

SEQ ID NO: 9069 - DNA, 1536 bp, Streptococcus pneumoniae
  CDS (1)...(1536)
atggcacacgaaaatgtcattgagatgcgtgatattaccaaggtgtttggtggatttgttgccaacgacaaaatcaacttgcacctacgaaaaggtgaaattcatgcacttttaggagaaaatggggctggtaagtccacgctaatgaacatgttagcaggccttcttgaaccaactagtggtgaaatcgcggtcaacggtcaagttgtcaatctcgactccccatctaaagcagctagcttgggaatcgggatggttcaccagcactttatgttggttgaagccttcacagtggctgaaaacatcattttaggtagtgaattgactaaaaatggtgtgctagatatcgctggagctagcaaagaaatcaaggctctttctgaacgttatggcttagctgttgacccttctgccaaggtagcagatatctcagttggagcccaacaacgtgtagaaattttaaaaacactttatcggggggctgatatccttatctttgacgaaccaacggctgttttgactccatcagaaattgatgagttgatggctattatgaaaaatcttgtcaaagaaggaaaatcaattatcttgattacccacaaattggatgaaattcgcgcagtttctgaccgtgttacagttatccgtcgtgggaaatcaattgaaaccgttgaaattgcaggggctaccaatgctgatttggcggaaatgatggtaggacgttctgtttcctttaaaacagagaagcaagcctctaaaccaaaagaagtggttttgtctatcaaagatttggtggtcaatgaaaaccgtggtgttccagctgttaaaaatctgtccttggatgttcgtgctggagagattgttggtattgcggggattgatggaaatggtcagtctgaactgattcaagccattacaggtcttcgtaaggttgaatctggtagcattgagctaaaaggagattcaattgtaggcttgcacccacgtcagattacagaactaagtgttgggcacgttccagaagaccgtcaccgtgatggcttgattttggaaatgatgatatctgaaaatattgcccttcaaacctactataaagaaccacatagtaaaaatggaattttgaattattcaaatattacttcttatgctaaaaagctgatggaagagtttgatgttcgcgctgccagtgaattagttcctgcagctgcactctcaggaggaaatcaacaaaaagcaattattgctcgtgaaattgatcgagatcctgatctccttatcgttagccagccaactcgtgggttggatgtcggtgccattgagtatatccacaaacgcttgattgaagagcgtgataatggcaaggctgtccttgttgtcagctttgaattggatgagattttaaacgtctcagaccgtattgccgttatccacgatggtaagattcaaggtattgtatcaccagaaacaaccaataaacaaggacttggtgtcttgatggctggtggaaacttgggaaaggagaagagtgatgtctaa

SEQ ID NO: 9070 - DNA, 552 bp, Streptococcus pneumoniae
  CDS (1)...(552)
atgaaaggaaatatcatggatagttttgataaaggatggtttgttttacaaacttattctggttatgaaaataaggtgaaagaaaatctattacaacgtgcacaaacctacaatatgttggataatattctacgcgttgaaattccaacacaaacagtgcaagttgaaaaaaatggaaagagaaaagaagtagaagaaaatcgctttccaggttatgttcttgtagaaatggtcatgacagatgaagcttggtttgttgttcgaaacacaccaaatgttacaggatttgtcggatcacacgggaacagatcaaaaccaactccattattggaacaagaaattcgtgacattttggtatctatgggacaaactgttcaagaatttgatttcgatgttgagattggtcaaactgtacgtattattgatggtgcttttgcagactacactggtaagattacagaaattgataataacaaagtgaaaatgattatctctatgtttggtaatgacacagttgcagaagtaaacctaaaccaaatcgcagaattataa

SEQ ID NO: 9071 - DNA, 1080 bp, Streptococcus pneumoniae
  CDS (1)...(1080)
gtgatttgtagtgattcaagttactcttttcacaataaaaatttcatgattttcataaggaggaaatcactaatggtagttaaagttggtattaacggtttcggacgtatcggtcgtcttgctttccgtcgtatccaaaacgtagaaggtgttgaagttacacgcatcaacgaccttacagatccagttatgcttgcacacttgttgaaatacgacacaactcaaggtcgtttcgacggtactgttgaagttaaagaaggtggatttgaagttaacggtaaattcatcaaagtttctgctgaacgtgatccagaacaaatcgactgggctactgacggtgtagaaatcgttcttgaagctactggtttctttgctaagaaagaagcagctgaaaaacaccttaaaggtggagctaaaaaagttgttatcactgctcctggtggaaacgacgttaaaacagttgtattcaacactaaccacgacgttcttgacggtactgaaacagttatctcaggtgcttcatgtactacaaactgcttggctccaatggctaaagctcttcaagacaactttggtgttgttgaaggattgatgactactatccacgcttacactggtgaccaaatgatccttgacggaccacaccgtggtggtgaccttcgccgtgctcgcgctggtgctgcaaacatcgttcctaactcaactggtgctgcaaaagctatcggtcttgtaatcccagaattgaatggtaaacttgatggatctgcacaacgcgttccaactccaactggatcagttactgaattggtagcagttcttgaaaagaacgttactgttgatgaagtgaacgcagctatgaaagcagcttcaaacgaatcatacggttacacagaagatccaatcgtatcttcagatatcgtaggtatgtcttacggttcattgtttgacgcaactcaaactaaagttcttgacgttgacggtaaacaattggttaaagttgtatcatggtacgacaacgaaatgtcatacactgcacaacttgttcgtactcttgaatacttcgcaaagattgctaaataa

SEQ ID NO: 9072 - DNA, 1719 bp, Streptococcus pneumoniae
  CDS (1)...(1719)
atgtcttaccaagaaaattaccagaaatgggttgattttgtggagcttcctgactaccttcgtcaagatttggaaaatatggacgaaaaaactaaggaagatgccttctatacaaatcttgaatttggtactgcaggtatgcgtggcttggttggtgctggtacaaaccgtatcaacatctacgttgttcgccaagctactgaaggattggctcgtttgattgagtcaaaaggtggaaacgagaaagaacgcggtgtagcaattgcctacgatagccgtcacttctcacctgagtttgcctttgaatctgcggcagttcttgctaaacacggcatcaaatcttacgtatttgaaagccttcgtccgactccagaactatcatttgcagttcgtcatctcaactgtttcgcaggtatcatggtcacagccagccacaaccctgctccatttaacggttacaaggtttacggtgaagacggtggacaaatgcctccacacgatgcggacgctttgactacttatatccgtgcaatcgaaaacccatttgcagttgaagttgctgatgtggaaactgaaaaagcttctggcttgattgaagttatcggcgaagctgttgacatagaataccttaaagaggttaaggacataaacatcaacccagccttgattgaagaatttggtaaagacatgaagattgtctacacaccacttcatggtactggtgaaatgttggctcgtcgtgctcttgcccaagcaggatttgactctgttcaagttgttgaagcgcaagcaactgctgacccagacttttcaactgtaacatctccaaacccagaaagccaagcagcctttgcccttgctgaagaacttggtcgtcaagttggtgcagatgttcttgtcgcaactgacccagacgctgaccgtgttggtgttgaagttcttcaaaaagatggtagctacctcaacctttcaggtaaccaaatcggtgctatcatggctaaatacatcttggaagctcacaaaaacgctggaactcttcctgaaaatgccgctctctgcaaatctatcgtttcaactgacttggtaacgaagattgctgaaagctacggcgcaactatgttcaacgtcttgacaggtttcaaatttatcgctgaaaaaatccaagaattcgaagaaaaacacaaccacacttacatgatgggatttgaagaaagcttcggttacttgattaaaccatttgtacgtgataaagatgccatccaagccgttcttgtagttgctgaacttgctgcctactaccgttctcgtggtttgacacttgctgacggtatcgaagaaatctataaagaatatggctactacgcagaaaaaacaatctctgttactctttcaggtgtcgatggtgctgaacaaatcaaagcgattatggctaaattccgcaacaatgctccaacagaatggaacgcaacagctatcactgtcgtagaagacttcaaggcacaaactgctactgttgctgacggtactgttacaaacttgacaactcctccaagtgatgtgttgaaatacacacttgctgacggttcatggattgccgttcgcccttcaggtacagaaccaaaaatcaagttctacattgcagttgtaggggaaaccaacgaagaatcacaagctaagattgctaacatcgaagcagaaatcaatgcatttgtaaaataa

SEQ ID NO: 9073 - DNA, 1197 bp, Streptococcus pneumoniae
  CDS (1)...(1197)
atggcaaaagaaaaatacgatcgtagtaaaccacacgttaacattggtactatcggacacgttgaccacggtaaaactaccctaactgcagctatcacaactgttttggcacgtcgcttgccttcatcagttaaccaacctaaagactatgcgtctatcgatgctgctccagaagaacgcgaacgcggtatcactatcaacactgcgcacgttgagtacgaaactgaaaaacgtcactacgctcacatcgacgctccaggacacgcggactacgttaaaaacatgatcactggtgctgctcaaatggacggagctatccttgtagtagcttcaactgacggaccaatgccacaaactcgtgagcacatccttctttcacgtcaggttggtgttaaacaccttatcgtcttcatgaacaaagttgacttggttgacgacgaagaattgcttgaattggttgaaatggaaatccgtgacctattgtcagaatacgacttcccaggtgacgatcttccagttatccaaggttcagcacttaaagctcttgaaggtgactctaaatacgaagacatcgttatggaattgatgaacacagttgatgagtatatcccagaaccagaacgtgacactgacaaaccattgcttcttccagtcgaggacgtattctcaatcactggacgtggtacagttgcttcaggacgtatcgaccgtggtatcgttaaagtcaacgacgaaatcgaaatcgttggtatcaaagaagaaactcaaaaagcagttgttactggtgttgaaatgttccgtaaacaacttgacgaaggtcttgctggagataacgtaggtgtccttcttcgtggtgttcaacgtgatgaaatcgaacgtggacaagttatcgctaaaccaggttcaatcaacccacacactaaattcaaaggtgaagtctacatccttactaaagaagaaggtggacgtcacactccattcttcaacaactaccgtccacaattctacttccgtactactgacgttacaggttcaatcgaacttccagcaggtactgaaatggtaatgcctggtgataacgtgacaatcgacgttgagttgattcacccaatcgccgtagaacaaggtactacattctctatccgtgagggtggacgtactgttggttcaggtatggttacagaaatcgaagcttaa

SEQ ID NO: 9074 - DNA, 1011 bp, Streptococcus pneumoniae
  CDS (1)...(1011)
atgaaggatagatatattttagcatttgagacatcctgtgatgagaccagtgtcgccgtcttgaaaaacgacgatgagctcttgtccaatgtcattgctagtcaaattgagagtcacaaacgttttggtggcgtagtgcccgaagtagccagtcgtcaccatgtcgaggtcattacagcctgtatcgaggaggcattggcagaagcagggattaccgaagaggacgtgacagctgttgcggttacctacggaccaggcttggtcggagccttgctagttggtttgtcagctgccaaggcctttgcttgggctcacggacttccactgattcctgttaatcacatggctgggcacctcatggcagctcagagtgtggagcctttggagtttcccttgctagcccttttagtcagtggtgggcacacagagttggtctatgtttctgaggctggcgattacaagattgttggggagacacgagacgatgcagttggggaggcttatgacaaggtcggtcgtgtcatgggcttgacctatcctgcaggtcgtgagattgacgagctggctcatcaggggcaggatatttatgatttcccccgtgccatgattaaggaagataatctggagttctccttctcaggtttgaaatctgcctttatcaatcttcatcacaatgccgagcaaaagggagaaagcctgtctacagaagatttgtgtgcttccttccaagcagcagttatggacattctcatggcaaaaaccaagaaggctttggagaaatatcctgttaaaaccctagttgtggcaggtggtgtggcagccaataaaggtctcagagaacgcctagcaactgaaatcacagatgtcaatgttatcattccacctctgcgtctctgcggagacaatgcaggtatgattgcttatgccagtgtcagcgagtggaacaaagaaaactttgcaaacttggacctcaatgccaaaccaagtcttgcctttgataccatggaataa

SEQ ID NO: 9075 - DNA, 855 bp, Streptococcus pneumoniae
  CDS (1)...(855)
atgaaaatcaaaaaatggcttggtctagcagcccttgctacagtcgcaggtttggctcttgcagcttgcggaaactcagaaaagaaagcagacaatgcaacaactatcaaaatcgcaactgttaaccgtagcggttctgaagaaaaacgttgggacaaaatccaagaattggttaaaaaagacggaattaccttggaatttacagagttcacagactattcacaaccaaacaaagcaactgctgatggcgaagtagatttgaacgctttccaacactataacttcttgaataactggaacaaagaaaacggaaaagaccttgtagcgattggagatacttacatctctccaatccgcctttactcaggtttgaatggaagtgccaacaagtacactaaagtagaagacatcccagcaaacggagaaatcgctgtaccgaatgacgctacaaacgaaagccgtgcgctttacttgcttcaatcagctggcttgattaaattggatgtttctggaactgctcttgcaacagttgccaacatcaaagaaaatccaaagaacttgaaaatcactgaattggacgctagccaaacagctcgttcattgtcatcagttgacgctgccgttgtaaacaataccttcgttacagaagcaaaattggactacaagaaagcacttttcaaagaacaagctgatgaaaactcaaaacaatggtacaacatcattgttgcgaaaaaagattgggaaacatcacctaaggctgatgctatcaagaaagtaatcgcagcttaccacacagatgacgtgaaaaaagttatcgaagaatcatcagatggtttggatcaaccagtttggtaa

SEQ ID NO: 9076 - DNA, 693 bp, Streptococcus pneumoniae
  CDS (1)...(693)
atggaatcattgattcaaacctatttaccaaatgtctataaaatgggttgggctggtcaggcaggctggggaacggctatctacttaactctttatatgacagttctttccttcattatcggaggcttcttggggctagtggcaggtctctttctcgtcttgacagcgccaggtggtgtcttggagaataaagtcgtattctggattttagacaaaattacctcaatttttcgtgcggttccctttatcatcctcttggcaatcttgtcaccactttctcacttgattgttaaaacaagtatcgggccaaatgcagcccttgtcccactttcttttgcagtctttgccttctttgcccgtcaggtgcaggttgtcttggctgaattggatggcggtgtcattgaggcggctcaagcgagcggagcgactttctgggacatcgtgggtgtttacctatcagaaggtcttccagatttgatccgtgtgacgactgtgaccttgatttcccttgttggggaaacagctatggccggtgcggttggagctggtggtatcggtaacgtagccatcgcttatggatttaaccgctacaatcacgatgtgaccatcttggcaaccatcgttatcattttgattatctttgcaatccaattcttaggagatttcttgactaagaaattgagccataaataa

SEQ ID NO: 9077 - DNA, 1176 bp, Streptococcus pneumoniae
  CDS (1)...(1176)
gtgaagcacacacgaccttcaatcgtgaataaacgaatagatgggagacttaccatgagtgataactctaaaacacgtgttgtcgtggggatgagtggtggtgttgattcgtcggtgacggctcttttgctcaaggagcagggctacgatgtgatcggtatcttcatgaagaactgggatgacacagatgaaaacggcgtctgtacggcgaccgaagattacaaggatgtggttgcggtggcagatcagattggcattccctactactctgtcaattttgaaaaagagtactgggaccgcgtttttgagtatttcctagctgaataccgtgcagggcgcacgccaaatccggacgttatgtgcaacaaggaaatcaagttcaaggcctttttggactatgccatgaccttgggggcagactatgtagcgactgggcactatgctcgagtggcgcgtgatgaggatggcactgttcacatgcttcgtggcgtggacaatggcaaggatcagacctatttcctcagccaactttcgcaagaacaacttcaaaaaaccatgttcccactaggacatttgaaaaagcctgaagttcgaaaactagcagaagaagcaggtctttcgactgctaagaagaaagactcgacagggatttgctttatcggagaaaagaactttaaaaactttctcagcaactacctgccagctcagcctggtcgtatgatgactgtggatggtcgtgatatgggcgagcatgctggtcttatgtactatacaatcggtcagcgtggcggactcggtatcggtgggcaacacggtggtgacaatgccccttggttcgttgtcggaaaagatctaagcaagaatattctctatgtaggccaaggtttctaccatgattcgctcatgtcaaccagcctagaggctagccaagtccactttactcgtgaaatgccagaagagtttacgctagaatgtacggctaaattccgttaccgtcagcctgactctaaggtgaccgtccatgtcaaaggagacaaggcagaagttatctttgcggaaccacaacgcgcgattacaccaggacaggcagttgtcttttacgatggcgaagagtgtctaggtggcggtttgattgacaatgcttaccgcgatggacaagtttgtcagtacatttag

SEQ ID NO: 9078 - DNA, 1833 bp, Streptococcus pneumoniae
  CDS (1)...(1833)
atgccagctcagaacttgagggccgtatcactgctcgccaacttgtcgaagaaaatcgcccagagtacaatatcgagtatatcgaactcttgtctgacaaattgctcgattacgaaaaagaaactggcgccttcgaaattacggagttctaatatggcctacactcttaaacctgaagaagtcggcgtttttgccatcggtggtctaggagaaatcgggaaaaacacttacggaattgaataccaagacgagattatcatcgtcgatgctgggattaaattcccagaagatgacttgcttggtatcgactatgtcattcctgactactcttacatcgtagacaatatcgaccgcgtcaaggctgttttaatcacacacggacacgaggaccacattggtgggattccgttcctactcaagcaagcaaatgtccctatttatgctggaccgcttgccttggctttgatccgtgggaaactcgaagaacacggcctcttgcgcaacgccaaactttacgaaatcaaccacaacaccgagttgacctttaaaaatctcaaggcaactttctttagaacgactcactctattccagagcctttggggattgtcattcatactcctcaagggaaaatcgtctgtacgggtgactttaagttcgactttactccagttggagaacctgcggacttgcatcgtatggctgcgcttggtgaagaaggcgtgctctgtctcctgtctgactcgacaaatgcggaagtaccaacctttaccaactctgaaaaagtcgttggtcagtccattatgaagattatccaaggtattgaaggacgtatcatctttgcatcctttgcctcaaatatcttccgtctccagcaggcaacagaagctgctgttaagactggacgcaagattgcggtctttggtcgttctatggaaaaggccattgtcaacggaatcgatcttggctacatcaaagctcctaagggaacctttatcgagccaaatgaaatcaaagattatcctgcaggagaagttcttatcctctgtacaggtagtcagggtgagcctatggcagccctctctcgtatcgccaacggaacccaccgtcaagtacaattacaaccaggtgataccgttatcttctcttctagtcccatccctggaaacactactagcgtcaacaagctgattaacatcatttctgaagctggtgtcgaagttatccacggtaaagtgaacaatatccatacatctggacacggtggccagcaagagcaaaaactcatgctccgcttgattaagccaaaatacttcatgcctgtccacggtgaataccgcatgcaaaaagtccacgctggactagcagtggatactggtgttgagaaggacaatatctttatcatgagcaatggcgatgtgcttgcccttactgctgactcagctcgtatcgcaggtcatttcaacgcccaagatatctatgtcgatggaaatcgtatcggtgaaattggcgcagctgtcctcaaagatcgtcgcgatctatctgaagacggtgtcgttctagcagtcgcaactgttgacttcaaatcgcagatgattctgtctggcccagatatcctcagccgaggctttgtctacatgagagagtctggagacttgattcgccaaagccagcgtatcctcttcaatgccattcgtatcgcactgaaaaataaggatgctagcgtgcaatctgtcaatggtgccattgtcaacgctattcgccccttcctctatgaaaataccgaacgtgaaccgatcatcatcccgatgatcctcacaccagatgaagaataa

SEQ ID NO: 9079 - DNA, 1143 bp, Streptococcus pneumoniae
  CDS (1)...(1143)
atgtcagattcaccaatcaaatatcgtttgattaagaaagaaaaacacacaggagctcgtctgggagaaatcatcactccccacggtacctttccgacacctatgtttatgccagttgggacacaagccactgtcaaaactcagtcacctgaagaattgaaggagatgggttcgggaattatcctatcaaacacctatcatctctggcttcgccctggagatgaactcattgcacgcgctggtggtctccacaagttcatgaattgggaccagcctatcttgacagatagtggtggttttcaggtttattctttagcagatagccgtaatatcacagaagaaggagtaacctttaaaaatcatctaaatggttctaagatgttcctatccccagaaaaagccatctctattcagaataatctgggttcagacatcatgatgtcctttgatgaatgtcctcagttttatcaaccttatgactacgttaagaaatcgatcgagcgtaccagccgttgggctgagcgtggtttgaaggctcaccgtcgtccacatgaccaaggtttgtttggaattgtgcaaggtgcaggatttgaagaccttcgccgccaatcagctcatgatcttgtcagcatggatttctcaggctactctatcggtggtttggcagtgggagaaacccatgaagagatgaatgcggtcttggactttacaactcaactgctgcctgaaaataaacctcgttatctgatgggtgtgggagcacaagatagcttgatcgatgggatcattcgtggggtggatatgtttgactgtgtcttaccgactcgaattgctcgtaacgggacttgtatgaccagtcaaggacgtttggttgtgaaaaatgcccagtttgctgaggactttacgccactggatcctgagtgtgattgctacacatgtaataactatacacgcgcttaccttcgtcacctgctcaaggctgatgaaacctttggtatccgcttgactagctaccacaatctttacttcttgcttaacctgatgaagcaagtgcgacaagccatcatggatgacaatctcttggaattccgtgagtattttgtggaaaaatatggctataataagtcaggacgtaatttctaa

SEQ ID NO: 9080 - DNA, 1152 bp, Streptococcus pneumoniae
  CDS (1)...(1152)
atgcctaactatattaaagcggatcagtttttctacccacacggagttcgtcgaggtggttacttggaacttgtggacggcaagtttgggaaacatgtagagcagattcctgaaggggctgaggtgattgactatacaggttatagcattgccccaggtcttgtggatactcatattcatggatatgcaggtgtagatgtgatggacaacaacattgaaggtacattgcatactatgagtgaaggacttcttagaaccggtgttaccagtttcttacccacaactttaacagccacttatgagcaattgcttgcagtcactgaaaatcttggaaaccattataaagaagcaacaggtgctaagattcgtgggatttattatgaaggtccatatttcacagaaacttttaagggggcacaaaatccaacttatatgagagacccgggtgttgaggagtttcattcttggcaaaaagcggcaaatggcttgcttaataaaattgcccttgcaccagaacgtgatggggtggaagactttgttcgtacagttacgggcgaaggtgtgacggttgctcttggacattcaaacgcgacttttgatgaagccaaaaaagcagtcgatgctggagcgagtgtttgggtgcatgcctacaatggaatgcgtgggttgactcaccgtgaattggggatggttggagccatgtaccaattgccacatacctatgcagagttgatctgtgatggtcaccacgtagatccaaaggcttgcgaaattcttatcaaacaaaaaggaacagaaaacatcgctcttatcacagactgtatgacagctgggggattggaagacggagattatatgttgggagaattcccagttgtcgttgcaaatggaactgcacgcctcaaatcgacaggtaacttggcaggttctatcctcaaactcaaagatggtttgaagaatgtggtcgaatgggaaattgggaatccgcatgaagcagtcatgatggccagcttcaacccagctaaatccgttcacatcgatgacgtctgtggccaaatccgtgaaggctacgacgctgacttcatcgtattagataaagatttggaattggtagcaacctacctagatggcgtaaaacgttatcaagcataa

SEQ ID NO: 9081 - DNA, 2664 bp, Streptococcus pneumoniae
  CDS (1)...(2664)
atggaggaaaatatggctgataaaaaaactgtgacaccagaggaaaagaaactcgttgctgaaaagcacgtagatgagttggttcaaaaagctctagttgcccttgaagaaatgcgtaaattgaatcaagagcaagttgactacatcgttgccaaagcatcagtagcagctttggatgcccatggagaattggctttacatgcctttgaagaaacaggacgtggtgtatttgaagataaagcaactaagaacttgtttgcttgtgaacacgtagtaaacaacatgcgccacactaagacagttggtgttatcgaagaagacgatgtaacaggattgactcttattgctgaaccagttggtgttgtttgtggtattactccaacaacaaacccaacatcaacagcaatcttcaaatcattgatttcattgaagacacgtaacccaatcgtctttgccttccatccatcagcacaagaatcatctgctcatgcagctcgtatcgtccgcgatgcagctatcgcagctggtgctcctgaaaactgtgtgcaatggattactcaaccatctatggaagcaacaagtgcccttatgaaccacgaaggtgttgcgacaatccttgcaacaggtggtaatgccatggttaaagccgcatactcatgtggtaaaccagctcttggggtaggtgccggaaacgttccagcttatgttgaaaaatcagcaaacattcgtcaagcagcacacgatatcgtcatgtctaaatcatttgataacggtatggtctgtgcatctgaacaagcagttatcattgataaagaaatttacgatgaatttgtagcagagttcaaatcttaccacacttactttgtaaacaaaaaagaaaaagctcttcttgaagagttctgcttcggcgtcaaagcaaacagcaaaaactgtgctggtgcaaaattgaacgctgacatcgttggtaaaccagcaacttggattgcagaacaagcaggatttacagttccagaaggaacaaacattcttgctgcagaatgtaaagaagttggcgaaaatgagccattgactcgtgaaaaattgtcaccagttattgcagttttgaaatctgaaagccgtgaagatggtattactaaggctcgtcaaatggttgaatttaacggtcttggacactcagcagctatccacacagctgacgaagaattgactaaagaatttggtaaagctgttaaagctattcgtgttatctgtaactcaccttctacttttggtggtatcggggacgtttacaatgccttcttgccatcattgacacttggatgtggttcttacggacgcaactcagttggggataacgttagtgccattaacctcttgaatatcaaaaaagtcggaagacggagaaataacatgcaatggatgaaacttccttcaaaaacatactttgaacgtgattcaattcaataccttcaaaaatgtcgtgacgttgaacgtgtcatgatcgttactgaccatgccatggtagagcttggtttccttgatcgtatcatcgaacaactggaccttcgtcgcaataaggttgtttaccaaatctttgcggatgtagaaccggatccagatatcacaactgtaaaccgtggtactgagattatgcgtgccttcaaaccagataccatcatcgcactcggtggtgggtctccaatggatgctgccaaagtaatgtggctcttctacgagcaaccagaagtggacttccgtgaccttgtccaaaaattcatggatatccgtaaacgtgccttcaagttcccattgcttggtaagaagactaaattcatcgcgattccaactacatctggtacaggatctgaagtaacaccatttgccgttatctctgataaagcaaacaaccgtaaatacccaatcgctgactactcattgacaccaactgtggcaatcgtagatcctgctttggtattgacagttccaggatttgttgctgctgatactggtatggacgtattgactcacgcgacagaagcatacgtatcacaaatggctagtgactacactgatggtttagcacttcaagccattaaattggtctttgaaaatctcgaaagctcagttaagaatgcagacttccactcacgtgagaaaatgcataacgcttcaacaatcgctggtatggcctttgccaatgccttcctaggtatttctcactcaatggcccataagattggtgcgcaattccacacaatccacggtcgtacaaatgctatcttgcttccatacgttatccgttacaacggtacacgtccagctaagacagcaacatggcctaagtacaactactaccgtgcagatgaaaaataccaagatatcgcacgcatgcttggacttccagcttctactccagaagaaggggttgaatcttacgcaaaagctgtctacgaactcggtgaacgtattgggatccaaatgaattttagagaccaaggaattgacgaaaaagaatggaaagaacattctcgtgaattagccttcctggcttatgaagaccaatgttcaccagctaacccacgtcttccaatggtagaccatatgcaagaaatcatcgaagatgcatactatggctacaaagaaagaccaggacgccgtaaataa

SEQ ID NO: 9082 - DNA, 1296 bp, Streptococcus pneumoniae
  CDS (1)...(1296)
atgaaaaactcaaaatttatagaccaatttgccacctttgctggtaaactagggaaccaaattcatttaaaaaccctaagagatgcattcgtaacagtaatgccattatatattttggcaggtttaatcgttcttttgaacaacacggtatttaagtggattttccaaggggatacattaacaagattccaatattggggaataacaattgcaaacggtactttaagtatttcaggtatgattattgctgtaatggttggttatttcttagctaaaaacagagatttcgaaaacccgttagcagcatcaatgctatcattagtttctttaattgtgatgatgccaaatacagtttctgtagttcctgacggagcaaaagatgctgtaaacatttcaggtgttctttcattcaacaacacaggtacaggcgcaatgttcgccggggttatcgtagcgattattgcaacagaattattcattgaattatcaaatgttaaagctttacaaatgaaccttggtgaaaatattccaccagctgttagtagatcatttagcgtattacttccagtcatgaccgtcatctccttatttggggttgtttcagcattattattcaatataactggaatgaacttaatctcaatcattacaatctttattcaagaaccaattcgtcatattggtacaagcttaatcggggtcattattatttactctttaggaaatatgttatggctatttggtattcaccaagcagttatttacagtgccatcctagaaccattactattaattaacattactgaaaacatcactgcagcaaataatggacaagccattccacacatcatcaacctatcacaaatacaaacattcgctttaatgggtggtagtggatctacattatgtttattaatagcaacattcttagtgagtcgcaatgctgtctctaaaaacgtggctaaattatcttttggacctggtatcttcaatatcaatgaaccagtattattcggttacccaatcgtttataacatttcattagctattccatttatcacagttccagtccttggtattttaatcagctacttagcaacagttacaggattcatgagtcctgcatttatacaagttccttggactacaccagtattcttaaatgcatggttagcaacagcaggggacgtgagagcagttctagttcaattcatcatctttgcacttggagttcttctatacattccatttatcaaagttaatgacaaagttgttgaacaagaaatggaaggttaa

SEQ ID NO: 9083 - DNA, 135 bp, Streptococcus pneumoniae
  CDS (1)...(135)
gtgaaacgtacttatcaaccaagtaaacttcgtcgtgcgcgcaaacacggattccgtaaccgtatgtcaactaaaaatggtcgtcgcgtattggcagctcgtcgtcgtaaaggacgcaaagttttggctgcataa

SEQ ID NO: 9084 - DNA, 873 bp, Streptococcus pneumoniae
  CDS (1)...(873)
atgagaattgcagattatagcgtgaccaaggcagtgctggagcgtcacggttttacctttaaaaagtccttcgggcaaaatttcctgacggataccaatatccttcaaaaaattgtggatacggctgaaattgatgatcaggtcaatgtcatcgaaatcgggccaggtattggtgccttgacagaatttttggctgagcgtgcagcccaagtcatggcttttgagattgaccaccgtttggtgccaattttggcagataccctgcgtgattttgataatgtgaccgtagttaacgaagatattctcaaggttgatttggcgcaacatatccaaaattttaaaaatcctaacctgccaatcaaggtagtggctaatttgccttactacatcacgacgcctattctcatgcacttgattgagagtggcattccttttagtgagtttgtggtcatgatgcagaaagaagtagcggaccgcatttcagcccagcctaacaccaaggcttacggtagcttgtctatcgccgtgcagtattacatgacagccaaggttgcctttatcgtgcctcgtacggtctttgtgccagcgccaaatgtggattcagccatcttgaaaatggtgcgtcgtccagagccagccgtagcagtagaagatgagaactttttctttaaggtttccaaggctagttttacccatcgccgcaagaccttgtggaataacttgacaggttactttggtaagactgaagaggtcaaggacaagctgaccaaggctttggaccaggcaggcttgtcaccaagtgtgcgtggggaagctctcagcttggcagaatttgccggtctagcagacgcacttaaagggcaaggactctaa

SEQ ID NO: 9085 - DNA, 954 bp, Streptococcus pneumoniae
  CDS (1)...(954)
atgaggaagaatatgaagattagtcacatgaaaaaagatgagctatttgaaggcttttacctaatcaaatcagctgacctgaggcaaactcgagctgggaaaaactacctagcctttaccttccaagatgatagtggcgagattgatgggaagctctgggatgcccaacctcataacattgaggcctttaccgcaggtaaggttgtccacatgaaaggacgccgagaagtttataacaatacccctcaagtcaatcaaattactctccgcctgcctcaagctggtgaacccaatgacccagctgatttcaaggtcaagtcaccagttgatgtcaaggaaattcgtgactacatgtcgcaaatgattttcaaaattgaaaatcctgtctggcaacggattgtccgaaatctctacaccaagtatgataaggaattctactcctatccagctgccaagaccaaccaccatgcctttgaaacgggcttggcctatcatacggcgaccatggtgcgtttggcagacgctattagcgaagtttatcctcagctcaataagagcctgctctatgcggggattatgttgcacgacttggctaaggtcatcgagttgacgggaccagaccagaccgagtacacggtcagaggcaatcttcttggacatatcgctctgattgatagcgaaattaccaagacagttatggaactcggcatcgatgataccaaggaagaagtcgttttgcttcgtcatgtcatcctcagtcaccacggcttgcttgaatatggaagtccagtccgtccacgtattatggaggcagagattatccatatgattgacaatctggatgcaagcatgatgatgatgtcaacagctctggctttggtggataaaggagagatgtccaataaaatcttcgctatggataatcgttccttctataaaccagatttagattaa

SEQ ID NO: 9086 - DNA, 741 bp, Streptococcus pneumoniae
  CDS (1)...(741)
atgactattataacctcaaaagccaattctgtggtaaaaaatgccaagaaattacaccaaaaaaaataccgcaagtctgcctatttgattgaaggctggcacttgtttgaagaagctgtccaagctggagtgacgattgagaaaatctttgccctagaaaattatcgagatcagttagctgcttttccgcaaactgtctggatttcagaggatattttgctagatttggcggattctcagactccacagggaattgtggcggtggttcaaaaagaagaagtaggacaagctgatttgagtcagggcaagttcttgtttttggaagatgtgcaagatcccggtaatgtaggaactatcattcgaactgcggatgcagtaggttttacaggagtgattgtttcagataagtcggcagacatctacagtctcaaaaccctacgttccatgcaaggtagtcattttcatctgcccatttaccggatgactagtccagcgcttcttgacgaaactaaaaaggtagctatcccagtgctagcaacaaccctatctaaagattctgttgattacagagaactgccttctatagaaaattttgtactagttatgggaaatgagggtcaaggaattagtccccttatggctgaaagtgcagaccagttggtccatattagcatgaaggggcaggccgagagtttgaatgttgcagttgcagccggtattttaatcttccatttaagctaa

SEQ ID NO: 9087 - DNA, 1098 bp, Streptococcus pneumoniae
  CDS (1)...(1098)
atgcttgaaagactgaaaagcatacattatatgttttggatcagtttaatttttatggttttccccatcctaactgtagtgactgggtggctttctgcctggcatttattgattgatattctatttgtagtggcgtatttgggtgttttaacaactaagagccagcgtctatcttggctatattggggcatcctgctgacttatgtagttgggaatactgcctttgtggctgttaattatatctggtttttctttttcctatccaatctcttaagctatcatttcagcgtaggtggtttaaagtctttacatgtctggacttttcttcttgctcaagtccttgttgtgggtcaactgttgatttttcagagaatcgaagttgagtttctattctatctacttgtaattcttgcttttgtcgatttaatgacttttggcttggttcggattcgaattgtggaggatttgaaagaagcacaggctaagcaaaatgcccagataaatctattgcttgctgaaaatgaacgcaatcgtatcggtcaagatttgcatgatagtctggggcatacctttgctatgcttagtgttaaaactgatctagccttgcagttatttcagatggaggcttatccacaggtggaaaaggaattaaaagaaattcaccagatcagcaaggattccatgaatgaagttcgaactatcgtggaaaatcttaagtctagaactttgacatccgaactagagactgtgaaaaagatgttagaaattgctggaattgaggtggaaacggataaccaactagatactgctagccttactcaagaattggagtcaatggcttctatgattttgcttgagttggtgaccaatatcatcaaacatgccaaagcgtctaaagcttacttaaaattagaacggacagagaaggaactcattttaacagtaagtgatgatggctgcggctttgcttttctaaaaggagatgagctccatacagtccgagatcgtgtttttccattttcaggagaagtaagtgtaatcagtcagaaacatccaacggaagtgcaagttcgactaccttataaggagagaaactaa

SEQ ID NO: 9088 - DNA, 1311 bp, Streptococcus pneumoniae
  CDS (1)...(1311)
atgaaatcaagagtaaaggaaacgagtatggataaaattgtggttcaaggtggcgataatcgtctggtaggaagcgtgacgatcgagggagcaaaaaatgcagtcttacccttgttggcagcgactattctagcaagtgaaggaaagaccgtcttgcagaatgttccgattttgtcggatgtctttattatgaatcaggtagttggtggtttgaatgccaaggttgactttgatgaggaagctcatcttgtcaaggtggatgctactggcgacatcactgaggaagccccttacaagtatgtcagcaagatgcgcgcctccatcgttgtattagggccaatccttgcccgtgtgggtcatgccaaggtatccatgccaggtggttgtacgattggtagccgtcctattgatcttcatttgaaaggtctggaagctatgggggttaagattagtcagacagctggttacatcgaagccaaggcagaacgcttgcatggcgctcatatctatatggactttccaagtgttggtgcaacgcagaacttgatgatggcagcgactctggctgatggggtgacagtgattgagaatgctgcgcgtgagcctgagattgttgacttagccattctccttaatgaaatgggagccaaggtcaaaggtgctggtacagagactataaccattactggtgttgagaaacttcatggtacgactcacaatgtagtccaagaccgtatcgaagcaggaacctttatggtagctgctgccatgactggtggtgatgtcttgattcgagacgctgtctgggagcacaaccgtcccttgattgccaagttacttgaaatgggtgttgaagtaattgaagaagacgaaggaattcgtgttcgttctcaactagaaaatctaaaagctgttcatgtgaaaaccttgccccacccaggatttccaacagatatgcaggctcaatttacagccttgatgacagttgcaaaaggcgaatcaaccatggtggagacagttttcgaaaatcgtttccaacacctagaagagatgcgccgcatgggcttgcattctgagattatccgtgatacagctcgtattgttggtggacagcctttgcagggagcagaagttctttcaactgaccttcgtgccagtgcagccttgattttgacaggtttggtagcacagggagaaactgtggtcggtaaattggttcacttggatagaggttactacggtttccatgagaagttggcgcagctaggtgctaagattcagcggattgaggcaaatgatgaagatgaataa

SEQ ID NO: 9089 - DNA, 3471 bp, Streptococcus pneumoniae
  CDS (1)...(3471)
gtgtttgaagatgtattgccaatttcaaacttcacagacacaatggagttggaatttgttggatatgaaatcaaggaaccaaaatacacgctagaagaagctcgtatccacgatgctagctactcagcaccaatttttgtaaccttccgtttgatcaataaagaaacaggcgaaatcaagacccaagaagttttctttggtgatttcccaatcatgacagaaatgggtactttcatcatcaatggtggtgaacgtattatcgtttctcagttggtccgctcaccaggtgtttactttaacgacaaagtagacaaaaatggtaaggtgggctatggttcaactgttatccctaaccgtggagcttggttggaacttgaaagcgactcaaaagatatcacctacactcgtatcgaccgtactcgtaagattccatttacaaccttggttcgtgctcttggtttctcaggtgatgatgaaatctttgatatctttggtgacagcgaattggttcgcaacactgttgaaaaagatatccacaagaatccaatggactctcgtacagacgaagccttgaaagaaatttacgaacgccttcgtccaggtgagcctaagacagctgaaagctcacgtagcttgcttgtggctcgcttctttgacccacgtcgctatgacttggcagcagttggtcgttacaaaatcaataaaaaactcaatgttaaaacacgtttgctcaaccaaaccattgcagagccattggtagaccctgaaactggagaaatcttggtagaagctggtacgattatgactcgtagcgtgattgaaagcattgaaagccatttggatggcgacttgaacaagattgtctacatcccaaacgatgcagccgttgtgactgagcctgttgttcttcaaaaattcaaggttgttgctccaactgatccagatcgcgtcgtaacgatcattggtaatgctaacccagatgacaaggttcgtacggtgactcctgcagatatccttgctgagatgagctacttcctcaacttggctgaaggacttggccgtgtagatgatatcgaccaccttggaaatcgtcgtatccgtgcggttggtgaattgcttgccaaccaagtacgtttgggactttctcgtatggaacgtaatgtccgtgaacgtatgtctgttcaggacaatgaagtcttgacaccacaacaaattatcaatatccgtcctgtaacagctgcagttaaagaattctttggttcatcacagttgtcacagttcatggaccaacacaacccgctttctgagttgtctcacaaacgccgtttgtcagccttaggacctggtggtttgactcgtgaccgtgccggatatgaagtgcgtgacgtgcactacactcactatggtcgtatgtgtccaatcgaaacacctgaaggacctaacatcggtttgatcaataacttgtcatcttacggacacttgaacaaatatggttttgttcaaacaccataccgtaaggttgaccgtgaaacaggtgttgtcacgaacgaaattgtttggttgacagctgatgaagaagatgaatatactgtagctcaggctaactctcgtctgaatgaagatggaacctttgctgagaagattgtcatgggacgtcaccaaggggtcaaccaagagtatccagctaatattgttgactacatggacgtttcaccaaaacaggtagttgccgttgcgacagcatgtattcctttcttggaaaacgatgactccaaccgtgccctcatgggagccaatatgcaacgtcaggctgtgccattgattaatcctcaggcaccttacgttggtactggtatggaataccaagcagcccacgattctggtgcggctgtgattgctcagtatgatggtaaagttacttacgcagatgctgacaaggtagaagttcgtcgtgaagatggttcattggatgtttaccacatccaaaaattccgtcgttcaaactcaggtactgcttacaaccaacgcactctcgtaaaagttggtgatgtcgttgaaaaaggcgatttcatcgctgacggaccttctatggaaaatggagaaatggcgcttggacaaaacccaatcgttgcctacatgacttgggaaggttacaacttcgaggatgccgttatcatgagcgaacgcttggtgaaggacgatgtctacacatctgttcaccttgaagaatacgaatcagaaacgcgcgatacaaagcttgggcctgaagaaatcactcgcgaaattccaaacgttggtgaagatgccctcaaagaccttgacgaaatggggattatccgtattggtgctgaggttaaagaaggtgatattcttgtaggtaaagtaacacctaagggtgagaaagatctttcagctgaagaacgtctcttgcacgctatctttggagacaagtctcgtgaagtgcgtgatacttctcttcgtgtaccacacggtgccgatggtgtcgttcgtgatgttaagatctttacacgtgtaaatggagatgagttgcaatcaggtgttaacatgttggttcgtgtttacatcgctcaaaaacgtaagattaaggtcggagataaaatggccggacgtcacggaaacaaaggggttgtctctcgtatcgttcctgtagaagacatgccttaccttccagacggaactccagtcgacatcatgttgaacccacttggggtgccatcacgtatgaatatcggtcaggttatggagcttcaccttggtatggcagctcgtactcttggtattcacattgcgacaccagtctttgatggagcaagttctgaagatctttggtcaactgttaaagaagcaggtatggatagcgatgccaagacaatcctttacgatggacgtacaggtgaaccatttgataaccgtgtttctgttggagtcatgtacatgatcaaactccaccacatggttgacgataaattgcacgcgcgttcagtcggaccttactcaactgttacccaacaaccactcggaggtaaagctcagtttggtggacaacgtttcggtgagatggaggtttgggctcttgaagcctacggtgcgtcaaatgtccttcaagaaatcttgacttacaagtcggacgatatcaacggacgtttgaaagcctatgaagctattacaaaaggcaaaccaattccaaaaccaggtgttccagaatccttccgagttcttgtcaaagaattgcaatctcttggtcttgacatgcgtgtcctagacgaagatgaccaagaagtggaacttcgcgacttggatgaaggaatggacgaagatgtcatccacgtagatgaccttgaaaaagcccgcgaaaaagcagcccaagaggctaaagcagcctttgaagctgaagaagctgagaaagcaacaaaagcggaagcaacagaagaagctgctgaacaagaataa

SEQ ID NO: 9090 - DNA, 1017 bp, Streptococcus pneumoniae
  CDS (1)...(1017)
atggttaaaaaaattattggaatggtgctagctttactttctgtaactgtagtaggagtaggtgtttttgcttatactatttatcaacaagggacagaaaccttagctaaaacctataaaaaaatcggtgaagaaaccaaggttattgaagcgactgaacctctaaccattctgttaatgggagtggacaccggaaatgttgaacgaactgaaacttgggtcggtagaagtgatagcatgatcttgatgacagtgaatcctaaaacgaaaaaaacaacaatgatgagtttagagcgggatattctgacgcgcattgaatcagggaatggtcaggctcatgaagcgaaactgaactcagcatatgcagatggtggagcagagcttgctatagaaaccattcaaaaaatgatgaatatccatattgatcgctatgtgatggtcaatatgagagggttgcaaaaattagtggatgcagtaggaggtattacagtcaataatatcctaggtttcccaatttctatcagtgaccaagaagaatttaataccatttctatcggtgttggggagcaacatattgggggagaagaagccctagtctatgcacgaatgcgttaccaagatcctgagggggattatggtcgtcaaaaacgtcaacgtgaagttattcaaaaagtcatggaaaaagctctcagtttaaatagcattggtcattatcaagagattctaaaagctttgagtgacaatatgcagaccaatattgatttgtctgcaaaaagtatccctaacttgctaggctataaagattcatttaaaaccattgaaactcagcagttgcagggtgaaggagagatacttcaaggtgtttcttaccagattgtttcgagagcacatatgttggaaatgcaaaatatactccgacgttctttgggacaagaagaagttactcagcttgaaaccaatgcggttttatttgaagatttatttggcagagcacctgttggtgatgaagataattaa

SEQ ID NO: 9091 - DNA, 627 bp, Streptococcus pneumoniae
  CDS (1)...(627)
atgatttttacgtataacaaagaacatgtcggtgatgtccttatggtcatcgtgaaaaatagcggagatgccaaactgaatgtggaacgtaaaggcaaggtagcccgtgttttcctcaaagaaaatggggaaacagtagcttggaacatttttgaggtttcgagcttgtttgaaattgcagagcgcggtcaagtctttttatcagatgagcaagtcgctcgtttgaaccaagaattacaggcggaaggttttacagaagaaattgttaatgataaggaacctaagtttgttgttggtgaaattgtcgagatggtagctcatccagacagtgaccacctcaacatctgccaagttgcagtcgcaagtgacaagatagtgcaaatcgttgcaggagcacctaatgcgcgtgttgggttgaaaaccattgtggctcttcctggtgccatgatgccaaaagggaatttcattttcccaggcgaacttcgtggtgaaaagagttttgggatgatgtgtagtcctcgtgaattgcatttgccaaatgctccgcaaaaacgtggggtgcttgaattatcagaagaccaagttgtcggaacaccgttcgacccagcgaaacactggactgcctag

SEQ ID NO: 9092 - DNA, 285 bp, Streptococcus pneumoniae
  CDS (1)...(285)
atgttgaaaccattaggggaccgtgtgctcttaaaaatagaagaaaaagaacaaaccgttgggggctttgtccttgcaggctcagcccaagaaaaaaccaaaacagctcaagttgtggctactggacaaggtgttcgtaccttgaacggtgacttggttgctccaagtgttaaaactggagatcgtgtcttagttgaagcccacgcaggtcttgatgtcaaagatggcgatgaaaagtacatcatcgtaggcgaagctaacattttggcaatcattgaggaatag

SEQ ID NO: 9093 - DNA, 723 bp, Streptococcus pneumoniae
  CDS (1)...(723)
atgagattagataaatttttagttgcctgtgcggtgggaagtcggactgaggtcaaaaacttgctcaaggctgggcgcgtgactgtaaatggtaaaaaagaaaaatcagctaaatttcagattgatgaaaaaatagatgagattcgctttgatgggcaagtgttggagtatgaagagtttgtctactacatgatgaacaagcccaaaggagttatctcagcgactgaggatcccaagcacagaaccgttctggacttgttggatgacttggcgcggagtaaggaagttttcccagtaggacgcttggatattaacacgcatggtcttttgctcttgaccaatgatggtcagctggctcatgttcttctttcgcccaagcgtcatgtggacaagacttatctggcacaagtcaagggaatcatgacccaagaagatgtggagacatttgctgagggtattcctctcaaagactttacctgtcagcccgctagactggagattctttccacagatgcagaaaagaatcagagccaaatccgtgtgaccattgcagaagggaagtttcatcagatcaagcgtatggtgggctactgtggcaaggaagtggtggacttgcaacgattgactatgggaactttagtattagatgagaacctggaacgaggggaatggcgtcgcttgaccaaggaagaattagaaattctccgcgctaatattatttaa

SEQ ID NO: 9094 - DNA, 2865 bp, Streptococcus pneumoniae
  CDS (1)...(2865)
atggtaagcaataatggactagaaagaacaaagatgcaagataaaattgtcattcatggggcgcgtgcccataatttaaaaaatattgatgtggagattccgcgagacaagttggttgtcgtgactggcttgtcaggttcagggaagtccagtctggcttttgatactctctatgcggagggacaacgtcgctatgtagagagtttgtccgcctacgctcgtcagttcttgggaaatatggaaaaaccagatgtagatgccattgatggtctcagcccagctatttccatcgaccagaaaacgactagtaaaaatcctcgctcgacggtgggaacaacgactgaaatcaatgactatctgcgtctcctctacgcacgtgtggggacgccttactgtatcaacggacatggagctatcaatgcttcttctgtggagcaaatcgttgataaggttttggagttacctgaacgccagcgcttgcagatcttggctcctgtcatccgcaagaaaaaaggccaacataagagtgttatcgagaaggttcagaaagacgggtatgttcgtgtccgtgtggatggggaagtctatgatgtgaccgaagtgccagagttgtctaagagcaagcaacacaatatcgatgtcgtggttgaccgtattgttatcaaggagggcattcgtagtcgtctctttgattccattgaggctgcccttcgtattgcagaaggttatgtcattatcgacaccatggacgactctgagttgttgttctctgagcattatgcctgtccagtttgtggttttactgtcccagagttagagcctcgtctcttttctttcaatgctccttttggctcttgtagtgagtgtgacggcttgggcatcaagctggaggtggatactgatttggtagtgccagatgctagcaaaaccttacgtgagggagcgctagcaccttggaatcctatctcatccaactactatccaaacatgttagagcaggccatgaaagtctttggagtggctatggataagccttttgaggacctgtcagaagaagataagaacttgattctctatgggtcagatggtaaggaattccatttccactatgagaatgaatttggtggcgtgcgcgatatcgacattccgtttgagggagttatcaataatatcaaacgtcgttaccatgaaaccaatagcgattacactcgcactcagatgcgtctctacatgaatgagctgacctgcggaacctgtcaaggctatcgtctcaatgaccaggccttgtctgtccgtgtgggcggccagcaagggccacatattggagaaatctcagacctgtctatcgctgaccacttggacttggtgagccagttaactttgtctgaaaatgaagccatcattgctcgtcccattctcaaggaaatcaaggatcgtttgaccttccttaataatgtgggtcttaactatctaaccctgtcacgttcagcaggaaccctttcaggtggggaaagtcagcgcattcgtttggcaacccagattggttccaacctatcaggcgtcctctatatcctagacgagccgtcaatcggtcttcaccagagggacaatgaccgcctgattgccagtctgaaaaagatgcgtgacttgggcaatactcttatcgtggtggaacacgacgaagataccatgcgtgaagctgattatctgattgacgttggtcctggtgccggtgtttttggtggtgagattgttgcagcaggtacacctaagcaagtggctcgcaacagcaagtctatcacaggtcagtacttgtcaggcaaacgtgtcatcccagtaccagaagagcgccgtgtcggaaatggtcgttttattgaagtgataggagcgcgtgagaacaacttgcaaaatgtcacggctcgctttccactaggaaaatttatcgcagtgacaggtgtgtcgggttcagggaaatcgactctaatcaacagcattctcaaaaaagccattgcccagaagctcaaccgtaattcagacaaacctggtaagtttaagactattacagggattgagcatgtcgaccgtttgattgatattgaccagagccctatcggacggacgccgaggtctaacccagctacctatacaggagtttttgacgatatacgtgacctttttgctcagacaaatgaagccaagattcgaggctacaagaaggggcgcttcagtttcaacgtcaagggaggtcgctgtgaagcttgctcaggtgacgggattatcaagattgagatgcacttcttgccagatgtttatgtggcttgtgaagtttgccacggaacccgctataacagtgaaaccctagaagttcactacaaggaaaagaatatttcgcaggtcttggatatgacggtcaacgatgcggtagaatttttccaacacattccgaaaattcaacgcaaactccagaccatcaaggatgtagggctaggctatgtgaccttgggacagccagctaccaccctttctgggggagaagcccaacgtatgaagttagctagcgaactccacaaacgctcgacaggaaaatctttctacattctggatgagccgacgacagggcttcatacagaggacattgctcgcctgctcaaggttttagctcgctttgtagacgatggcaatacagtcctcgtcatcgagcacaatctggatgttatcaagacggcagaccatatcattgacttgggacctgagggcggtgtcggtggtggaaccatcatcgtaacaggaactccagaagaagtagctgccaacgaagccagctatacaggacactatttgaaaggaaagttacatcatgaataa

SEQ ID NO: 9095 - DNA, 1062 bp, Streptococcus pneumoniae
  CDS (1)...(1062)
atgaataaacgcgtacaagcatttctagctaaaatgcaagaaaaagaactagatggtatcatcatcaacaatcttaaaaacgtctattatttgactggtttttggggctcaaacggaacagtctttatcagccgtgaccgtcaggtcttagtgacagactctcgctatatcatcgcagctaagcaagaaaccagtggttttgagattgtggctgatcgtgatgaattggctgtcattgcaggaattgttaaggacatgggcttgactcgtatcggttttgaagatgagatttcagtgtcttattaccaccgtatgcaggcagcttttgcaggtttggacttgcttccacaaactcagtttgtggaaggtcttcgtatgattaaggatgaggcagagattgcagcgattcgcaaggcttgttctatctcagaccaagctttccgcgatgcgcttgactttatcaaaccaggaaaaactgaaattgagattgccaacttccttgatttccgcatgcgtgagttgggagcatctggcttatcttttgatacgatcctagctagcggtatcaattcttctaaaccccatgcccatccaatgcacaaaccagtggagttgggagaagccattaccatggacttcggctgtctctatgaccactatgtcagtgatatgacccggactatctatctagggcatgttagcgatgagcaggcagagatttacaatacggttctaaaagctaaccaagccttgattgaccaagctaaggcaggcttaggtttccgtgactttgacaaaatccctcgtgatattatcattgaggcaggttatggtgactactttactcacggcattggccacggtattggtctggatatccatgaggaaccctactttagccagacttctacagaaactattaagacaggtatggtcttgaccgatgaaccaggtatctatatcgaaggcaaatatggcgttcgtatcgaggatgatatcctgattacagagacaggttgtgaattattgaccctagctccaaaagagttgatagtcatttag

SEQ ID NO: 9096 - DNA, 267 bp, Streptococcus pneumoniae
  CDS (1)...(267)
atgggatttactgaagaaacagtacgttttaaattggacgattccaataaaaaagaaattagcgaaactttgacagatgtttatgcttcgttgaacgataagggttacaacccaattaaccaaatcgtaggttacgtattgagtggagaccctgcctacgttcctcgttataataatgcacgaaatcaaatccgtaagtatgagcgtgatgaaatcgttgaggaattggttcgctactatctcaaaggacaaggagtcgatctataa

SEQ ID NO: 9097 - DNA, 420 bp, Streptococcus pneumoniae
  CDS (1)...(420)
atgagaattatgggattggacgtcggttcaaaaacggtaggggtggcgattagcgatccgcttggttttacagctcaagggcttgaaatcatccagataaatgaagaacaaggccaatttggttttgaccgcgttaaggaattggttgatacttacaaggtggaacgatttgtagtgggcttgcctaaaaacatgaacaatacaagtggaccgcgcgtagaagctagtcaaccctacggagcagagctagaagagttttctggtttaccagtagactatcaggatgaacgcttgacaacagtggctgctgagcgcatgttgattgaacaagcagatatcagtcgcaataagcgcaagaaagtcattgataagttagcagctcagctgattttacaaaattatttagatagaaaattttaa

SEQ ID NO: 9098 - DNA, 309 bp, Streptococcus pneumoniae
  CDS (1)...(309)
atggcaaacaaaaaaatccgtatccgtttgaaagcttacgaacaccgtacgcttgacacagcggctgcaaaaatcgtagaatcagctactcgtacaggtgcacaagttgcgggtccaatcccacttccaactgaacgtagcctctacacaatcattcgtgcgactcacaaatacaaagactctcgcgaacaatttgaaatgcgtacacacaaacgtttgatcgatatcgttaacccaactcaaaaaacagttgatgccttgatgaaattggatcttccaagtggtgtaaacgtagaaatcaaactttaa

SEQ ID NO: 9099 - DNA, 627 bp, Streptococcus pneumoniae
  CDS (1)...(627)
atgacaaaaggaatcttagggaaaaaagtgggaatgactcaaatcttcactgaagctggcgaattgatccctgtaacagttattgaagcaactccaaacgttgttcttcaagttaaaactgttgaaacagacggatacaacgctatccaagttggtttcgatgacaaacgcgaagtattgagcaacaaacctgctaaaggacatgtagcgaaagctaacacggctcctaagcgcttcattcgtgaattcaaaaacgttgaaggcttggaagttggtgctgaaattacagttgaaacattcgcagctggagacgttgttgacgtaacgggtacttctaaaggtaaaggtttccaaggtgttatcaaacgccacggacaatcacgtggaccaatggctcacggttctcgttaccaccgtcgtccaggttctatggggcctgttgcacctaaccgcgtattcaaaggtaaaaaccttgcaggacgtatgggtggcgaccgcgtaacaattcaaaaccttgaagttgtacaagttgttccagaaaagaacgttatccttatcaaaggtaacgtaccaggtgctaagaaatctcttatcactatcaaatcagcagttaaagctggtaaataa

SEQ ID NO: 9100 - DNA, 624 bp, Streptococcus pneumoniae
  CDS (1)...(624)
atggcaaacgtaacattatttgaccaaactggtaaagaagctggccaagttgttcttagcgatgcagtatttggtatcgaaccaaatgaatcagttgtgtttgatgtaatcatcagccaacgcgcaagctatcgtcaaggaacacacgctgttaaaaaccgctctgcagtatcaggtggtggacgcaaaccatggcgtcaaaaaggaactggacgtgctcgtcaaggttctatccgctcaccacaatggcgtggtggtggtgttgtcttcggaccaactccacgttcatacggctacaaacttccacaaaaagttcgtcgcctagctcttaaatcagtttactctgaaaaagttgctgaaaacaaattcgtagctgtagacgctctttcatttacagctccaaaaactgctgaatttgcaaaagttcttgcagcattgagcatcgattctaaagttcttgttatccttgaagaaggaaatgaattcgcagctctttcagctcgtaaccttccaaacgtgaaagttgcaactgctacaactgcaagtgttcttgacatcgcaaatagcgacaaacttcttgtcacacaagcagctatctctaaaatcgaggaggttcttgcataa

SEQ ID NO: 9101 - DNA, 297 bp, Streptococcus pneumoniae
  CDS (1)...(297)
atgaatttgtatgatgttatcaaaaaacctgtcatcactgaaagctcaatggctcaacttgaagcaggaaaatatgtatttgaagttgacactcgtgcacacaaacttttgatcaagcaagctgttgaagctgctttcgaaggtgttaaagttgccaatgttaacacaatcaacgtaaaaccaaaagctaaacgtgttggacgttacactggttttactaacaaaactaaaaaagctatcatcacacttacagctgattctaaagcaatcgagttgtttgctgctgaagctgaataa

SEQ ID NO: 9102 - DNA, 834 bp, Streptococcus pneumoniae
  CDS (1)...(834)
gtgggaattcgtgtttataaaccaacaacaaacggtcgccgtaatatgacttctttggatttcgctgaaatcacaacaagcactcctgaaaaatcattgcttgttgcattgaagagcaaggctggtcgtaacaacaacggtcgtatcacagttcgtcaccaaggtggtggacacaaacgtttttaccgtttggttgacttcaaacgtaataaagacaacgttgaagcagttgttaaaacaatcgagtacgatccaaaccgttctgcaaacatcgctcttgtacactacactgacggtgtgaaagcatacatcatcgctccaaaaggtcttgaagtaggtcaacgtatcgtttcaggtccagaagcagatatcaaagtcggaaacgctcttccacttgctaacatcccagttggtactttgattcacaacatcgagttgaaaccaggtcgtggtggtgaattggtacgtgctgctggtgcatctgctcaagtattgggttctgaaggtaaatatgttcttgttcgtcttcaatcaggtgaagttcgtatgattcttggaacttgccgtgctacagttggtgttgtcggaaacgaacaacatggacttgtaaaccttggtaaagcaggacgtagccgttggaaaggtatccgcccaacagttcgtggttctgtaatgaaccctaacgatcacccacacggtggtggtgaaggtaaagcaccagttggtcgtaaagcaccatctactccatggggcaaacctgctcttggtcttaaaactcgtaacaagaaagcgaaatctgacaaacttatcgttcgtcgtcgcaacgagaaataa

SEQ ID NO: 9103 - DNA, 282 bp, Streptococcus pneumoniae
  CDS (1)...(282)
atgggacgcagtcttaaaaaaggacctttcgtcgatgagcatttgatgaaaaaagttgaagctcaagctaacgacgaaaagaaaaaagttattaaaacttggtcacgtcgttcaacgatcttcccaagtttcattggttacactattgcagtttatgacggacgtaaacacgtacctgtttacatccaagaagacatggtaggccacaaacttggtgaatttgcaccaactcgtacttacaaaggtcacgctgcagacgacaagaaaacacgtagaaaataa

SEQ ID NO: 9104 - DNA, 345 bp, Streptococcus pneumoniae
  CDS (1)...(345)
atggcagaaattacttcagctaaagcaatggctcgtacagtacgtgtttcacctcgtaaatcacgtcttgttcttgataacatccgtggtaaaagcgtagccgatgcaatcgcaatcttgacattcactccaaacaaagctgctgaaatcatcttgaaagttttgaactcagctgtagctaacgctgaaaacaactttggtttggataaagctaatttggtagtatctgaagcattcgcaaacgaaggaccaactatgaaacgtttccgtccacgtgcgaaaggttcagcttcaccaatcaacaaacgtacagctcacatcactgtagctgttgcagaaaaataa

SEQ ID NO: 9105 - DNA, 654 bp, Streptococcus pneumoniae
  CDS (1)...(654)
gtgggtcaaaaagtacatccaattggtatgcgtgtcggcatcatccgtgattgggatgccaaatggtatgctgaaaaagaatacgcggattaccttcatgaagatcttgcaatccgtaaattcgttcaaaaagaacttgctgacgcagcagtttcaactattgaaatcgaacgcgcagtaaacaaagttaacgtttcacttcacactgctaaaccaggtatggttatcggtaaaggtggtgctaacgttgatgcactccgtgcaaaacttaacaaattgactggaaaacaagtacacatcaacatcatcgaaatcaaacaacctgatttggatgctcaccttgtaggtgaaggaattgctcgtcaattggagcaacgtgttgctttccgtcgtgcacaaaaacaagcaatccaacgtgcaatgcgtgctggagctaaaggaatcaaaactcaagtatcaggtcgtttgaacggtgcagatatcgcccgtgctgaaggatactctgaaggaactgttccgcttcacacacttcgtgcagatatcgattacgcttgggaagaagcagatactacatacggtaaacttggtgttaaagtatggatctaccgtggtgaagttcttccagctcgtaaaaacactaaaggaggtaaataa

SEQ ID NO: 9106 - DNA, 414 bp, Streptococcus pneumoniae
  CDS (1)...(414)
atgttagtacctaaacgtgttaaacaccgtcgtgagttccgtggaaaaatgcgcggtgaagcaaaaggtggaaaagaagtagcattcggtgaatacggtcttcaagctacaactagccactggatcactaaccgccaaatcgaagctgctcgtatcgccatgactcgttacatgaaacgtggtggtaaagtttggattaaaatcttcccacacaaatcatacactgctaaagctatcggtgtgcgtatgggatctggtaaaggggcacctgaaggttgggtagcaccagttaaacgtggtaaagtgatgttcgaaatcgctggtgtatctgaagagattgcacgtgaagcgcttcgacttgctagccacaaattgccagttaaatgtaaattcgtaaaacgtgaagcagaataa

SEQ ID NO: 9107 - DNA, 207 bp, Streptococcus pneumoniae
  CDS (1)...(207)
atgaaacttaatgaagtaaaagaatttgttaaagaacttcgtggtctttctcaagaagaactcgcgaagcgcgaaaacgaattgaaaaaagaattgtttgaacttcgtttccaagctgctactggtcaattggaacaaacagctcgcttgaaagaagttaaaaaacaaatcgctcgtatcaaaacagttcaatctgaagcgaaataa

SEQ ID NO: 9108 - DNA, 1950 bp, Streptococcus pneumoniae
  CDS (1)...(1950)
atgtctcatattattgaattgccagagatgctggcaaaccaaatcgcagctggagaggtcattgaacgtcctgccagtgtggtcaaagagttggtagaaaatgccattgacgcgggctctagtcagattattattgagattgaggaagctggtctcaagaaggttcaaatcacggataacggtcatggaattgcccacgatgaggtggagttggccctgcgtcgccatgcgaccagtaagataaaaaatcaagcagatctctttcggattcggacgcttggttttcgtggtgaagccttgccttctattgcgtctgttagtgtcttgactctgttaacggcggtggatggtgctagtcatggaaccaagttagtcgcgcgtgggggtgaagttgaggaagtcatcccagcgactagtcctgtgggaaccaaggtttgtgtggaggatctctttttcaacacgcctgcccgtctcaagtatatgaagagccagcaagcggagttgtctcatatcattgatattgtcaaccgtctgggcttggcccatcctgagatttcttttagcttgattagtgatggcaaggaaatgacgcggacagcagggactggtcaattgcgccaagcaatcgcagggatttacggtttggtcagtgccaagaagatgattgaaattgagaactctgacctagatttcgaaatttcaggttttgtgtccttgcctgagttgactcgggctaaccgcaattatatcagtctcttcatcaatggccgttatatcaagaacttcctgctcaatcgtgctattttggatggttttggaagcaagcttatggttggacgttttccactggctgtcattcacatccatatcgacccttatctagcggatgtcaatgtgcatccaactaagcaagaggtgcggatttccaaggaaaaagaactgatgactctggtttcagaagctattgcaaatagtctcaaggaacaaaccttgattccagatgccttggaaaatcttgccaaatcgaccgtgcgcaatcgtgagaaggtggagcaaactattctcccactcaaagaaaatacgctctactatgagaaaactgagccgtcaagacctagtcaaactgaagtagctgattatcaggtagaattgactgatgaagggcaggatttgaccctgtttgccaaggaaaccttggaccgattgaccaagccagcaaaactgcattttgcagagagaaagcctgctaactacgaccagctagaccatccagagttagatcttgctagcatcgataaggcttatgacaaactggagcgagaagaagcatccagcttcccagaattggagtttttcggacaaatgcacgggacttatctctttgcccaagggcgagatggactttacatcatagatcagcacgctgctcaggaacgggtcaagtacgaggagtaccgtgaaagcattggcaatgttgaccagagccagcagcaactcctagtgccctatatctttgaatttcctgcggatgatgccctgcgtctcaaggaaagaatgcctctcttagaggaagtgggcgtctttctagcagagtacggagaaaatcaatttattctacgtgaacatcctatttggatggcagaagaagagattgaatcaggcatctatgagatgtgcgacatgctccttttgaccaaggaagtttctatcaagaaataccgagcagagctggctatcatgatgtcttgcaagcgatctatcaaggccaatcatcgtattgatgatcattcagctagacaactcctctatcagctttctcaatgtgacaatccctataactgtcctcacggacgtcctgttttggtgcattttaccaagtcggatatggaaaagatgttccgacgtattcaggaaaatcacaccagtctccgtgagttggggaaatattaa

SEQ ID NO: 9109 - DNA, 261 bp, Streptococcus pneumoniae
  CDS (1)...(261)
atggaacgcaataatcgtaaagttcttgttggacgtgttgtatctgacaaaatggacaagacaatcacagttgtagttgaaacaaaacgtaaccacccagtctatggtaaacgtattaactactctaaaaaatacaaagctcatgatgaaaacaatgttgccaaagaaggcgatatcgtacgtatcatggaaactcgcccgctttcagctacaaaacgtttccgtcttgtagaagttgttgaagaagcggtcatcatctaa

SEQ ID NO: 9110 - DNA, 369 bp, Streptococcus pneumoniae
  CDS (1)...(369)
atgattcaaacagaaactcgtttgaaagtcgcagacaacagcggtgctcgcgaaatcttgactatcaaagttcttggtggttcaggacgtaaatttgcaaacatcggtgatgttatcgtggcatctgtaaaacaagctactcctggtggtgcggttaaaaaaggtgacgttgttaaagcagttatcgttcgtactaaatcaggtgctcgtcgtgctgatggttcatacatcaaatttgacgaaaacgcagcagttatcatccgtgaagacaaaactcctcgcggaacacgtatctttggcccagttgcacgtgaattgcgtgaaggtggcttcatgaagatcgtgtcacttgctccagaagtactttaa

SEQ ID NO: 9111 - DNA, 306 bp, Streptococcus pneumoniae
  CDS (1)...(306)
atgtttgtaaaaaaaggcgacaaagttcgcgtaatcgctggtaaagataagggaacagaagctgttgtccttactgcctttccaaaagtaaacaaagttatcgttgaaggtgttaacattgttaagaaacaccaacgtccaactaacgagcttcctcaaggtggtatcatcgagaaagaagcagctatccacgtatcaaacgttcaagttttggacaaaaatggtgtagctggtcgtgttggttacaaatttgtagacggtaaaaaagttcgctacaacaaaaaatcaggcgaagtgcttgattaa

SEQ ID NO: 9112 - DNA, 543 bp, Streptococcus pneumoniae
  CDS (1)...(543)
atggcaaatcgtttaaaagaaaaatatcttaatgaagtagttcctgctttgacagaacaattcaactactcatcagtgatggctgtgcctaaagtagataagattgttttgaacatgggtgttggtgaagctgtatcaaacgctaaaagccttgaaaaagctgctgaagaattggcacttatctcaggtcaaaaaccacttatcactaaagctaaaaaatcaatcgccggcttccgtcttcgtgaaggtgttgcgatcggtgcaaaagttacccttcgtggtgaacgtatgtacgaattcttggataaattggtatcagtttcacttccacgtgtacgtgacttccacggtgttccaacaaaatcatttgatggacgcgggaactacacacttggtgtgaaagaacaattaatcttcccagaaatcaacttcgatgacgttgacaaaactcgtggtcttgacatcgttatcgtaacaactgctaacactgacgaagagtcacgtgcattgcttacaggccttggaatgccttttgcaaaataa

SEQ ID NO: 9113 - DNA, 270 bp, Streptococcus pneumoniae
  CDS (1)...(270)
atggctaaaaaatcaatggtagctagagaggctaaacgccaaaaaattgttgaccgttatgctgaaaaacgtgctgcattaaaggcggcaggggactacgaaggtttatctaaattacctcgcaacgcctcaccgactcgtttacataatcgttgtagagttacggggcgcccacattcagtttaccgcaaatttggtctgagtcgtatcgcttttcgcgaacttgcgcataaaggtcaaattcctggtgtaacaaaagcatcttggtaa

SEQ ID NO: 9114 - DNA, 399 bp, Streptococcus pneumoniae
  CDS (1)...(399)
atggttatgactgacccaatcgcagacttcctaactcgtattcgtaatgctaaccaagctaaacacgaagtacttgaagtacctgcatcaaacatcaaaaaagggattgctgaaatccttaaacgcgaaggttttgtaaaaaacgttgaaatcattgaagatgacaaacaaggcgtcatccgtgtatttcttaaatacggaccaaatggtgagaaagttatcactaacttgaaacgtgtttctaaaccaggacttcgtgtctacaaaaaacgtgaagaccttccaaaagttcttaacggacttggaattgccatcctttcaacttctgaaggtttgcttactgataaagaagcacgccaaaagaatgttggtggtgaggttatcgcttacgtttggtaa

SEQ ID NO: 9115 - DNA, 537 bp, Streptococcus pneumoniae
  CDS (1)...(537)
atgtcacgtattggtaataaagttatcgtgttgcctgctggtgttgaactcgctaacaatgacaacgttgtaactgtaaaaggacctaaaggagaacttactcgtgagttctcaaaagatattgaaatccgtgtggaaggtactgaagtaactcttcaccgtccaaacgattcaaaagaaatgaaaactatccacggaactactcgtgcccttttgaacaacatggttgttggtgtatcagaaggattcaagaaagaacttgaaatgcgtggggttggttaccgtgcacagcttcaaggatctaaacttgttttggctgttggtaaatctcatccagacgaagttgaagctccagaaggaattacttttgaacttccaaacccaacaacaatcgttgttagcggaatttcaaaagaagtagttggtcaaacagctgcttacgtacgtagccttcgttcaccagaaccatataaaggtaaaggtatccgttacgttggtgaattcgttcgtcgtaaagaaggtaaaacaggtaaataa

SEQ ID NO: 9116 - DNA, 396 bp, Streptococcus pneumoniae
  CDS (1)...(396)
gtgcatagcacacgatttaaaactaaagaggtgaaaactgtgatttcaaaaccagataaaaacaaactccgccaaaaacgccaccgtcgcgttcgcggaaaactctctggaactgctgatcgcccacgtttgaacgtattccgttctaatacaggcatctacgctcaagtgattgatgacgtagcgggtgtaacgctcgcaagtgcttcaactcttgataaagaagtttcaaaaggaactaaaactgaacaagccgttgctgtcggtaaactcgttgcagaacgtgcaaacgctaaaggtatttcagaagtggtgttcgaccgcggtggatatctatatcacggacgtgtgaaagctttggctgatgcagctcgtgaaaacggattgaaattctaa

SEQ ID NO: 9117 - DNA, 495 bp, Streptococcus pneumoniae
  CDS (1)...(495)
atggcatttaaagacaatgcagttgaattagaagaacgcgtagttgctgtcaaccgtgttacaaaagttgttaaaggtggacgtcgtcttcgtttcgcagctcttgttgttgttggtgaccacaatggtcgcgtaggatttggtactggtaaagctcaagaagttccagaagcaatccgtaaagcagtagatgatgctaagaaaaacttgatcgaagttcctatggttggaacaacaatcccacacgaagttctttcagaattcggtggagctaaagtattgttgaaacctgctgtagaaggttctggagttgccgctggtggtgcagttcgtgccgttgtggaattggcaggtgtggcagatattacatctaaatcacttggttctaacactccaatcaacattgttcgtgcaactgttgaaggtttgaaacaattgaaacgcgctgaagaaattgctgcccttcgtggtatttcagtttctgatttggcataa

SEQ ID NO: 9118 - DNA, 225 bp, Streptococcus pneumoniae
  CDS (1)...(225)
gtggtatttcagtttctgatttggcataagaaaggggataaaatggctcaaattaaaattactttgactaagtctccaatcggacgcattccatcacaacgtaaaactgttgtagcacttggacttggcaaattgaacagctctgttattaaagaagataacgctgctatccgtggtatgattacagcagtatctcacttagtaacagttgaagaagtaaactaa

SEQ ID NO: 9119 - DNA, 441 bp, Streptococcus pneumoniae
  CDS (1)...(441)
atgaaacttcatgaattgaaacctgcagaaggttctcgtaaagtacgtaaccgcgttggtcgtggtacttcatcaggtaacggtaaaacatctggtcgtggtcaaaaaggtcaaaaagctcgtagcggtggcggagttcgccttggttttgaaggtggacaaactccattgttccgtcgtcttccaaaacgtggattcactaacatcaacgctaaagaatacgcaattgtgaaccttgaccaattgaacgtctttgaagatggtgctgaagtaactccagttgttcttatcgaagcaggaattgttaaagctgaaaagtcaggtattaaaattcttggtaacggtgagttgactaagaaattgactgtgaaagcagctaaattctctaaatcagctgaagaagctatcactgctaaaggtggttcagtagaagtcatctaa

SEQ ID NO: 9120 - DNA, 1311 bp, Streptococcus pneumoniae
  CDS (1)...(1311)
atgttttttaaattattaagagaagctcttaaagtcaagcaggttcgatcaaaaattttatttacaatttttatcgttttggtctttcgtatcggaactagcattacagttcctggtgtgaatgccaatagcttgaatgctttaagtggattatccttcttaaacatgttgagcttggtgtcggggaatgccctaaaaaacttttcgatttttgccctaggagttagtccctatatcaccgcttctattgttgtccaactcttgcaaatggatattttacccaagtttgtagagtggggtaaacaaggggaagtaggtcgaagaaaattgaatcaagctactcgttatattgctctagttctcgcttttgtgcaatctatcgggattacagctggttttaataccttggctggagctcaattgattaaaactgctttaactccacaagtttttctgacgattggtatcatcttaacagctggtagtatgattgtcacttggttgggtgagcaaattacagataagggatacggaaacggtgtttccatgattatctttgccgggattgtttcctcaattccagagatgattcagggcatctatgtggactactttgtgaacgtcccaagtagccgtatcacttcatctatcattttcgtaatcattttgattattactgtattgttgattatttactttacaacttatgttcaacaagcagaatacaaaattccaatccaatatactaaggttgcacaaggtgctccatctagctcttaccttccgttaaaggtaaatcctgctggagttatccctgttatctttgccagttcgattactgcagcgcctgcggctattcttcagtttttgagtgccacaggtcatgattgggcttgggtaagggtagcacaagagatgttggcaactacttctccaactggtattgccatgtatgctttgttgattattctctttacattcttctatacgtttgtacagattaatcctgaaaaagcagcagagagcctacaaaagagtggtgcctatatccatggagttcgtcctggtaaaggtacagaagaatatatgtctaaacttcttcgtcgtcttgcaactgttggttccctcttccttggtgtgatttccattttaccgattgcagctaaagatgtatttggtctttctgatgttgttgcctttggtggaacaagtctcttgatcattatctctacaggtatcgaaggaatcaagcaattggaaggttacctattgaaacgtaagtatgttggtttcatggacagaacagaataa

SEQ ID NO: 9121 - DNA, 639 bp, Streptococcus pneumoniae
  CDS (1)...(639)
atgaatcttttgattatgggcttacctggtgcaggtaagggaactcaagcagcaaaaatcgtagaacaattccatgttgcacatatctcaacaggtgatatgttccgcgctgcaatggcaaatcaaactgaaatgggtgttcttgctaagtcatatattgacaagggtgaattggttcctgacgaagttacaaatggaatcgtaaaagaacgcctttcacaagatgatattaaagaaacaggattcttattggatggttacccacgtacaattgaacaagctcatgccttggacaaaacattggctgaacttggcattgaactagaaggtattatcaatattgaagtgaaccctgacagcctcttggaacgtttgagtggccgtatcatccaccgcgtaactggagaaactttccacaaggtctttaacccaccagttgactataaagaagaagattactaccaacgtgaagatgataagcctgagacagtaaaacgtcgtttggatgttaatattgctcaaggagaaccaatcattgctcactaccgtgccaaaggtttggttcatgacatcgaaggtaatcaagatatcaatgatgtcttctcagatattgaaaaagtattgacaaatttgaaataa

SEQ ID NO: 9122 - DNA, 219 bp, Streptococcus pneumoniae
  CDS (1)...(219)
gtggcaaaagacgatgtgattgaagttgaaggcaaagtagttgatacaatgccgaatgcaatgtttacggttgaacttgaaaatggacatcagattttagcaacagtttctggtaaaattcgtaaaaactatattcgtattttagcgggagatcgtgttactgtcgaaatgagtccatatgacttgacacgtggacgtatcacttaccgctttaaataa

SEQ ID NO: 9123 - DNA, 366 bp, Streptococcus pneumoniae
  CDS (1)...(366)
atggctcgtattgctggagttgatattccaaatgacaaacgcgtagtaatctcattgacttatgtttatggtatcggacttgcaacatctaagaaaattttggctgctgctggaatctcagaagatgttcgtgtacgtgatcttacatcagatcaagaagatgctatccgtcgtgaagtggatgcaatcaaagttgaaggtgaccttcgtcgtgaagtaaacttgaacatcaaacgtttgatggaaatcggttcataccgtggtatccgtcaccgtcgtggacttcctgtccgtggacaaaatactaaaaacaacgctcgcactcgtaaaggtaaagctgttgcgattgctggtaagaaaaaataa

SEQ ID NO: 9124 - DNA, 357 bp, Streptococcus pneumoniae
  CDS (1)...(357)
gtgaaaaagaatatcgaatctggtattgctcatattcacgctacatttaataacactattgttatgattactgatgtgcatggtaatgcaattgcttggtcatcagctggtgctcttggtttcaaaggttctcgtaaatctacaccattcgctgctcaaatggcttctgaagctgctgctaaatctgcacaagaacacggtcttaaatcagttgaagttactgtaaaaggtccaggttctggtcgtgagtcagctattcgtgcgcttgctgccgctggtcttgaagtaacagcaattcgtgatgtgactccagtgccacacaatggtgctcgtcctccaaaacgtcgccgtgtataa

SEQ ID NO: 9125 - DNA, 936 bp, Streptococcus pneumoniae
  CDS (1)...(936)
atgatcgagtttgaaaaaccaaatataacaaaaattgatgaaaataaagattatggcaagtttgtaatcgaaccacttgaacgtggctacggtacaactcttggtaactctcttcgtcgtgtacttctagcttctctaccaggagcagctgtgacatctatcaacattgatggtgtgttacatgagtttgacacagttccaggtgttcgtgaagacgtgatgcaaatcattctgaacattaaaggaattgcagtgaaatcgtacgttgaagacgaaaaaatcatcgaactggatgttgaaggtcctgctgaagtaacagctggtgacattttgacagatagcgatattgaaattgtaaatccagatcattatctctttacaatcggtgaaggttcttctctaaaagcgactatgactgttaacagtggtcgtggatatgtacctgctgacgaaaataaaaaggataatgcaccagttggaacacttgctgtagattctatttatacaccagttacaaaagtcaactatcaagtggaacctgctcgtgtaggtagcaatgatggtttcgacaaattaacccttgaaatcttgacaaatggaacaattattccagaagatgctttagggctttcagcacgtattttgacagaacatcttgatttgtttacaaatcttactgagattgctaagtcaactgaagtgatgaaagaagctgatactgaatctgacgaccgtattttagatcgtacgattgaggaactggacttgtctgtgcgttcatacaactgtttaaaacgtgccggtatcaatactgtgcatgatttgacagaaaaatctgaagcagagatgatgaaagtacgaaatcttggacgcaagagtttggaagaagtgaaactcaaactcattgatttgggtcttggattaaaagataaataa

SEQ ID NO: 9126 - DNA, 387 bp, Streptococcus pneumoniae
  CDS (1)...(387)
atggcttaccgtaaactaggacgcactagctcacaacgtaaagcaatgcttcgcgatttgacaactgaccttttgattaacgaatcaatcgtgacaactgaagctcgtgctaaagaaatccgtaaaactgttgaaaaaatgattactctaggtaaacgtggtgatttgcatgcacgtcgtcaagcagctgctttcgtacgtaatgaaatcgcatctgaaaactatgatgaagcaactgataagtacacttctactacagcacttcaaaaattgttctcagaaatcgcacctcgttatgctgaacgtaacggtggatacactcgtatccttaaaactgaaccacgtcgtggtgatgcagcgccaatggcgatcatcgaattagtataa

SEQ ID NO: 9127 - DNA, 636 bp, Streptococcus pneumoniae
  CDS (1)...(636)
atgttcacaggaataattgaagaaatcggaaaagttgaaagaatacagaaagactctcgtaattgtaaactatcaattaaagcctcaaaaatattaacggatatccatttaggcgatagtatagcagtaaatggtatctgtcttacagttactcatttcaatcatcaatcctttacagttgatgtaatgaatgaaacatggagtcgaacagctcttactctattaaaacatggaagtgaggtgaatctagaaagagccttatctgtcaacggtcgacttgggggtcacgtcgttacaggacacattgatggtacaggaaaaatctcgtcaataaaaaaagatgataatgctgtatggcatcaaatcaacacacaaaaagaaattttagatttaatagttgaaaaaggatctattacaattgacggcattagtctgactgtcgctaaagtctccaaagtaaacttttcagtatctgttatccctcataccttggaacaaaccattcttaagagtaaacaagtcgggagtacagtaaatcttgaaaatgatatcttaggtaaatatgtgcaaaaactgatggataactctccaaaatcagaaatatctaaggaactattatatcaaaatggattttag

SEQ ID NO: 9128 - DNA, 1794 bp, Streptococcus pneumoniae
  CDS (1)...(1794)
atgagtttttataatcataaagaaattgagcctaagtggcagggctactgggcagaacatcatacatttaagacaggaacagatgcatcaaaacctaagttttatgcgcttgatatgttcccttatccgtctggagttggtctgcacgtaggacacccagaaggttatactgcaaccgatatcctcagtcgttacaaacgtgcgcaaggctacaatgtccttcacccaatgggttgggatgcttttggtttgcctgcagagcaatacgctatggatactggtaatgacccagcagaatttacagcggaaaacattgccaacttcaaacgtcaaatcaatgcgcttggattttcttatgactgggatcgtgaagtcaacacaacagatccaaactactacaagtggactcaatggattttcaccaagctttacgaaaaaggcttggcctatgaagctgaagtgccagtaaactgggttgaggaattgggaactgccattgccaatgaagaagtgcttcctgacggaacttctgagcgtggaggctatccagttgtccgcaaaccaatgcgccaatggatgctcaaaatcacggcttacgcagagcgcttgctcaatgacttagatgaactagattggtcagagtctatcaaggatatgcaacgcaactggattggtaaatcaactggtgccaatgtaactttcaaagtaaaaggaacagacaaggaatttacagtctttactactcgtccggacacacttttcggtgcgactttcactgtcttggctcctgaacatgaattagtagacgctatcacaagttcagagcaagcagaagctgtagcagactataaacaccaagccagccttaagtctgacttggttcgtacagaccttgctaaggaaaaaactggtgtttggacaggtgcctatgccatcaaccctgtcaatggtaaggaaatgccaatctggattgcggactatgttcttgctagttatggaacaggtgcggttatggctgtgcctgcccacgaccaacgtgactgggaatttgccaaacaatttgaccttccaatcgtcgaagtacttgaaggtggaaatgtcgaagaagctgcctacacagaggatggcctgcatgtcaattcagacttcctagatggattgaacaaagaagacgctattgccaagattgtggcttgcttggaagaaaaaggctgtggtcaggagaaggttacctaccgcctccgcgactggctctttagccgtcaacgttactggggtgagccaattccaatcattcattgggaagatggaacttcaacagctgttcctgaaactgaattgccgcttgtcttgcctgtaaccaaggatatccgtccttcaggtactggtgaaagtccactagctaacttgacagattggcttgaagtgactcgtgaagatggtgtcaaaggtcgtcgtgaaactaacaccatgccacaatgggctggttcaagctggtactacctccgctatattgacccgcacaatactgagaaattggctgatgaggacctcctcaaacaatggttgccagtagatatctacgtgggtggtgcggaacatgctgtacttcacttgctttatgctcgtatctggcataaattcctctatgacctcggtgttgttccgactaaggaaccattccaaaaactctttaaccaagggatgattttgggacaagctaccgtgaccaccgtggtgctcttgtggcaaccgacaaggttgaaaaacgtgatggttccttctttcatatag

SEQ ID NO: 9129 - DNA, 759 bp, Streptococcus pneumoniae
  CDS (1)...(759)
atgtttggattttttaagaaagataaggctgtggaagtagaggttccgacacaggttcctgctcatatcggcatcatcatggatggcaatggccgttgggctaaaaaacgtatgcaaccgcgagtttttggacacaaggcgggcatggaagcattgcaaaccgtgaccaaggcagccaacaaactgggcgtcaaggttattacggtctatgctttttctacggaaaactggacccgtccagatcaggaagtcaagtttatcatgaacttgccagtagagttttatgataattatgtcccggaactacatgcgaataatgttaagattcaaatgattggggagacagaccgcctgcctaagcaaacctttgaagctttaaccaaggctgaggaattgactaagaacaacacaggattgattcttaattttgctcttaactatggtggacgtgctgagattacacaggcgcttaagttgatttcccaggatgttttagatgccaaaatcaacccaggtgacatcacagaggaattgattggtaactatctctttactcagcatttgcctaaggacttacgagacccagacttgattatccgtactagtggagaattacgtttgagcaatttccttccatggcagggagcctatagtgagctttattttacggacaccttatggcctgattttgacgaagcggccttgcaggaagctattcttgcctataatcgtcgtcatcgccgatttggaggagtttag

SEQ ID NO: 9130 - DNA, 1854 bp, Streptococcus pneumoniae
  CDS (1)...(1854)
atgaaacaaagtaaaatgcctatcccaacgcttcgcgaaatgccaagcgatgctcaagttatcagccatgctcttatgttgcgtgctggttatgttcgccaagtttcagcaggtgtttattcttatctaccacttgccaaccgtgtgattgaaaaagctaaaaacatcatgcgccaagaattcgaaaagattggtgctgttgagatgttggctccagcccttcttagtgcagaattgtggcgtgaatcaggtcgttacgaaacctatggtgaagacctttacaaactaaaaaaccgtgaaaaatcagactttatcttaggtccaactcacgaagaaacctttacagctattgtccgtgattctgttaaatcttacaagcaattgccactcaacctttatcaaattcagcccaagtatcgtgatgaaaaacgcccgcgtaatggacttcttcgtacacgtgagtttatcatgaaggatgcttatagtttccacgctaactatgatagtttggatagtgtttatgatgagtacaaagcagcctatgagcgtattttcactcgtagtggtttagacttcaaggctattattggtgacggtggagccatgggtggtaaggatagccaagaatttatggccattacatctgctcgtacagaccttgaccgctgggttgtcttggacaagtcagttgtctcatttgacgaaattcctgtagaagtgcaagaagaaatcaaggcagaattgctcaaatggatagtctctggtgaagataccattgcttactcaagtgagtctagctatgcagctaacttagaaatggcaacaaacgagtacaaaccaagcaaccgtgttgtcgctgaagaagaagttactcgtgttgcaacgccagatgttaaatcaattgatgaagttgcagccttcctcaatgttccagaagaacaaacgattaaaaccctcttctacattgcagatggtgagcttgttgcagcccttctagttggaaatgaccaactcaacgaagtcaagttgaaaaatcacttgggagcagatttctttgacgttgctagcgaagaagaagtggcgaatgttgttcaagcaggatttggttcacttggaccagttggtttgccagagaatattaaaattattgcagatcgtaaggtacaagatgttcgcaatgcagttgtcggtgctaacgaagatggctaccacttgactggtgtgaacccaggccgtgattttactgcagaatatgtggatatccgtgaagttcgtgagggtgaaatttccccagatggacaaggtgtccttaactttgcgcgtggtattgagatcggtcatattttcaaactcggaactcgctattcagcaagcatgggagcagatgtcttggatgaaaatggtcgtgctgtgccaatcatcatgggatgttacggtatcggtgtcagccgtcttctttcagcagtgatggagcaacacgctcgcctctttgttaacaaaacgccaaaaggtgaataccgttacgcttggggaatcaatttccctaaagaattggcaccatttgatgtgcatttgattactgtcaatgtcaaggatgaagaagcgcaagccttgacagaaaaacttgaagcaagcttgatgggagctggttatgaagtcttgacagatgaccgtaacgaacgtgtcggtgttaaatttagcgatagtgacttgattggtcttccaatccgtatcactgttggtaaaaaagcggccgatggcattgtagaagttaagatcaaggcaactggtgacaccattgaggttcatgcagataacgtgcttgaaacgcttgaaatcctaagcaagaaataa

SEQ ID NO: 9131 - DNA, 1380 bp, Streptococcus pneumoniae
  CDS (1)...(1380)
atgctaagatttccaaaggattttgtctggggatcctctacttctggaccgcagacagaaggacgtgtagctggtgacggtaagggagacaatctctgggattactggttccaagtggagccaaatcgttactataatgggattggttcagataagacatcgactttttatgaaaattgggagcgggatattgagcttttgttagagactggtcacacagtctttcggacttctattcagtggtcacggatttttccacaaggctgtggaaaagtcaaccctcaaggtgtggatttttatcgtaaggtctttgaggctattaaggctaaaggaattcgtctgttagtcaatctctatcattttgatttaccttttgcccttcaagaggatggtgatggttgggaaaataaggcgacagtctcagcctatgaagactatgctcgtttttgttttgagacttatggagatttagtggatcaatggattacctttaacgagcccatcgttcctgtagaatttggttatttttatgatgcccattatccacataaggtggatgcagaggcagctgttaaggtagcctatcatacacaattggccagcagccgggctgttaaggcttgccatgaacttttgcctgattccaagattgggattgtcctcaacttgacaccggcttatccacgtagccagcatcctgctgatgtcaaggcagctcgtattgcggccctttttcaggcccaatctttcttagatccatctgtcttggggacttatccacaggagttggtagaaatcttgcatgaacacggtcttttacctgatgctacagaggaagagttggaactcattcgtgataatacggtggacttccttggtgtgaactactatcaacctttgcgtgttatggctcctcgatttgctaagcatccagagagtccactcttaccagaacatttttacgagccttatgtgatgcctggacgtaaaatcaattctcatcgtggttgggagatttatgagcaagggatttatgacatcgcccaaaatatcaaggaaaattatggcaatattgagtggatgttgactgagaatggtatgggtgttgaaggggaagaaaaattccgtcaagatggaatgattcaagatgattaccgtattgactttgtaaaaggtcatcttcgtgaacttcaccgtgccattgaagatggtgccaactgtaagggctacttgatttggacctttattgactgctggtcatggctcaacagctataaaaatcgctatggtttggtcgaattagacttggaaacgcaagaacgtcgtctgaagaaatcaggccactggttcaaagaattaagcgataataatggattttaa

SEQ ID NO: 9132 - DNA, 1797 bp, Streptococcus pneumoniae
  CDS (1)...(1797)
atgtgtggaattgttggtgttgttggaaacacaaatgcaactgatattttgattcaagggcttgaaaagcttgaataccgtggctatgattctgcgggaatttttgtcctagatggtgctgataaccatttggtgaaggctgttggtcgtatcgcagaattgtctgccaagacagctggtgttgagggaacaactggtatcggacatactcgttgggcaactcatgggaaaccaacggaagacaatgctcacccacaccgctctgagacagaacgttttgtcttggttcacaatggggtgattgaaaactaccttgaaattaaagaagaataccttgctgggcaccacttcaaagggcaaacagatacggaaatcgccgtacatttgattggaaaatttgcggaagaagacggtctctcagttcttgaagcctttaaaaaagctcttcatattatccgtggttcatatgcctttgccttgattgactctgaaaatccagatgtcatctatgtagcgaaaaacaaatctccacttttgattggtcttggggaaggctacaatatggtctgctcagatgctatggctatgattcgtgaaaccaaccaatacatggaaattcatgaccaagagttggtaatcgtcaaggctgatagcgtggaagttcaagactatgatggtaacagtcgtgaacgtgctagctatactgcggaacttgacttgtcagatatcggtaagggaacttatccttactacatgcttaaggaaattgatgagcaaccaactgttatgcgtaaactcattcaagcctacacggatgatgctggtcaagtagtgattgatcctgctatcattaaggctgttcaagacgcagaccgcatctacatccttgcagctggaacatcttaccatgcaggatttgcttctaagaaaatgttggaagaattgacagatacaccagttgaacttggcatctcatctgagtggggctacggtatgccacttctcagcaagaaaccactcttcatctttatcagccaatctggtgaaacagcggatagtcgtcaagttttggtcaaggctaatgaaatgggaattccaagcttaacagtgacaaacgttccaggttcaaccctctcacgtgaagccaactataccatgctccttcacgcaggtcctgaaattgccgtggcatcaactaaagcctatacagcgcaaatcgcagcccttgccttccttgcaaaagcagtcggagaagcaaatggtaatgctaaagcgcaagcctttgacctggttcatgaattgtcaatcgtagctcagtctatcgaatcaactctttcagagaaagaaaccattgaagccaaggttcgtgaacttcttgaaacaactcgtaacgccttttacatcggacgtggtcaagattactacgtagccatggaagcaagtctcaaactcaaagagatttcttatatccagtgtgaaggttttgcggcaggagaactcaagcacggaaccattgccttgattgaagaaggaacacctgtcttggctctcttgtcagatccagtccttgccaaccacactcgtggaaatatccaagaggtggcagcccgtggtgctaaggtcctcactatcgcagaagaaaatgttgctaaagataccgacgatatcgtccttacgactgtacacccttacctctcaccaatttcaatggggtaccgacgcaattggttgcttactttgcaaccctccaccgtggcctcgatgtggataaaccacgtaaccttgctaaatcagtaa

SEQ ID NO: 9133 - DNA, 414 bp, Streptococcus pneumoniae
  CDS (1)...(414)
atgcctacaattaaccaattggttcgcaaaccgcgtaaatcaaaagtagaaaaatctaaatcaccagctttgaacgttggttacaatagtcataaaaaagttcaaacaaacgtttcttcaccgcaaaaacgtggtgttgcaactcgtgttggaacaatgacacctaaaaaacctaactcagcccttcgtaaattcgctcgtgtacgtttgagcaaccttatcgaagttactgcctacatcccaggtatcggacacaacttgcaagagcacagcgtggtgcttcttcgcggtggacgtgtaaaagaccttccaggggtacgttaccatatcgtccgtggtgcacttgatactgcaggtgttaacgatcgtaaacaaggccgttctaaatacggtactaaacgtccaaaagcataa

SEQ ID NO: 9134 - DNA, 471 bp, Streptococcus pneumoniae
  CDS (1)...(471)
atgagtcgtaaaaatagagctccaaaacgtgacgtattgccagatccgctatacaattcacaactagttactcgtcttatcaaccgcgttatgcttgatggtaaacgtggtactgctgcttcaattgtttacggtgcttttgagcaaatcaaagaagctactggcaacgatgcacttgaagtatttgaaacagctatggaaaacatcatgcctgtacttgaagtacgtgcacgtcgtgttggtggttctaactaccaagtcccagttgaagttcgtccagaacgtcgtacaacacttggacttcgttggttggtaacaatcgctcgtcttcgtggtgaacacacaatgcaagaccgtcttgcaaaagaaatcttggatgctgctaacaacactggtgcagctgttaagaaacgtgaagatactcaccgtatggctgaagctaaccgtgcattcgcacacttccgttggtaa

SEQ ID NO: 9135 - DNA, 2082 bp, Streptococcus pneumoniae
  CDS (1)...(2082)
atggcacgcgaattttcacttgaaaaaactcgtaatatcggtatcatggctcacgtcgatgccggtaaaacaacaactactgagcgtattctttactacactggtaaaatccacaaaatcggtgaaactcacgaaggtgcgtcacaaatggactggatggagcaagagcaagaacgtggtatcacgatcacatctgctgcgacaacagctcaatggaacaaccaccgcgtaaacatcatcgacacaccaggacacgtggacttcacaatcgaagtacaacgttctcttcgtgtattggatggtgcggttaccgttcttgactcacaatcaggtgttgagcctcaaactgaaacagtttggcgtcaagcaactgagtacggagttccacgtatcgtatttgccaacaaaatggacaaaatcggtgctgacttcctttactctgtaagcacacttcacgatcgtcttcaagcaaatgcacacccaatccaattgccaatcggttctgaagatgacttccgtggtatcattgacttgatcaagatgaaagctgaaatctatactaacgaccttggtacggatatccttgaagaagacatcccagctgaataccttgaccaagctcaagaataccgtgaaaaattgattgaagcagttgctgaaactgacgaagaattgatgatgaaatacctcgaaggtgaagaaatcactaacgaagaattgaaagctggtatccgtaaagcgactatcaacgttgaattcttcccagtattgtgtggttcagccttcaaaaacaaaggtgttcaattgatgcttgatgcggttatcgactaccttccaagtccacttgacatcccagcaatcaaaggtattaacccagatacagacgctgaagaaattcgtccagcatctgacgaagagccatttgcagctcttgccttcaagatcatgactgacccattcgtaggtcgtttgacattcttccgtgtttactcaggtgttcttcaatcaggttcatacgtattgaatacttctaaaggtaaacgtgaacgtatcggacgtatccttcaaatgcacgctaacagccgtcaagaaatcgacactgtttactcaggtgatatcgctgctgccgttggtttgaaagatactacaactggtgactcattgacagatgaaaaagctaaaatcatccttgagtcaatcaacgttccagaaccagttatccaattgatggttgagccaaaatctaaagctgaccaagacaagatgggtatcgcccttcaaaaattggctgaagaagatccaacattccgcgttgaaacaaacgttgaaactggtgaaacagttatctcaggtatgggtgaacttcaccttgacgtccttgttgatcgtatgcgtcgtgagttcaaagttgaagcgaacgtaggtgctcctcaagtatcttaccgtgaaacattccgcgcttctactcaagcacgcggattcttcaaacgtcagtctggtggtaaaggtcaattcggtgatgtatggattgaatttactccaaacgaagaaggtaaaggattcgaattcgaaaacgcaatcgtcggtggtgtggttcctcgtgaatttatcccagcggttgaaaaaggtttggtagaatctatggctaacggtgttcttgcaggttacccaatggttgacgttaaagctaagctttatgatggttcatatcacgatgtcgactcatctgaaactgccttcaagattgcggcttcactttcccttaaagaagctgctaaatcagcacaaccagctatccttgaaccaatgatgcttgtaacaatcactgttccagaagaaaaccttggtgatgttatgggtcacgtaactgctcgtcgtggacgtgtagatggtatggaagcacacggtaacagccaaatcgttcgtgcttacgttccacttgctgaaatgttcggttacgcaacagttcttcgttctgcatctcaaggacgtggtacattcatgatggtatttgaccactacgaagatgtacctaagtcagtacaagaagaaattattaagaaaaataaaggtgaagactaa

SEQ ID NO: 9136 - DNA, 1242 bp, Streptococcus pneumoniae
  CDS (1)...(1242)
atggttttaccaaattttaaagaaaatctagaaaaatatgcgaaattgttggttgcgaacggaattaacgtgcaacctggtcacactttggctctctctattgatgtggagcaacgtgaattggcacatctaatcgtgaaagaagcttatgccttgggtgcgcatgaggtcatcgttcagtggacagatgatgtgattaaccgtgagaaattcctccatgccccgatggagcgtttggacaatgtgccagaatacaagattgctgagatgaactatctcttggagaacaaggctagccgtcttggagttcgttcatctgatccaggtgccttgaacggagtggacgctgacaagctttcagcttctgctaaagctatgggacttgccatgaagccaatgcgaatcgcaactcaatctaacaaggttagctggactgtagcagccgctgctggacttgagtgggctaagaaagtcttcccaaatgctgcgagcgacgaagaagcagtcgatctcctttgggaccaaatcttcaaaacttgccgtgtctacgaagcagatcctgttaaggcctgggaagagcatgcagccattctcaagagcaaggccgatatgcttaataaggagcaattttcagcccttcactacacagcgccaggaacagatttaacacttggtttgccaaagaaccacgtttgggaatcagctggtgctgtcaatgcacagggcgaaggattcttgccaaatatgccgacagaagaggtcttcacagcgcctgacttccgtcgtgcagatggttatgtcacttctacaaaaccgcttagctacaacggaaatatcattgaaggcattaaggtgatctttaaggatggacaaatcgtagatatcactgctgagaagggtgatcaggttatgaaagaccttgtctttgaaaatgcgggtgcgcgtgccttgggtgaatgtgccttggtaccagatccaagtccaatttctcagtcaggcattaccttctttaacacccttttcgatgaaaatgcgtcaaaccacttggctatcggtgcagcctatgcgactagccttgttgatggagcggagatgagcgaagaggagcttgaagctgcagggcttaaccgttcagatgttcacgtagactttatgattggttctaaccaaatggatatcgatggtattcgtgaggatggaacgcgggtacctcttttccgtaatgggaattgggcaaattaa

SEQ ID NO: 9137 - DNA, 1020 bp, Streptococcus pneumoniae
  CDS (1)...(1020)
atggaaaatcttgtgaaaagcacaagcgatacatatataccggaggaaatcatgtctttttctgatttaaagctgtttgccctttcttctaataaagaattggcagaacgtgtggcgcaggagattgggatagagttggggaaatcaagtgttcgccaattttcagatggagagattcaggtcaacattgaagaatcaatccgtgggaaacacgtctttatcttacaatcaactagttcgcctgtaaatgacaatctgcttgaaattttgattatggtagatgctttgaagcgtgcgagtgcagagtctgtcaatgttgtcatgccttactatgggtatgcacgtcaggatagaaaggcgagagcgcgtgagccaatcacttcaaaacttgtcgcaaatatgcttgaagtagctggagtggatcgtttattgaccatcgacttgcatgctgcgcaaattcaaggattctttgatattcctgtggatcatttgatgggtgctcctctaattgcagattattttgagcggcgtggtatggttggttctgactatgtggttgtcagcccggaccatggaggggtgactcgtgctcgtaagttggcagaatttttgaaaacatctatcgctattattgataaacgtcgtagcgttgataagatgaatactagtgaagttatgaacatcatcggtaaggttgaaggcaagacttgtatcttgattgatgatatgattgataccgctggaacgatttgtcatgcggcagatgctcttgcggaagctggtgctgttgaagtctatgcaagctgtacgcacccagttctttctggtcctgctacggacaatatccaaaaatcagctattaagaaattggttgttttggataccatctatctgccagaagagcgtttgattgataagattgagcagatttcaatcgctcatctcctaggggatgctatcgtacgtattcatgaaaaacgaccactttctccacttttcgatattgagaaaaaaatttaa

SEQ ID NO: 9138 - DNA, 2670 bp, Streptococcus pneumoniae
  CDS (1)...(2670)
atggtattttttgattctttcctttataatgggtgtatggataagaaaaaattattattgattgatgggtcttctgtagcttttcgggcgttttttgcgctgtatcagcagttggaccgttttaagaatgcggctggtttgcataccaatgcgatttatggttttcagttgatgttgagtcatttgttggagcgggttgagccgagtcatattttggtggcttttgatgcgggaaagacgaccttccggacagagatgtatgcggactataagggtggtcgggccaagactcctgatgagtttcgtgagcaatttcctttcattcgtgagttgctggatcatatggggattcgtcactatgagctggctcagtatgaggcggatgacatcattgggacgctggataagctagcagagcaggatggttttgatattaccattgtcagtggggacaaggatttgattcagctgacggatgagcatacggtggttgaaatttccaagaaaggtgtggctgagtttgaggcctttacgccagattacctcatggaagaaatgggcctcacaccagctcagtttatcgatctcaaggcgctcatgggtgataagtcggataatatccctggggtgaccaaagtcggtgaaaagacgggtattaagctcttgctggagcatggttcgcttgaggggatttatgaaaatattgatggaatgaagacttctaagatgaaggaaaatctcatcaatgacaaggaacaggcctttttgtctaaaacactagcgaccattgataccaaggcaccgattgcgattggtttagaggacttggtctatagtggtccagatgttgaaaatcttgggaaattctacgatgagatgggcttcaaacagctcaagcaggctttaaatatgtcgtcagctgatgtggctgagggtttggattttactattgttgaccaaatcagtcaagatatgctgagtgaagagtctatcttccactttgagctttttggtgagaattaccatacagataatttggttggatttgcctggtcttgtggggatcagctctatgccacagacaagcttgagctgttgcaagacccgattttcaaggatttcttagaaaaaacatctctgagagtttatgactttaagaaggttaaagttcttttgcaacgttttggtgtagatttgcaggcgcctgcttttgacatccgtttggctaaatacctcctttcgactgtggaggacaatgaaattgcgaccatcgctagtctttatggtcagacttacttggttgatgatgaaactttctacggtaagggtgttaaaaaggccattcctgaacgtgagaaattcttggaacacttagcttgtaaacttgctgttttggtagaaacagagcctattttacttgaaaaactcagcgaaaatgggcaattagagcttctttatgatatggagcaacctctggcttttgtccttgccaagatggaaattgctgggattgtggtcaagaaagagaccttgcttgagatgcaggctgaaaatgagcttgtcattgaaaaactgactcaagagatttacgagctggctggtgaggagtttaatgtcaactcgcctaagcagttgggcgtgcttctctttgagaaattgggacttcctctagaatacactaagaaaaccaagacaggttattcgacagcagtggatgttttggagcgtctcgctcctattgctccgattgttaagaaaatcctggattaccgtcaaattgctaagattcaatctacttatgtaattggcttgcaggactggattttggctgatggaaagattcatactcgctatgtgcaggatttgacccagaccgggcgtttgtctagtgtggatccaaacttgcaaaatattcctgcccgattggaacaggggcgcttgattcggaaggcttttgtgccagagtgggaggatagtgtgctactcagctctgactattcacagattgaattgcgcgttttggcgcatatttctaaggatgagcacttgattaaggccttccaagagggggcagatatccatacttcgacagccatgcgggtctttggcattgagcgtcctgataatgtgactgcaaatgaccgtcgcaatgccaaggcagttaactttggagtggtttatgggatttcagactttggcttgtctaataatttgggaattagtcgtaaggaagctaaagcctacattgatacctactttgaacgttttccaggtattaaaaactacatggatgaagtggtgcgggaggcgcgtgataagggctatgtagagaccctctttaagcgtcgccgtgagttgccagatatcaattcgcgcaacttcaatattcgtggttttgcggagcgaactgctatcaactcacctatccagggttcggcagcagatattctcaagattgccatgattcagctagataaagccttggttgcaggtggttatcagactaagatgctgttacaagtgcacgatgaaatcgtccttgaagtgcctaaatctgaattggtagagatgaaaaaattggtgaaacaaaccatggaagaagccattcaactcagtgttcctcttatcgcagatgagaatgaaggggcaacctggtacgaggctaaataa

SEQ ID NO: 9139 - DNA, 1329 bp, Streptococcus pneumoniae
  CDS (1)...(1329)
atgtatgtgagaaaggaagagcctgagggctcagacaagattatgacttcagttgttgttgtaggtacccaatggggtgatgaaggtaaagggaagattacagacttcctttcagcgaatgcagaagtgattgcacgttaccaaggtggtgataatgctggtcacacgattgtgattgacggtaagaaatttaagttgcacttgattccatctgggattttcttccctgaaaaaatatctgtcattgggaatggtatggttgtaaatcctaaatctcttgtaaaagagttgagctatcttcatgaggaaggtgtaacaactgataacttgcgtatttctgatcgtgcgcatgttattttgccttatcatatcgagttggatcgcttgcaagaagaagctaagggcgacaataagattggtacgacaattaagggaattggtccagcttatatggacaaggctgctcgtgttggaattcgtattgcagatcttttagataaagatattttccgtgagcgtttagaacgtaaccttgctgaaaagaatcgtctttttgaaaaattgtatgacagtaaagcgattgttttcgatgatatttttgaagaatattacgaatatggtcaacaaatcaagaaatacgtgatagatacatctgttatcttgaatgatgcgcttgataatggcaaacgtgtgctttttgaaggtgcacaaggtgttatgctagatatcgaccaaggtacttatccatttgttacgtcatcaaaccctgtagctggtggtgtgacaattggttctggtgtcggtccaagcaagattgacaaggttgtaggtgtatgtaaagcttatacgagtcgtgtaggagatggtcctttcccaactgagttgtttgatgaagtgggagaacgtatccgtgaagtgggtcatgagtatggtacaacaactggtcgtccacgtcgtgtaggttggtttgactcagttgtgatgcgtcatagccgtcgtgtttctggtattactaacctttctttgaactctattgatgttttgagcggtttggatactgtgaaaatctgtgtggcctatgatcttgacggtcaacgtattgactactatccagctagtcttgagcaattgaaacgttgcaagcctatctatgaagagttgccaggttggtcagaagatattaccggagttcgcaatttggaagatcttcctgagaatgcgcgtaactatgttcgtcgtgtgagtgaattggttggcgttcgtatttctactttctcagtaggtcctggtcgtgaacaaacaaatattttagaaagtgtttggtcctaa

SEQ ID NO: 9140 - DNA, 1299 bp, Streptococcus pneumoniae
  CDS (1)...(1299)
atgatcaaccgttactctcgccctgagatggcgaatatttggagtgaagaaaataaataccgtgcttggcttgaggtggaaatcctctctgacgaggcatgggctgagttgggggaaatccctaaggaagatgtggctttgattcgcaagaaggcggactttgacatcgaccgtattttggaaattgagcaggagacgcgccacgatgtggtggctttcacgcgtgcggtttctgagactcttggtgaagagcgcaagtgggttcactatgggttaacttctaccgacgtggtggatactgcttatggttacctctacaagcaggccaacgacatcatccgtcgtgaccttgaaaacttcactaatatcatcgctgacaaggccaaggagcacaagttcaccatcatgatggggcgtactcatggtgtgcacgctgagccgacaacttttggtcttaaattggcaacttggtatagcgaaatgaaacgcaatatcgagcgtttcgagcatgcggctgctggtgtagaagctggtaagatttctggtgcggttgggaactttgccaatatcccaccatttgtagaggagtatgtctgcaacaagcttggtatccgtgctcaagaaatctctacacaagtccttcctcgtgaccttcacgctgagtactttgcagttcttgccagcattgcgacttcaatcgaacgtatggcgactgagattcgtggtctacaaaaatctgagcaacgcgaagtagaagagttctttgctaaagggcaaaaagggtcttcagcaatgcctcacaaacgcaacccaatcggttctgaaaatatgactggtctggcgcgtgtcattcgtggtcacatgattacggcttatgaaaacgtcgctctctggcacgaacgcgatatttcccactcatcagctgagcgtatcatcacaccagatacgaccattttgattgactacatgctcaaccgttttggaaatatcgtcaagaacttgacagtcttcccagaaaatatgatccgaaacatgaactcgacttttggtcttatctttagccaacgggctatgttgacattgattgaaaaaggcatgacccgtgagcaagcctatgacttggtgcaaccaaaaacagcctactcttgggacaaccaagtagactttaaaccacttcttgaggcagattcagaagtaacatcacgtctcactcaagaagaaatcgatgaaatcttcaacccagtttattacaccaaacgagtggatgatatctttgaacgtcttggactaggtgattaa

SEQ ID NO: 9141 - DNA, 855 bp, Streptococcus pneumoniae
  CDS (1)...(855)
atgacctatgaatataagagtctcatttatttggcagagacagctttaaatgtaaaggatttggccagtcaaacagccttttatcagcaagttattggtttagaaatcttatctcaaactgagacagagtccattctaggccttggtggaaaagtcttggtacagctgattcaagcacaagagagcggagaagtgagggaacattatggtctttaccatttggccattctcttgcccacacgcaaggctttggctgatgtcttgaaacacctgacagatttgcaaattcctcttgtcggcggtgcagaccatggttacagtgaagctatttacttggaagatttggagggaaatggcattgaactctatcgagataagccagtttccacatgggatattcgagaagatggacgcattatcggagtgacggaggctcttgcggcgcaggacatttatgagttgggggaaagagtagagccctttatcctggcagaaggtacaagaatggggcatattcatctttccgtcaaggatagtcgaaagtccagccagttttatcaaaaggtgttagggctagaggataaattcagtgtgcctagcgctagttggattgcggctgaagattaccatcatcatttagcagttaacgaatggagaggaaaaggtctggcttcgcgtaagcaaggcttaccaggtttagcctactatgtcatcgaagtcgcacataaaaaagaactgttaacgattgcccaacgagcacaagaagttgacgcaccaatcaaatggatgacatcgagcaaattggaaatcacagactcagatggcatcgtgacccgtattcgtttagcaaggtaa

SEQ ID NO: 9142 - DNA, 612 bp, Streptococcus pneumoniae
  CDS (1)...(612)
atgtcacgttatacaggaccatcttggaaacaagctcgtcgccttggcctttcacttacaggtacaggtaaagaattggcacgtcgtactacgtaccaggacaacacggaccaaacaaccgttctaaattgtcagaatacggtttgcaattggctgaaaaacacaaaacttcgtttcacttacggtgtaggtgaaaaacaattccgtaacttgttcgtacaagctacaaaaatcaaaggcggaatcctaggtttcaactttatgcttcttttggaacgtcgtttggataacgttgtttaccgtcttggtctcgcgactactcgtcgtcaagctcgtcaattcgtaaaccacggtcacatccttgttgacgggaaacgcgttgatatcccatcataccgcgtaactccaggtcaagtgatctcagttcgtgaaaaatcattgaaagttccagcaatccttgaagcagtagaagctactcttggacgtccagcattcgtatcattcgacgctgaaaagttggaaggttcattgactcgcttgccagaacgcgacgaaatcaacccagaaatcaacgaagcacttgtcgttgaattctacaacaaaatgttgtaa

SEQ ID NO: 9143 - DNA, 1263 bp, Streptococcus pneumoniae
  CDS (1)...(1263)
gtggaagaggttgaggttgccgaagttaagaatgcgcgtgtgtccttgacaggtgagaaaaccaagcccatgaaactagctgaggtgacttccatcaatgtcaatcgaaccaagacggagatggaggaattcaaccgtgtgcttggaggcggagtggtaccaggaagtctcgtccttatcggtggggatcctgggattgggaaatcaactcttctcctacaagtctcaacccagttgtcccaagtggggacagttctctatgtcagtggggaggagtctgcccagcagattaaactacgtgcagagcgcttaggtgatattgatagtgagttttatctctatgcagagaccaatatgcagagtgttcgtgcagaagtggagcgtatccagccagactttctcattattgattccatccagaccatcatgtctcctgagatttcaggggtgcaggggtctgtttctcaggtgcgtgaagtgaccgctgaactcatgcagttggccaagaccaataacattgccatctttatcgtaggtcatgtgaccaaagaaggaaccttggctgggcctcgtatgttggagcatatggtggatacggtgctttactttgaaggggagcgtcaccacacctttcgtattttgagagcggtcaaaaatcgttttggttccactaatgagattgggatttttgagatgcagtcgggcggcttggttgaggtactcaatccgagtcaagttttcctagaagagcgtttggatggggcgactggttcctccatcgttgtaaccatggaagggacgcgtccgattttggcggaggttcaggctttggtaacaccgaccatgtttggaaatgccaagcgtactacgacaggacttgattttaaccgtgctagcttgattatggctgttttggaaaaacgggcagggcttctcttgcaaaatcaggatgcctatctcaaatctgctggtggtgttaaattggatgaacctgcgattgacttggctgttgcagttgctattgcttcgagctacaaagacaagccaactaatcctcaggaatgttttgtcggagaactgggcttgacaggagagattcggcgcgtgaatcgtattgagcaacgcatcaacgaagctgctaaactgggctttactaagatttatgtacctaagaattccttgacaggaatcactctgcctaaggaaattcaggtcattggcgtgacaacgattcaggaagttttgaaaaaggtctttgcataa

SEQ ID NO: 9144 - DNA, 987 bp, Streptococcus pneumoniae
  CDS (1)...(987)
atggcaaaagatattcgtgtcttactttactacctttatactccaattgaaaatgcagagcaatttgctgcagaccacttggctttctgtaaatcaatcggccttaaaggccgtatcctagtcgctgacgagggaattaacggaacagtttcaggtgactatgaaacaactcaaaaatacatggactacgttcacagccttccaggaatggaagaactctggttcaagattgacgaagaaaatgaacaagccttcaagaagatgtttgttcgctacaagaaagaaattgtccaccttggtttggaagacaacgactttgacaatgacatcaacccacttgaaacaacaggtgcttacttgtctccaaaagagttcaaagaagcgcttcttgataaagataccgttgtccttgacacacgtaacgattatgagtacgacctaggacatttccgtggggctattcgcccagatattcgcaacttccgtgagttaccacaatgggtccgtgataacaaggaaaaattcatggacaagcgtgtcgtggtttactgtacaggtggcgttcgctgtgagaaattctcaggctggatggtccgtgaaggctacaaagatgtcggccaattgcacggaggaatcgcaacttacggtaaagacccagaagttcaaggtgagctttgggatgggaaaatgtacgtctttgacgagcgtattgccgttgatgtcaaccatgtcaacccaaccatcgtagggaaagactggtttgatggaacaccatgtgaacgttatgtcaactgtggaaatcccttctgtaaccgtcgtatcttgacatcagaagaaaatgaagacaagtaccttcgtggatgctcacacgagtgccgtgttcacccacgtaaccgctatgtttcaaaaaatgaattgacacaagctgaagtgattgagcgcctagccgctatcggtgaaagcttggatcaggcagctactgtataa

SEQ ID NO: 9145 - DNA, 1851 bp, Streptococcus pneumoniae
  CDS (1)...(1851)
atgaataaaaaactaacagattatgtgattgatctggtggaaattttaaataaacaacaaaagcaggttttctggggaatatttgatattttcagtatggtggtttccatcattgtatcttatatcttattctacggcttgattaatccagcacctgttgactacattatctatacgagtttggccttcctgttctatcaattgatgattggtttttgggggttgaacgctagtattagtcgttacagcaagattacggatttcatgaaaatcttttttggtgtgactgccagcagtgtcttgtcatatagtatctgttatgccttcttgccactcttctccatccgtttcatcattctctttatcttgttgagtaccttcttgattttattgccacggattacttggcagttaatctactccagacgcaaaaaaggtagtggtgatggagaacaccgtcggaccttcttgattggtgccggtgatggtggggctctttttatggatagttaccaacatccaaccagtgaattagaactggtcggtattttggataaggattctaagaaaaagggtcaaaaacttggtggtattcctgttttgggctcttatgacaatctgcctgaattagccaaacgccatcaaatcgagcgtgtcatcgttgcgattccgtcgctggatccgtcagaatatgagcgtatcttgcagatgtgtaataagctgggtgtcaaatgttacaagatgcctaaggttgaaactgttgttcagggccttcaccaagcaggtactggcttccaaaaaattgatattacggaccttttgggtcgtcaggaaatccgtcttgacgaatcgcgtctgggtgcagaactgacaggtaagaccatcttagtcacaggagctggaggttcaatcggttctgaaatctgtcgtcaagttagtcgcttcaatcctgaacgcattgtcttgctcggtcatggggaaaactcaatctaccttgtttatcatgaattgattcgtaagttccaagggattgattatgtacctgtgattgcggacattcaagactatgatcgtttgttgcaagtctttgagcagtacaaacctgctattgtttatcatgcggcagcccacaagcatgttcctatgatggagcgcaatccaaaagaagccttcaaaaacaatatccgtggaacttacaatgttgctaaggctgttgatgaagctaaagtgtctaagatggttatgatttcgacagataaggcagttaatccaccaaatgttatgggagcaaccaagcgcgtggcggagttgattgtcactggctttaaccaacgtagccaatcaacctactgtgcagttcgttttgggaatgttcttggtagccgtggtagtgtcattccagtctttgaacgtcagattgctgaaggtgggcctgtaacggtgacagacttccgcatgacccgttactttatgaccattccagaagctagccgtctggttatccatgctggtgcttatgccaaagatggggaagtctttatccttgatatgggcaaaccagtcaagatttatgacttggccaagaagatggtgcttctaagtggccacactgaaagtgaaattccaatcgttgaagttggaatccgcccaggtgaaaaactctacgaagaactcttggtatcaaccgaactcgttgacaatcaagttatggataagattttcgttggtaaggttaatgtcatgcctttagaatccatcaatcaaaagattagagagttccgcactctcagtggagatgagttgaagcaagctattatcgcctttgctaatcaaacaacccacattgaataa

SEQ ID NO: 9146 - DNA, 870 bp, Streptococcus pneumoniae
  CDS (1)...(870)
atgaagattattgtacctgcaaccagtgccaatatcgggccaggttttgactcggtcggtgtagctgtaaccaagtatcttcaaattgaggtctgcgaagaacgagatgagtggctgattgaacaccagattggcaaatggattccacatgacgagcgtaatctcttgctcaaaatcgctttgcaaattgtaccagacttgcaaccaagacgcttgaaaatgaccagtgatgtccctttggcgcgcggtttgggttcttccagctcggttatcgttgctgggattgaactagccaaccaactgggtcaactcaacttatcagaccatgaaaaattgcagttagcgaccaagattgaagggcatcctgacaatgtggctccagccatttatggtaatctcgttattgcaagttctgttgaagggcaagtctctgctatcgtagcagactttccagagtgtgattttctagcttacattccaaactatgaattacgtactcgcgacagccgtagtgtcttgcctaaaaaattgtcttataaggaagctgttgctgcaagttctatcgccaatgtagcggttgctgccttgttggcaggagacatggtgaccgctgggcaagcaatcgagggagacctcttccatgagcgctatcgtcaggacttggtaagagaatttgcgatgattaagcaagtgaccaaagaaaatggggcctatgcaacctacctttctggtgctgggccgacagttatggttctggcttctcatgacaagatgccaacaattaaggcagaattggaaaagcaacctttcaaaggaaaactgcatgacttgagagttgatacccaaggtgtccgtgtagaagcaaaataa

SEQ ID NO: 9147 - DNA, 1467 bp, Streptococcus pneumoniae
  CDS (1)...(1467)
atgaaaatcaaagagcaaactaggaagctagccgtaggttgctcaaagcacagctttgaggttgtagataagactgacgaagtcagttcaaaacactgttttgaggttgcagatagaactgacgaagtcagtaaccacacctacggcaaagtgaatctgaagtggtttgaagagagtacaacttgtcttttagaaaaggagcctataatgaaagtctttcagcatgtaaatatcgtgacttgtgatcaagatttccatgtttatcttgatggaatcttagcagtcaaggattctcaaatcgtctatgtcggtcaagataagccagcgtttttagagcaagctgagcagattatagactatcagggagcttggattatgcctggtttggtcaattgtcacacccattctgcaatgacaggtctgagagggatccgagatgacagcaatctccatgaatggctcaatgactatatttggccagcagaatctgagtttacttccgacatgactaccaatgcggtcaaagaagccctgacagagatgctccagtcaggaacaacaacctttaacgatatgtataatcccaatggtgtggatatccagcaaatttatcaggtggtgaaaacttccaagatgcgttgttattcttctccgactctcttttgttcagagacagaaacaactgctgagactataagtagaactcgatccatcatagacgaaatcttaaaatataaaaatccaaatttcaaggttatggtagcacctcattctccgtatagctgcagtagagacttgctggaagcgagtttggaaatggcaaaagagctaaatattccgctccatgtccatgtggcggagaccaaggaggagtcaggaattatcctcaaacgatacggcaaacgcccccttgcttttcttgaagaactgggttatttagatcatccgtccgtatttgctcacggggtcgaattaaacgagagagaaattgaacgcttggcatcttctcaagtggctatcgcccacaatcctatcagtaacctcaaactggcatcaggaattgctccaattatccagctccaaaaagcgggagtagcagtcggaattgcgactgactcggttgcttccaataacaatctagatatgtttaaggaaggaaggactgcagctcttcttcagaagatgaaaagtggggatgccagccagtttccaatcgaaacagctctcaaggtactgacaatcgaaggggctaaggcccttggaatggaaaatcagataggaagtctggaagtcggcaagcaagcagattttctggtcattcaaccacaagggaaaattcatctccaacctcaggaaaatatgctgtctcacctggtttatgcagttaaatctagtgatgtagatgatgtttatatcgccggagaacaggttgttaagcaaggtcaagtcctgacagtagaactttaa

SEQ ID NO: 9148 - DNA, 513 bp, Streptococcus pneumoniae
  CDS (1)...(513)
gtgaacacactaatgagtgaagcaattattgctaaaaaagcggaactagttgacgtagtagctgaaaaaatgaaagctgctgcatctatcgtcgttgtagacgctcgtggtttgacagttgagcaagatacagttcttcgtcgtgagcttcgtggaagcgaagttgagtataaagttattaaaaactcaatcttgcgtcgtgcagctgaaaaagctggtcttgaagatcttgcatctgtatttgttggaccatctgcagtagcattttctaatgaagatgttatcgcaccagcgaaaatcttgaacgacttttctaaaaacgctgaagcacttgaaattaaaggtggtgcaatcgaaggcgctgtcgcatctaaagaagagattcttgcacttgcaactcttccaaaccgcgaaggacttctttctatgctcctttctgtacttcaagcgccagtgcgcaacgttgctcttgcagtcaaagcggttgcagaaagcaaagaagacgcggcttaa

SEQ ID NO: 9149 - DNA, 369 bp, Streptococcus pneumoniae
  CDS (1)...(369)
atggcattgaacattgaaaacattattgctgaaattaaagaagcttcaatccttgaattgaacgaccttgtaaaagctatcgaagaagaatttggtgtaactgcagctgctcctgtagctgttgctgcagctgatgcagctgatgctggtgctgctaaagattcattcgacgttgaattgacatctgcaggcgacaaaaaagttggcgttatcaaagttgtacgtgaaatcactggtcttggtcttaaagaagctaaagaacttgttgacggtgcaccagcacttgttaaagaaggcgttgcaactgcagaagctgaagaaatcaaagctaaattggaagaagctggagcttcagttactcttaaataa

SEQ ID NO: 9150 - DNA, 1983 bp, Streptococcus pneumoniae
  CDS (1)...(1983)
atgaatcaaacagttttagatgtaaaaaacttaaaaactgaattcatcactgataaaaaagcatttccgattattaaagatgtaaacttcactttggaaagagggaaagttttagggattgttggtgaatctggatgcggtaagagtgtaacagtgaatacagtgttaaacttattacctaaaaatggacgcattgctgaaggtgaaatcacatatttcgatgaagataagccgatagagcttcaaaaattaaagcaatatggtaaagaatttcgaaagttacgtggtgaaaacatatcaatgattttccaagatccaatgtctgcattgaatccagtatatacaattggtaatcaaattactgaagtccttcatgaacattatgacatttctaaagaggaggcaaataaacgtgctatagaaatgttagaaaaacttggaattcataatgctgcagaacgcatgaatgactatccacaccaatttagtggagggcagcgtcaaagaatagtcatagcgattgcaatggtatgtaatccagatattctaattgcagatgaaccaacaactgcccttgatgtaacaatccaagcacaaatacttgatttacttgatgatttacgtaaagagcatggaacttctattatcttaattactcacgatttaggcgttattgctcaaattgcggatgaagttgcagtgatgtatgctggtgaagtcgttgaagttggaactgtagctcagatctttgatcaacctaaacacccgtatactcgttctctattaagatctattcctaatcctgaaaatatggataaaaagctacatgttatccaggggagcgtaccttcaatttctgaaatatctgaaaaaggatgcagattcgcaaatcgtattccatggttagaaaaagaacatcatgaagaagaacctcaattgcatgatttaggtgacggacattttgtaaggtgttcttgctataaacatttctttttcgaagataaggaagaagaaacattagcggaaaaacatgtaggtaatgttgttttagaagtaaaaaatattaaaaagtactactatcctaagaagcaactattcaagccactaggttctccgttgaaagcacttgatgacgtatctctagagttaagaaaaggaactactattggtatcgtaggagagtctggaagcggtaagagtacgattgcgaaatcattaatgaaactccatgatattacagatggtgaaatcaatattgatttgaatgggaaaactcaaaatatttatggaattaaacgtaaggaagatttggatttccgtaagaaagttcaaatggtattccaagatccttatgcatcattgaacccaactaagaaaatttataattcatttgatgaaccgatgattgtccataatattggaaacaaagaggaacgctttgaacgtatgaaagaagccttgaagatggtaaacgtgccagttgagtacttggagcgttatcctcatgaattttcaggcggacaacgtcaacgtttatgtattgctcgtgccctttgtatgaaaccagaaattttaattttagatgaacctgtttcagcattagatctatctgtacaagcgcaagttttgaattatcttgttgaaatccaaaataaagaagatttgacttatgtatttatttctcatgacctaggtgttgtgaaatacatgtgtgactatctatatgttattcataaaggacgtattgtagaagctggttctcgagaagatatctacaataacccaatgcatatttacactaaaaaactattagctgctattccagaagttgattatcacttcaaagaggcattggcaacaaaacgtaaagaaaatgaagttgaatttaaagcacagtaccatgaattttatgatgaagatggtcgtgcttatgatcttaagcaggtttcaccaacacattttgtagcgttaaaaccagaatag

SEQ ID NO: 9151 - DNA, 1005 bp, Streptococcus pneumoniae
  CDS (1)...(1005)
atgcaaaagaatatctattttgttgtcttggacctgcatacgacggatagagataaaattatccagctattcaaggattggacggattatagtgccaagttggtcgagggggaattggttaaaaaagatggacagaatgctctctttcctccgagcgatactggtgagacagttgggctcaatcctcatcgtttgacgctgacttttggtgtatctgcaagtttcttgaaaaggatgaacttggaaaacaagcgccctcgactgttcagggatttacctctatttcctaaggagcaattacgtgaaaaatatactggtggagatattgtgattcatgcttgtgcagatgatgagcaaattgcctttcacgctattcgcaatctcatccgtaaggggagaaatgcggtgccccttcgttggagtcagtctggatttgcagctatcggggatcgaatggagactccgtggaacctctttggttttaaggatggaacagcaaatccaaccaaggagcaagactttgaccgcgttatctgggctgatagtaaggactggatggaaaatggttcttatatggcagttcgtcggattcagatgtttttagagacctgggaccgcactagtctcgaagaacaagaaaatacctttggtcgttacaaggaaagcggtgccccctttggtaagaaaaatgagtttgatgaagtggatttgagtctcttacctgatgattcgcatgtttgtttggccaaagaagtggataagccacttttacgtcgttcttattcttactcagatggcattgatgaaaagactggtcagtttgatacgggattgctcttcatttctttccagaaggatcctgataactttgttaaggttcaaactaacctaggtgctactgataagatgaatgaatacatcactcacataggtagtggactttttacttgctttggtggtgtggagaaaggaggctacattggtcagaaattattggaaggctaa

SEQ ID NO: 9152 - DNA, 285 bp, Streptococcus pneumoniae
  CDS (1)...(285)
atggctcgcaaagagaccatggcagaaaggaaatattgcaaaatgaaaaaagatatccatccagaatatcgcccagttgtcttcatggacacaactactggttaccaattccttagcggttcaacaaaacgctctaacgaaacagttgagttcgaaggcgaaacttacccattgatccgtgtggaaatttcatcagactcacacccattctacactggacgtcaaaagttcactcaagcagatggacgcgtggatcgtttcaacaaaaaatacggtctcaaataa

SEQ ID NO: 9153 - DNA, 348 bp, Streptococcus pneumoniae
  CDS (1)...(348)
atgaatccattaatccaaagcttgactgaaggtcaacttcgtacagatatcccatcattccgtcctggtgatactgttcgtgtacacgcgaaagttgtcgaaggtaaccgtgaacgtatccagatttttgaaggtgttgttatcgcacgtaaaggtgctggaatctcagaaaactacacagttcgtaaaatctctaacggtataggtgttgagcgtatcttcccaatccacactccacgtgttgaaaaaatcgaagttgttcgttacggtaaagtacgtcgtgcgaaattgtactacttgcgtgctcttcaaggtaaagcagctcgtatcaaagaaatccgtcgttaa

SEQ ID NO: 9154 - DNA, 807 bp, Streptococcus pneumoniae
  CDS (1)...(807)
atgagtattaaactaatcgccgtcgatattgacggaaccctagtcaacagccaaaaggaaatcactcctgaagtcttttctgccatccaagatgccaaagaagctggtgtcaaagtcgtgattgcaactggccgccccatcgcaggtgttgccaaacttctggacgacttgcagttgagagaccaaggtgactatgtggtgaccttcaatggtgcccttgtccaagaaactgctactggccatgagattatcagcgaatccttgacctatgaggattatctggatatggaattcctcagtcgcaagctcggtgtccacatgcatgccattaccaaggacggtatctatactgcaaatcgcaatatcggaaaatacactgtacacgaatcaaccctcgtcagcatgcctatcttctaccgtacccctgaagaaatggctggcaaggaaattgtcaagtgtatgttcatcgatgaaccagaaattctcgatgctgcgattgaaaaaataccagccgaattttacgagcactactctatcaacaaatctgctcctttctacctcgaactccttaaaaagaatgtagacaagggttcagctattactcacttggctgaaaaactcggattgaccaaagatgaaaccatggcaatcggtgacgaagaaaatgaccgtgccatgctggaagtcgttggaaaccccgttgtcatggaaaatggaaatccagaaatcaaaaaaatcgccaaatacatcactaaaacaaatgacgaatccggcgttgcccacgccatccgaacatgggtactgtaa

SEQ ID NO: 9155 - DNA, 333 bp, Streptococcus pneumoniae
  CDS (1)...(333)
atggaaatcgaaaaaaccaatcgtatgaatgcgctctttgaattttatgcggcgcttttgacagataagcaaatgaattatatcgagctctactacgctgatgattacagccttgctgaaattgccgaggagttcggtgtcagtcgtcaggctgtctatgacaatatcaagcgaacagaaaagattctggaagattatgagatgaaattgcacatgtactcggactatattgtccgcagtcagatttttgatcagattttggagcgctatcccaaggataactttctgcaggagcagatagaaattttaacaagcattgataatagagaataa

SEQ ID NO: 9156 - DNA, 1572 bp, Streptococcus pneumoniae
  CDS (1)...(1572)
atggcatttgaaagtttaacagaacgtttgcagaacgtctttaaaaatctacgtaaaaaaggaaaaatctctgaatctgatgtccaagaggcaaccaaagaaattcgcttggccttgctcgaggccgacgttgccttgcctgttgtaaaggactttatcaagaaagttcgtgagcgtgcagtcgggcatgaggtcattgatacacttaatcctgcgcaacagattattaaaatcgttgatgaggaactgacagccgttttaggttctgatacggcagaaattatcaagtcacctaagattccaaccatcatcatgatggttggtttacaaggggctggtaaaacaacctttgctggtaaattggccaacaaactcaagaaagaagaaaatgctcgtcctttgatggttgcggcggatatttatcgtccagctgccattgaccagcttaagaccttgggacaacagattgatgtgcctgtctttgcacttggaacagaagtaccagctgttgagattgtacgtcaaggtttggagcaagcccaaactaatcataacgactatgtcttgattgatactgcgggtcgtttgcagattgatgagctcctcatgaatgagcttcgtgatgtgaaagcattggctcaaccaaatgaaatcttgcttgtcgttgatgctatgattggtcaggaagcagccaatgttgcgcgtgagtttaatgctcagttggaagtgactggggtcatccttaccaagattgatggcgatactcgtggtggtgctgctctgtctgttcgtcacattactggaaaaccaatcaagttcactggtacaggtgaaaagattacggacattgaaaccttccacccagaccgcatgtctagccgtatccttggtatgggggatatgctcactttgattgagaaagcttctcaggaatacgatgaacaaaaagcccttgaaatggctgagaagatgcgcgaaaacacctttgattttaatgatttcatcgatcaattagatcaggtgcaaaatatggggccgatggaagacttgctcaagatgattccaggtatggccaacaatccagcccttcaaaacatgaaggtggatgaacgccagattgctcgtaaacgtgccattgtgtcttcgatgacacctgaagagcgtgaaaacccagatttgttaaatccaagccgtcgccgtcgtattgctgctggttctggaaatacattcgtcgaagtcaataaattcatcaaggactttaaccaggctaaacagctcatgcagggtgttatgtctggggatatgaataaaatgatgaagcaaatggggattaatccaaataaccttcctaaaaatatgccaaatatgggaggaatggatatgtctgcccttgaaggaatgatgggacaaggcggtatgcctgacttatcagctctcggaggagcaggaatgccagatatgagccagatgtttggtggcggtttgaaaggtaaaattggtgaatttgccatgaaacagtccatgaaacgtatggctaacaaaatgaagaaagcgaagaagaaacgcaagtaa

SEQ ID NO: 9157 - DNA, 738 bp, Streptococcus pneumoniae
  CDS (1)...(738)
atgatactaaagaaggaaataactatgaaaccagaaacattttacaacttgcttgccgagcagaatcttccactttcgaaccagcaaaaagaacaatttgaacgttattttgagctcttggtcgagtggaatgagaagattaatttgacggcgattacggacaaggaagaagtttatctcaaacatttttacgattcgattgcacccattcttcaaggtttgattcccaatgaaactatcaaacttcttgatatcggggctggggcaggatttcctagtctaccaatgaaaattctctatccggagttagatgtgaccattattgattcactcaataagcgcatcaacttcctacaactcttggctcaagaactggatttgaacggagttcatttctaccacggacgtgccgaagattttgcccaagacaagaacttccgtgctcaatatgattttgtaacagctcgtgcggttgcccgtatgcaggtcctatctgaattgactattccctaccttaaggttggtggaaaactattggcactcaaggccagcaatgcgcctgaggagttgttagaagctaagaatgccctcaatctcctttttagtaaagtcgaagacaatctcagctacgccctaccaaatagagatccgcgttacatcacagtggtagaaaagaaaaaagaaacaccaaataaatatccacgtaaggctggtatgccaaataaacgcccgctttaa

SEQ ID NO: 9158 - DNA, 708 bp, Streptococcus pneumoniae
  CDS (1)...(708)
atgatttatgcaggaattcttgccggtggaactggcacacgcatggggatcagtaacttgccaaaacaatttttagagctaggtgatcgacctattttgattcatacaattgaaaaatttgtcttggagccaagtattgaaaaaattgtagttggtgttcatggagactgggtttctcatgcagaagatcttgtagataaatatcttcctctttataaggaacgtatcatcattacaaagggtggtgctgaccgcaatacaagtattaagaacatcattgaagccattgatgcttatcgtccgcttactccagaggatatcgttgttacccacgattctgttcgtccatttattacacttcgcatgattcaggacaatatccaacttgcccaaaatcatgacgcagtggacacagtggtagaagcggttgatactatcgttgaaagtaccaatggtcaatttattacagatattccaaatcgtgctcacctttatcaaggacaaacacctcaaacattccgttgcaaggacttcatggacctttatggatctctttctgatgaagagaaggaaatcttgacagatgcatgtaaaatctttgtgatcaaaggaaaagatgtggctttggccaaaggtgaatactcaaatctgaagattacaaccgtaacagatttgaagattgcaaaaagtatgattgagaaagactag

SEQ ID NO: 9159 - DNA, 1023 bp, Streptococcus pneumoniae
  CDS (1)...(1023)
atgattaatcaaatttatcaactaactaagcctaagtttatcaatgtcaaatatcaggaagaggctattgaccaagagaatcatatccttatccgtcccaactacatggctgtctgtcatgcggatcagcgttactatcagggaaaacgtgatcccaagattttgaataaaaagcttccaatggcaatgattcacgagtcatgtggaaccgtcatttctgacccgaccggaacctacgaggttggtcaaaaagttgtcatgattcccaatcagtctcctatgcagagtgatgaagaattctatgaaaactacatgacagggacccatttcttgtctagtggatttgatggctttatgagagagtttgtttctctccctaaagatcgtgtggtggcttatgatgctattgaagatacggttgcagccattacagagtttgtcagtgtgggcatgcacgctatgaatcgtctattgactcttgctcatagcaagcgggagcggatcgccgttattggagatggaagtttagcttttgtggttgccaatattatcaactatactttgccagaagcagagattgtggttattggtcgtcattgggaaaagttggaactcttctcatttgccaaagaatgctatattacggataatattcctgaagatttggcctttgaccatgcttttgaatgttgtggtggtgatggtactggaccagctattaatgacttgattcgctacattcgtcctcagggaacgattctcatgatgggagttagcgaatataaagtcaatctcaatactcgcgatgccttagaaaagggcttgattttggttgggtcatctcgttctggtcgcattgattttgaaaatgctatccaaatgatggaagtcaagaaatttgccaatcgtcttaaaaatatcctttatctagaagaacctgtaagagaaattaaagatattcatcgtgtctttgcaaccgatttaaacacagcctttaaaacagtgtttaagtgggaagtataa

SEQ ID NO: 9160 - DNA, 894 bp, Streptococcus pneumoniae
  CDS (1)...(894)
atgatgaggataaaacaaatgactgaaaatcgttatgaactaaataaaaacttggcacagatgctcaagggtggtgttattatggatgtgcagaatcctgaacaggctcgtatcgcagaagctgctggtgcggcagctgtgatggccttggaacgaattccggctgatattcgtgcagctggaggagtttcccgcatgagcgacccaaagatgattaaggaaatccaagaagcggttagtattccagtaatggctaaggtcagaatcgggcattttgttgaagctcagattttagaggctattgaaattgattatatcgacgagagtgaagttctatctccagctgatgaccgtttccatgtggacaagaaagaattccaagttccttttgtctgtggtgctaaggatttgggtgaagccttgcgtcgtatcgctgaaggtgcttccatgattcgtactaaaggagaaccagggacaggggatatagtccaagctgttcgtcatatgcgtatgatgaatcaggaaattcgccgcattcaaaacttacgtgaggacgagctttatgttgctgccaaggatttgcaagtccctgtagaattggtccaatatgttcatgaacatggaaaattgccagttgtaaatttcgctgctggaggtgttgcaacgccagcagatgctgcgttaatgatgcaattaggggcagagggggtctttgtcggttcaggtattttcaagtcaggagatcctgttaaacgagcgagtgccattgttaaggctgtgactaacttccgtaatcctcaaatcctagctcaaatctctgaagatttaggagaagccatggttggtattaatgaaaatgaaatccaaattctcatggctgaacgaggaaaatag

SEQ ID NO: 9161 - DNA, 1038 bp, Streptococcus pneumoniae
  CDS (1)...(1038)
atggcaaagaaaatagtagctctagtaggagacggaattggcccagaaatcatggaggctggtttagaagttctggaggctctagctgaaaaaacaggttttgactatgagattgacagacgaccgttcggaggtgcagatattgatgcagcaggacctcccttacctgatgaaacccttaaggcaagtagggaagcagatgctatcctactagtagctatcggtagtcctcagtatgatggagtagcggttcgccctgaacaaggcctgatggctctccgtaaggaactcaatctttacgctaatattcgtcctgtaaaaatctttgacagtctcaagtatttgtcaccactcaaaccggaacgaatttctggtgtagactttgtcgtggtgcgtgaattgacaggcgagatttactttggagatcatattcttgaagagcgcaaagcgcgtgatatcaacgactatagctatgaggaagtggagcggattattcgcaaagcctttgaaattgcaagaaatcgcagaaaaatcgttactagtatcgataagcaaaatgttctagcgacctcaaaactctggcggaaagtagctgaggaagtcgcacaggatttcccagatgtaaccttggaacatcagctggtagactcagctgctatgcttatgattaccaatcctgctaagtttgatgttattgtaacggagaatctttttggagatattttatctgatgaatcaagcgtcttatctggtacacttggggttatgccatcagccagtcattctgaaaatggaccaagtctctatgaacctattcacggttcagcacctgatattgcaggtcaaggaattgccaatcctatttccatgattttatcagttgtcatgatgttgagagatagtttcggacgttatgaggatacagagcgtatcaaacgtgctgttgagacaagtctggcggcaggaattttaacgagagatataggaggtcaggcttcaacaaaggaaatgatggaagctattattgcaaggttatga

SEQ ID NO: 9162 - DNA, 582 bp, Streptococcus pneumoniae
  CDS (1)...(582)
atgaaaatcggaatattggccttgcaaggggcctttgcagaacatgcaaaagtgctagatcaattaggtgtcgagagtgtagaactcagaaatctagatgattttcagcaagatcagagtgacttgtcgggtttgattttgcctggtggtgagtctacaaccatgggcaagctcttacgtgaccagaacatgctacttcccatacgagaagccattctatctggcttaccagtgtttgggacctgtgcgggcttaattttgctggctaaggaaatcacttctcagaaagagagtcatctaggaactatggatatggtggtcgagcgtaatgcttatgggcgccaattaggaagtttctacacggaagcagaatgtaagggagttggcaagattccaatgacctttatccgtggtccgattatcagtagtgttggtgagggtgtagaaattttagcaatagtgaacaatcaaattgttgcagcccaagaaaaaaatatgttggtaagttcttttcatccagaattgactgatgatgtgcgcttgcaccagtactttatcaatatgtgtaaagaaaaaagttga

SEQ ID NO: 9163 - DNA, 987 bp, Streptococcus pneumoniae
  CDS (1)...(987)
atgttaaatgaatttccaatttttgattacgaagatattcaattgattccaaataaatgtgtcattaaaagccgtgcagaagcggatacaagtgtcactttaggaaatcacacctttaaactacctgttgtgccagcgaatatgcagacgattttggatgaaaatgtagcagagcaactggctaaaggtggttacttctacattatgcaccgttttgatgaggcaggacgcattccttttattaaacgaatgcacgatcaagggctcattgcttccatatctgtcggtgttaaggattatgagtatgattttgttagccagctcaaggctgatgctcctgagtatatcactattgatattgctcatggtcatgcggatagcgtgatttctatgattcaacacatcaagaaagaattgccagatacctttgtcattgctggaaatgtgggaacaccagaagctgtgcgtgaattggaaaatgctggtgcagatgctactaaggtcggaatcggtcctggtaaggtttgtatcaccaaggttaagactggttttggtacaggtggttggcagttggctgctctacgctggtgtgccaaggctgcgcgtaaaccgattatcgctgatggaggaattcgtactcacggtgatattgccaagtctatccgcttcggtgctagcatgatcatgattggttccctctttgcaggacacattgaaagtccagggaaaacgattgaagtcgatggtgaacagttcaaagaatattatggttcagcctcacaatatcagaaaggtgcttacaaaaatgtggaaggcaaacgtatcttgcttcctgctaaaggtcatctgcaagacactttaactgagatggaacaagaccttcaaagtgctatttcttatgcaggtggacgtcaggttgctgaccttaaacacgttgattatgtgatcgtgaaaaactccatctggaatggggatgcttcccactaa

SEQ ID NO: 9164 - DNA, 3540 bp, Streptococcus pneumoniae
  CDS (1)...(3540)
atgtatttaaaggaaatcgaaattcaggggttcaagtcttttgctgataagaccaaggtcgtttttgaccaaggtgtgacggcagttgttggacccaatggatctggaaagtccaatattacagaaagtctgcgttgggctttgggggagtctagtgtcaagagtctccgtgggggcaagatgccggatgtcatctttgctggaacagaaagtcgcaaaccgctcaattatgcttctgtagttgtgactctggataatcatgacggatttatcaaggatgcaggtcaagaaatcagggtggaacgccatatctatcgtagtggagatagcgaatacaagattgacggcaagaaagtccgtctgcgtgatattcatgacctcttcttggatactggattgggacgagattccttctctattatttcccaagggaaggttgaggagatttttaattccaagcctgaggaacgacgagctatttttgaagaagctgctggagttttaaaatacaagactcgcagaaaagaaaccgagagtaaactgcagcaaactcaggataatctggaccgcttagaggacattatctacgagttggataatcaaatcaagcctcttgagaagcaagctgagaatgcccgtaagtttttagacttggaaggacaacgtaaggttatttatttagacgttctggttgctcaaatcaaggaaaataaggcagaactagagtcgacagaagaagagttggctcaggttcaagaactcttgatgagttattaccaaaagcgtgaaaaattagaagaagaaaatcaaactcttaaaaagcaacgccaagatttacaggctgaaatggccaaagaccaaggcagtttgatggacttgactagtctgattagtgatttagaaagaaaattagccctatcgaaactggagtccgagcaagtggccctgaatcaacaggaggcacaagctcgtttggctgctttggaggataagagaaattcactcagcaaagaaaagtatgataaagaaagctctttagctctgttagagggaaatctagtccaaaataatcaaaaactcaatcgtttagaagctgaattgctggctttctcagacgatcctgatcagatgattgagctcttacgtgaacgctttgtagctcttttacaagaagaagcggatgtctcaaaccagttgacccgtattgagaatgagttggaaaatagtcgtcagctttctcaaaaacaagcagatcaactagaaaagctgaaagagcaattagctacagctaaagagaaggctagtcagcaaaaagacgagcttgaaactgccaaggtgcaggttcagaaattattggctgactatcaagctattgccaaggagcaagaggagcagaaaacttcctatcaagctcaacaaagtcaactctttgaccgtctggatagtctcaaaaacaagcaggccagagctcaaagtttggaaaatatcctgagaaatcatagtaacttttatgcaggtgttaagagtgttctccaagaaaaagatcgcctaggtgggattattggtgcagtcagtgagcatctgacctttgatgtttattatcaaactgccctagagattgccttaggggcaagtagccagcatatcatcgtagaagatgaagagtcggcaaccaaagctattgatttcctcaaacgaaacagagtcggtcgtgcaacctttcttcctttgaccactattaaggcgcgtacgatttctagtcagaaccaagatgctatcgctgtaagcccaggtttccttgggatggcagatgagttggtgacttttgatactagactggaagccattttcaagaacttgctagctacgacggctatctttgataccgtagaacatgcgcgtgaagctgctcgacaagttcgttatcaggttcgtatggtgacattggatgggacagaattacgcacgggtggttcctatgcgggtggtgccaatcgccaaaataacagtattttcatcaagccagaactggagcaattacaaaaagaaattgctgcagatgaagcaagcttgggttcagaagaagcggctttgaagaccttgcaagaccagatggctgcattgacagaaagattagaagccatcaaatctcaaggagagcaggcacgtattcaggagcaaggcttgtccctcgcttatcagcaaactagtcagcaagttgaagaactggaaactctttggaaactccaagaagaggaaatagatcgtctttctgagggagattggcaagcggataaggaaaaatgtcaagagagccttgctactatcgccagtgaaaagcaaaatctggaagctgagattgaagaaattaagtctaataaaaacgccatccaagaacgctatcaaaatttgcaggaagaggtggcgcaagctcgcttgcttaagacagaactgcaagggcaaaaacgttatgaagtagctgatattgagcgtttaggcaaggaattggacaatcttaatatcgaacaagaagaaattcagcgcatgctccaagaaaaagttgacaatcttgagaaggttgatacagaattgctcagtcaacaggcggaagaatccaaaactcagaaaacaaatctccaacaaggtttgattcgcaagcagtttgagttggatgatatagaaggtcaactggatgatattgccagtcacttggatcaagctcgccagcagaatgaggagtggattcgcaagcaaacacgtgctgaagccaagaaagaaaaggtcagcgagcgcttgcgccatctacaaaatcaattaacagaccagtaccagattagctatactgaagcactagaaaaggcacatgaattggaaaacctcaatctggcagagcaagaggtgcaggatttagagaaggctattcgctcattgggacctgtcaacttggaagctattgaccagtacgaagaagttcacaaccgtctggactttctaaatagtcagcgagatgatattttgtcagcgaaaaatctgctccttgaaaccattacagagatgaatgatgaggtcaaggaacgctttaaatcaacctttgaagctattcgtgagtcctttaaagtgaccttcaagcagatgtttggcggaggtcaggcagacttgatattgactgagggcgaccttttaacagctggtgtggagatttctgttcaacctccaggtaagaaaatccagtcgcttaacctcatgagtggtggtgaaaaagctctatcggctcttgccttgcttttctccattattcgtgtcaagaccattccttttgtcatcttggatgaggtggaagctgcgctggatgaagccaatgttaaacgttttggggattacctcaaccgctttgacaaggacagccagtttatcgttgtaacccaccgtaagggaaccatggcagcggctgattccatctatggagtgaccatgcaagaatcgggtgtttcaaagattgtttcagttaagttaaaagatttagaaagtattgaaggatga

SEQ ID NO: 9165 - DNA, 1278 bp, Streptococcus pneumoniae
  CDS (1)...(1278)
atgggattgtttgaccgtctattcggaaaaaaagaagaacctaaaatcgaagaagttgtaaaagaagctctggaaaatcttgatttgtctgaagatgttgatcctaccttcacagaagttgaggaagtttctcaggaagaagcagaggttgaaattgttgaacaagctgtgttccaagaagaggaaatccaagacacagttgaagaaagtctggatttagagccagttgtagaagtttctcaaaaagaagtcgaagaatttccacactcagaagaagggaatactgagtttctagagactatagaagaaaataattctgaagttcttgaaccagaaaggcctcaagcagaagaaaccgttcaggaaaaatatgaccgcagtcttaagaaaactcgtacaggtttcggtgcccgcttgaatgccttctttgctaacttccgctctgttgacgaagaatttttcgaggaactggaagaactgctgattatgagtgatgttggtgtccaagtcgcttctaacttaacggaggaactacgttacgaagccaagcttgaaaatgccaagaaacctgatgcacttcgtcgtgtcatcattgagaaattggttgagctttatgaaaaggatggtagctacgatgaaagcatccacttccaagataacttgacagttatgctctttgttggtgtgaatggtgttgggaaaacaacttctatcggaaaactagcccaccgctacaaacaagctggtaagaaggtcatgctggttgcagcagataccttccgtgcgggtgcagtagctcagctagctgaatggggccgacgagtagatgttccagtagtaactggacctgaaaaagctgatccagccagcgtggtctttgatggtatggaacgtgccgtggctgaaggtatcgatattctcatgattgatactgctggtcgtctgcaaaataaggataaccttatggctgagttggaaaagattggtcgtattatcaaacgtgttgtgccagaagcaccacatgaaaccttcttggcacttgatgcatcaacaggtcaaaatgccctagtacaggccaaagaattttcgaaaatcacacctttaacgggaattgttttgactaagattgatggaactgctcgaggaggtgtggttctagccattcgtgaagaactcaatattcctgtaaaattgattggttttggtgaaaaaatcgatgatattggagagtttaactcagaaaactttatgaaaggtctcttggaaggtttaatctaa

SEQ ID NO: 9166 - DNA, 1488 bp, Streptococcus pneumoniae
  CDS (1)...(1488)
atgtcatctaaggttattgttacaattttcggtgcgagtggagacctggctaaacgcaagctctacccttccctttttagactatataaatccggcaatctttccaagcactttgccgttattggaactgcccgtagaccttggagtaaggaatattttgaatctgtagttgtcgagtccatccttgatttggcagatagtaccgagcaagcccaagaatttgctagccacttctactatcaaagccatgatgtcaatgattcggaacattatattgctttgcgtcaattacaagctgagcttaatgaaaaataccaagctgaacacaataagctcttcttcttgtctatggcacctcagttctttggaaccattgccaaacacctcaaatctgaaaacattgtcgatggcaaaggttttgagcgcttgatcgttgaaaaaccatttggtacagattacgcaactgcaaacaagttgaatgacgaactcctagcaacatttgacgaagaacaaattttccgtatcgaccattatcttggtaaggaaatgatccaaagcatctttgcagttcgctttgcaaacttgatttttgaaaacgtttggaacaaggattttatcgacaatgttcaaattacctttgcggagcgcttgggtgtagaagaacgtggtggctactatgaccaatccggtgccctccgtgacatggtccaaaaccacactctacaacttctttcgctcctcgccatggacaaaccagcaagcttcacaaaagacgagattcgtgctgaaaagattaaggtctttaaaaacctctatcatccaactgatgaagaactcaaagaacactttatccgtgggcaataccgctctggtaagattgatggcatgaaatacatctcttatcgtagcgagccaaatgtgaatccagaatcaacaactgaaacctttacatctggtgccttctttgtagacagcgatcgattccgtggtgttcctttctttttccgtacaggtaaacgactgactgaaaaaggaactcatgtcaacatcgtctttaaacaaatggattctatctttggagaaccacttgctccaaatattttgaccatctatattcaaccaacagaaggcttctctcttagcctaaatgggaagcaagtaggagaagaatttaacttggctcctaactcacttgattaccgtacagatgcgactgcaactggtgcttctccagaaccatacgaaaaattgatttatgatgtcctaaataacaactcaactaactttagccactgggatgaagtttgtgcgtcatggaagttgattgaccgtattgaaaagctctgggctgaaaatggtgccccacttcatgactataaagctggaagcatgggacctcaagccagctttgacctacttgaaaaattcggtgccaaatggacttggcaaccagatatcacctatcgtcaagatggtcgcttagaataa

SEQ ID NO: 9167 - DNA, 705 bp, Streptococcus pneumoniae
  CDS (1)...(705)
atgaaaaaaatactaattgtagatgatgagaaaccaatctcggatattatcaagtttaatatgaccaaggaaggttatgaagttgtaactgcttttaatggtcgtgaagcgctagagcaatttgaagcagagcaaccagatattattattctggatttgatgcttccagaaattgatggtttagaagttgctaagaccattcgtaagacaagcagtgtgcccattcttatgctttcagccaaagatagtgaatttgataaggttatcggtttggaacttggggcagatgactatgtaacgaaacccttctccaatcgtgagttgcaggcgcgtgttaaagctcttctgcgtcgttctcaacctatgccagtagatggtcaggaagcagatagtaaacctcaacctatccaaattggggatttagaaattgttccagacgcctacgtggctaaaaaatatggcgaagaactagacttaacccatcgtgaatttgagcttttgtatcatttagcatcgcatacaggtcaagtcatcacgcgcgaacacttgcttgagactgtctggggttatgactattttggtgatgtccgcacagttgatgtgactgtacgacgtctgcgtgagaagattgaagatacgcccagccgaccagagtatatcttgacgcgccgtggtgtagggtattacatgagaaataatgcttga

SEQ ID NO: 9168 - DNA, 1350 bp, Streptococcus pneumoniae
  CDS (1)...(1350)
atgcttgatttactgaaacaaaccatttttaccagagattttatctttatcctgattttgttaggtttcatccttgttgtgaccctcttattactggaaaatagacgtgataatattcagttgaagcaaatcaatcaaaaggttaaagatttgattgcaggagattattccaaggttcttgatatgcaaggtgggtctgaaatcaccaatattaccaataatttgaatgacttgtcggaggttattcgtctcactcaggaaaatctagaacaagagagtaagaggctaaatagtattctgttttatatgacagatggggttcttgcgactaaccgtcggggtcagattatcatgattaacgatacagccaagaagcaactggggctggttaaggaagatgttctgaatagaagcattttggaattgctcaagatagaagaaaactatgaattgcgtgatttgattacccaaagtccagaattgttgctagattcccaagatatcaatggcgaatatttgaaccttcgagttcgctttgccttgatacgtcgagagtctggctttatttcaggtttggtggctgttttgcatgatacgacggagcaggagaaggaagaacgcgaacgaagactctttgtttccaatgttagccatgagttacggactcctctgactagcgtaaaatcctatcttgaagccttggatgagggggctttgtgtgaaactgtagcaccagactttatcaaggtttctcttgatgagaccaaccgtatgatgcgcatggtgacggatctcctccatctttcacgtattgataatgctaccagtcacctagatgtggaactgattaacttcactgcttttattacctttatcctcaatcgttttgacaagatgaaaggacaggaaaaggagaaaaaatatgagctggtgagagattatcccatcaattctatctggatggaaattgatacagataagatgacgcaggttgtcgacaatattttaaataatgctattaagtattcgccagatgggggtaaaatcactgtcagaatgaagacaactgaagaccagatgattttatccatttctgaccacggtttggggattcctaagcaggatttaccacgtatctttgaccgtttctatcgtgtggatcgtgctagaagtcgtgcacaaggtggtacaggtctaggactgtctatcgctaaagaaattatcaaacaacataagggctttatttgggccaagagtgaatacggcaagggttcaacctttaccattgtactcccttatgataaggatgcagtgaaagaagaagtatgggaggatgaagtagaagactag

SEQ ID NO: 9169 - DNA, 495 bp, Streptococcus pneumoniae
  CDS (1)...(495)
atggaaattcgtttagcttttccaaatgaagtagatgccatcatgcaggtgatggaggaggccaaaaaatgtttagcagatgctggtagtgaccagtggcaaaatggctatccaaatgcagatgttattatcgatgatatcatctcagggcaagcctacgtagccttggaagagggagaactgctagcctatgctgctgtgaccaagagtccagaggaggcctatgaagctatttatgagggaaactggcaagctggagagtcagagtatctagtctttcaccgtattgctgtggcagcagatgtgcagggaaaaggagttgctcaaaccttcttagagggcttgattgaaggttttgattatcttgattttcgctcagatacgcatgctgaaaacaaggttatgcaacatatttttgaaaaacttggttttaaacaagttggtaaggtgccagtagatggcgaacgcttggcctatcaaaaattaaagaaataa

SEQ ID NO: 9170 - DNA, 1896 bp, Streptococcus pneumoniae
  CDS (1)...(1896)
gtgaagttggtcatggataatcctgaagtgactaccaaggacttgatggaagtcttgcctggaccagattttccaactggtgctcttgtcatggggaaatcaggtatccataaggcttatgaaacaggtaaaggttcgattgtcctacgttctcgtacagagattgaaacgactaagactggtcgtgagcgtatcgttgtaacagaatttccttacatggtcaataaaaccaaggtgcatgagcatattgttcgcttggttcaggaaaaacgcattgagggtatcacagcagtacgtgatgagtcaaaccgtgaaggtgttcgatttgttattgaagtcaagcgcgacgcctcagccaatgttattctcaataacctcttcaaaatgacccaaatgcaaaccaattttggtttcaatatgctcgctatccaaaatggtataccgaaaattttgtctcttcgtcagattttggatgcttatattgagcaccaaaaagaagtggttgttcgtcgtacacgttttgataaggaaaaagcggaagcgcgcgctcatatcttagaaggtctcttgattgcgctagaccatatcgacgaagtgattcgtatcatccgtgctagtgaaacggatgcggaagctcaagctgagttgatgagcaagtttaagctttctgaacgtcaaagtcaagctatccttgatatgcgtcttcgtcgtttgacaggtttggaacgcgataagattcaatctgagtatgatgacctcttggctctgattgcggatttagcagatattcttgctaagcctgaacgtgtttctcaaattatcaaagacgaattggatgaagttaaacgtaaattttctgataaacgccgtacagagttgatggttggacaggtcttgagtctcgaggatgaggacttgattgaagaatcggatgtcttgattaccctttctaacagaggctacattaagcgtttggatcaggacgagttcactgctcaaaaacgtgggggtcgtggtgtccaaggaacgggagtgaaagatgatgactttgttcgtgagttagtgtcaactagtacccatgatcatctgctcttcttcacaaacaagggacgtgtctatcgtcttaaaggttatgaaattcctgagtatggtcggactgccaaagggctaccagtagtcaatctcttgaaattggatgaagacgaaagtattcagacggttatcaatgttgagtctgatcgcagtgatgatgcttatctcttctttacaacccgtcacggtattgtgaagagaaccagtgttaaggagtttgccaatattcgtcaaaatggtctcaaagcgctgaatttaaaggatgaagatgagttaatcaatgtcttgttggcagaaggagatatggatattatcattggtaccaagtttggttatgcagttcgctttaatcaatcagccgttcgtggtatgagccgtatcgccactggtgtgaaaggtgttaaccttcgtgaaggagacacagttgttggtgccagcttgattactgatcaagatgaggttcttattatcacagaaaaaggatatggtaagcgtacagtcgctactgaatacccaacaaaaggtcgtggtggtaagggaatgcagacagctaaaattaccgaaaaaaatggcttgctggccggtcttatgactgttcaaggggatgaggatttgatgattatcactgatacaggtgtcatgattcgaaccaatcttgccaatatttcacaaacaggacgtgcaactatgggagttaaagtaatgcgcctggatcaagatgctcagatagtgactttcacaacggttgcggtggcagaaaaagaagaagttgggacagaaaacgaaacagaaggtgaagcataa

SEQ ID NO: 9171 - DNA, 744 bp, Streptococcus pneumoniae
  CDS (1)...(744)
atgtctcaaaaaaataataaaaagaaaaacaagcgaaaaaatctgctgacaaatatcctagcaggatttctgatattactgtcactggctttgatttttaatactcaaattcgaaatattttcatagtctggaataccaataagtatcaagttagccaggtatcaaaagacaaattagaagaaaatcaggatacaaggagcaattttgactttgattctgtcaaagctatctcttcggaagctgttctaacttctcaatgggatgctcacaaattaccagttattgggggaattgcaattcctgaattggaaatgaatttgccgatttttaaaggacttgataatgttaatctcttctacggagctggtacaatgaaacgcgagcaagtaatgggagaaggaaattatagtctagctagtcaccatatctttggtgttgataatgctaataaaatgttattttctcctttagataatgctaaaaatggcatgaagatttatctaaccgataaaaataaagtttatacttatgaaatacgtgaagtcaaacgtgtgacaccagatcgtgttgatgaagttgatgatagagatggggtcaatgaaatcacattagtaacctgtgaagaccttgctgctacagaacgtattattgtcaaaggtgatttgaaagaaacaaaagattattcacaaacatctgatgaaatcctaacagctttcaatcaaccatataaacaattttattaa

SEQ ID NO: 9172 - DNA, 798 bp, Streptococcus pneumoniae
  CDS (1)...(798)
atggtttcttcagaatttatctcaaagattgaatttgcttgcaataagaaagacagtctttatagtcaaagcaaatttaagtatgcgattcgttcgatgttcgcaggtgcatttttaaccttcagtactgctgcaggtgcagttggggctgacttgattaataaaattgcaccaggtagtggacgcttcctctttccattcgtttttgcttggggcttggcctacattgtttttttgaatgccgagttggtcacttcaaacatgatgttcttgactgctggtagtttcttaaaaaaaatctcttggagaaaaacagctgagattttactatactgtaccttgttcaaccttatcggagccttgatagcagggtggggctttgctcattcggcagcctatgcgaatctgacacacgatagtttcatctcaggtgttgttgagatgaagttaggccgctcaaatgaattggtcttgcttgaggcgattttggcaaatattttcgtaaatattgcgattctgtcatttattttggtcaaagatggtggtgccaaactttggcttgtgttgtcagctatttacatgtttgtattcttaacaaacgagcacattgcggcgaactttgcttctttcgcgattgtgaaattcagtgttgctgcggattcaattgccaacttcggtgttggaaatatgcttcgccactggggtgtgactttcatcggaaactttatcggaggaggcctcttgatgggtcttccatatgccttcctcaataaaaacgaagatacttatgtagattaa

SEQ ID NO: 9173 - DNA, 531 bp, Streptococcus pneumoniae
  CDS (1)...(531)
atgcaaaagaagtatgtaaaaatcctctactcctcaccaattggtattctatcacttgtagctgatgaccattatttgtatggaatttgggttcaggagcagaagcattttgagaggggactaggagatgaaacgatagaagaagttgttagtcatcctattttagacccagttattgcttgcttagatgattactttaaaggcaagcctcaggatttatccaacttgctcttggcgccaatcggaacgaattttgaaaagagagtttgggactatttacagggcattccttatggtcagacagtgacctatggacaaattgctcaagacctgcaagtggcttctgctcaagcaattggtggagcagtgggacgcaatccttggtctatcctagtaccttgtcatcgtgtgttgggagcaggcaagcgtctgacaggttatgctgcaggagtggaaaagaaagcttggctcttggagcatgaaggagtagattttaaagatagaaacaatagaaggagaagcacatgttag

SEQ ID NO: 9174 - DNA, 1347 bp, Streptococcus pneumoniae
  CDS (1)...(1347)
gtggagatggaaaagtatttatcggtaacaactttgaccaagtatctgaaaatgaaattcgataaagacccatacttggaacgggtctatttaactggtcaagtttccaactttcgtaaacgacctactcaccaatatttctccctaaaggatgaccatgcagttattcaagcgaccatctggtctgggatttatcagaaattagggtttgacctggaagaaggaatgaagatcaatgtgattgggcgtgtacaggtctatgaaccaagtggtagctactccatcatcattgaaaaagttgagcctgatggggttggggcgcttgcgattcagtttgaacaacttaagaaaaaattgacagaagaaggcctgtttcaagaacgcttcaagcaagctctgccccaattttctaagagaattggggtagtaaccagccgtagtggagccgttattcgagatattatcacgaccgtcagcaggcgattcccaggtgttgacatccttctttatccgaccaaggttcaaggtgaaggggctgcggaggaaattgctagaaatattgcgcgtgctaatcaacgggacgatttggatttgctcattattggtcgtggaggtggttctattgaggatctctgggcctttaacgaagaaattgtggtacgagctatttttgaatctcgtttgccagttatctctagtgtggggcatgagacggatgtgaccttggcagattttgtggcagatcgacgcgctgcaacgccaacagcggcggctgaactggcaacacctgtgaccaagttggatgtattagctcatttgcaaaatcaggaaaaacggatggtaacggcagtccgaaatgttctatctaagaaacaagaggctttgaaaaaatgcagtcagtctgttatctttagacaacctgagcgcttgtatgacggttatttgcaacgcttggaccaactgcaactgcgtttgaaacaaagtttgcgaactcggatttctgataacaaacaattagttcaagcaagaactcatcaattagtacaattatcacctgttaccaaaatccaacgctatcaagaccgtttaggacagttggacaagctcttaggtagccaaatggcgttagtttatgacgccaaggttgctgaggccaagcgactttcggaagctttgctcatgttggatactagccgaatcgtggcgcgtggttatgctattgtcaaaaaagaagagtccgttgtagattcggttgagagtttgaagaaaaaagaccaagtaacgcttttgatgcgagatggtcaagtagaattagaggttaaagatgtcaaaacaaaagaaatttga

SEQ ID NO: 9175 - DNA, 876 bp, Streptococcus pneumoniae
  CDS (1)...(876)
atgaaaaagcaagaaaaattagctcttgtcgagtcggctttggaagatttttatggagaccagcagtttgcctctagtttacgggagtctgttctctattctattcatgctggtggcaagcgtattcggccttttctcttgttagaagttctggaagccttgcaggttgccatcaaacctgctcacgcgcaggtagctactgccttggagatgattcatacagggagcttgattcacgatgaccttcctgctatggatgatgacgattatcgaagagggcggttaaccaatcacaagaaattcggtgaagctatggccattttggctggagatgccttattcttagacccatatgccttgattgcgcaggcagatttgccaagtcagatcaaggtggacttgattgccaacttatcccttgcttcaggtagtctgggtatggtggcagggcaagttttggatatggagggcgaacaccagcacttgtctctggaagaacttcagactattcatgccaataagactgggaagttactagcctatcccttccaagcggcagctattatagctgaattgtcacctgaaatgcaggtgaagctgaaaactgtgggtgaattgattggacttgcttttcaagtcagagatgatgtactggatgtgacagctagttttgaggaaatcggtaagacacctcaaaaggatctgcaggcagaaaaatcaacctatcctgccttgttgggcttggaagagtccattgccttttgtaaccaaaccctggatcaagctaatgaaaaattggaagaaattgcccagcaggttccctttgaaacagaatcgattgtaagtgtagtagaaagtttgagaatcaatggctaa

SEQ ID NO: 9176 - DNA, 516 bp, Streptococcus pneumoniae
  CDS (1)...(516)
atgagaattgcaattggatgcgaccacatcgtaacagatgaaaaaatggcggtttcagaatttttgaaatcaaaaggatatgaagtcattgactttggtacatatgaccatacacggactcactacccaatctttggtaaaaaagtaggggaagctgtaactagcggccaagctgatcttggggtatgtatctgtggtactggtgttggtatcaacaacgctgtaaataaagttccaggtgttcgttctgccttggttcgtgatatgacaacagccctttatgctaaagaacaattgaacgctaacgttatcggctttggtggtaagattactggtgaattgcttatgtgtgatatcatcgaagctttcattcatgctgaatacaaaccatctgaagaaaacaagaaattgattgcgaaaattgaacaccttgaaagtcacaatgctcaacaaacagacgcaaacttctttacagaattccttgaaaaatgggatcgcggagaataccacgactaa

SEQ ID NO: 9177 - DNA, 318 bp, Streptococcus pneumoniae
  CDS (1)...(318)
atgaatagagaagaagtaacattgttaggttttgaaatcgtagcctatgctggcgatgctcgttcaaaactattggaagccttgaaggctgctgaagctggtgattttgaaaaagcggacgctctggtagaggaagctggtagctgtattgcagaggctcaccacgcgcaaacaagtctattgactaaggaagcttctggtgaggacttagcgtatagtgtgaccatgatgcatggccaagaccacttgatgacaactatcttgttaaaggatttgatgcaccatttgatcgaactctataagagaggagttaaataa

SEQ ID NO: 9178 - DNA, 1692 bp, Streptococcus pneumoniae
  CDS (1)...(1692)
atgaacaaactaattgcatttatcgagaaaggaaagcctttctttgataaactatctcgtaatatctatcttcgtgctattcgtgatggtttcattgcaggtatgcctgttattctcttctcaagtatctttatcttgattgcctttgtaccaaactcatggggctttaaatggtctgatgaagttgtagcctttctgatgaaaccttatagctattctatgggtattctggctctcttggtagctggtacaacagctaagtcattgaccgactcagtaaaccgtagcatggagaaaaccaatcaaatcaactatatgtcaacgctgttagcagcgattgttggtttgttgatgttggcagctgatcctatcgaaaatggtctagctactggattcttggggacaaaaggtttgctttcagccttccttgctgcctttgttactgtagccatctataaggtctgtgttaagaacaacgtcactattcgtatgcctgacgaagttccaccaaatatctcacaagtctttaaagatgtgattccattcactctatcagtggtttctctttatgctcttgatttactagctcgtcattttgttggttctagtgtggcagaatcaatcggtaaattcttcgcaccactcttctcagcagcagacggataccttggtattaccattatctttggtgcctttgccttcttctggtttgtgggtattcatggtccatctattgttgaacctgctatcgcagcgattacctatgcaaatgctgaagtcaacttgaaccttctccaacaaggtatgcatgctgataaaatccttacttcaggaactcaaatgtttatcgttactatgggaggtactggtgcgacactggttgttccattcatgttcatgtggttaacaaaatcaaaacgtaaccgtgcaatcggacgtgcttcagtagttccaactttctttggtgtaaatgaaccaatcttgtttggtgcaccacttgtattaaatccaatcttcttcattccatttatctttgctccaatcgcaaacgtatggattttcaaattctttattgaaactcttggaatgaactcattcactgctaatctaccatggacaactccagctccactaggtctagttcttggaactaacttccaagtgctatcattcattcttgctgcccttctaatcgtggttgacgttgtcatttactatccattccttaaggtctatgatgaacaaattcttgaagaagaacgttcaggtaagtctaatgatgaattgaaagaaaaagttgctgcaaacttcaacactgcaaaagcggatgctattcttgaaaaagcgggtgtcgatgcagcacaaaataccatcactgaagaaacaaatgtcctcgttctctgtgcaggtggaggaacaagtggtctccttgcaaatgctttgaataaggcagcagcagaatacaatgtccctgtgaaagcagcagcaggcggctatggtgctcaccgtgaaatgttaccagagtttgatcttgttatccttgcccctcaagttgcttcaaactttgaagatatgaaagcagaaacagataagctcggtattaaactagcgaaaacagaaggcgctcaatacatcaaattaactcgtgatggaaaaggtgctcttgcattcgtacaagcgcaattcgattaa

SEQ ID NO: 9179 - DNA, 1416 bp, Streptococcus pneumoniae
  CDS (1)...(1416)
gtgaaaaaaatgacaaaaacacttccaaaagactttatttttggtggcgcaacagctgcttatcaagcagaaggtgctacacatactgatggaaaaggaccagttgcttgggataaatatcttgaggataactactggtacactgccgaaccagctagtgatttttacaatcgatatccagttgacctcaagctagcagaagagtatggtgtcaatggtattcgaatttctattgcttggtcacgtattttcccgactggttacggccaagtaaatgctaaaggtgttgagttttatcataatttatttgcagagtgtcacaaacgtcatgttgagccttttgtaactcttcatcactttgacacgccagaagctctccactcaaatggagacttcttaaaccgtgaaaatatcgaacattttgtagactacgctgccttctgttttgaagaatttccagaagtaaactattggacaacctttaatgaaattggaccaatcggtgatggtcaatatttagttggtaaattccctccaggaattcagtacgaccttgccaaagtcttccaatcgcaccacaatatgatggtgtctcatgcacgtgctgtaaagctatataaagataaaggatataaaggggaaattggtgttgttcacgccctgcctactaaatatcctctagatcatgaaaatccagcagatgttcgtgcagctgagttggaagatatcatccacaataaattcatcttagacgcaacttatctaggtcgctattcagctgaaaccatggaaggtgtcaaccatatcttatcagtcaatggtggtagtttggatcttcgtgaagaagattttacagcattagaagctgcaaaagacttgaatgatttcctaggaatcaactactatatgagtgactggatggaagcctttgatggagaaactgaaattatccataatggtaaaggtaaaaaaggaagctctaagtatcaaatcaaaggtgttggtcgtcgtgtagctcctgactatgtaccacgcacggattgggattggattatctaccctcaaggtttgtatgaccaaatcatgcgtgtgaagaaagattatcctaactacaagaagatttacatcactgaaaatggtctcggctataaagatgagttcgtcgataacactgtttacgatgatggtcgtattgattacgtgaaacaacacttggagatcttgtctgatgcgattgcagatggagctaatgtaaaaggttacttcatttggtcattaatggatgtcttctcatggtcaaacggttatgagaaacgttatggtctcttctacgtagattttgaaactcaagaacgttatcctaagaaatcagctcactggtacaagaaagtagcggaaactcagattatagactag

SEQ ID NO: 9180 - DNA, 963 bp, Streptococcus pneumoniae
  CDS (1)...(963)
atggaaacttactacaaagccattaactggaatgccatcgaagatgtcatcgacaaatcaacttgggaaaaactgacggagcaattttggctcgatacacgtattcccttatcaaacgacttggatgactggagaaagctatctaacaaagagaaagacttggtcggaaaagtttttggtggtttaacccttcttgacactatgcaatctgaaactggggttcaagcccttcgcgcagacatccgtacaccacatgaggaagctgttttcaataacatccaatttatggaatctgtccacgctaaatcttactcatcaatcttttctaccttgaatactaaggctgagattgaagaaattttcgaatggaccaataccaatccttacctacaaaagaaggctgagattgtcaacgaaatctacctaaacggcagcccacttgaaaagaaagttgccagcgtcttcctcgaaaccttcctcttctactctggtttcttcactcccctctactatctcggtaacaacaaactagccaacgttgcagaaatcattaaattgattattcgtgacgagtctgttcacggaacctacattggttacaaattccaacttggtttcaatgaattgcctgaagaagagcaagaaaaactcaaagaatggatgtacgacctactctatactctttatgaaaatgaagaaggctacacagagagtctttatgacggtgttggttggactgaagaggttaaaaccttccttcgctacaatgccaataaagctctcatgaacatgggacaagatccacttttcccagattcagctgaagatgtcaacccaatcgttatgaacggtatttcaacaggaacttccaaccatgacttcttctctcaagtcggaaatggttaccttcttggcgaagttgaagccatgcaagacgatgactataactacggtttagactaa

SEQ ID NO: 9181 - DNA, 2160 bp, Streptococcus pneumoniae
  CDS (1)...(2160)
atgggattaaaacatcttgaagacgtgacttacttccgtcttaataacgaaattaaccgtcctgttaatggacaaatcatgcttcataaagacaaggaagccttggatgctttctttaaagaaaatgtagttccaaacactatggtttttgattcaatcaaagacaaaatcaattacctcattgaacacaactacatcgaaacagcctttatcaagaaataccgtccagagttcttggaagaattagctcaatttatcaaagaccaaaacttccaattcaagtcattcatggcagcttataaattttacaatcaatatgccttaaagactaatgacggtgaatactatcttgaaaatatggaagaccgtgtcttcttcaacgccctttatttcgctgatgggaatgaagctgttgcaatcgatattgccaatgaaatcatccaccaacgctaccaacctgctactccttccttcttgaatgctggacgtgctcgccgtggagagttggtatcttgtttcctaatccaagtgacggatgatatgaactctatcggacgttctatcaactcagctcttcaactttcacgtattggtggtggtgtgggaattaccctcagcaaccttcgtgaagctggtgcacctatcaaaggctatgaaggagctgcttcaggtgtcgttcctgttatgaagctttttgaagacagcttctcttactccaaccaattggggcaacgtcaaggtgccggtgttgtctacctcaacgtctttcacccagatatcatcgctttcctttcaactaagaaagaaaacgctgatgaaaaagtacgtgtcaagactctatcacttggtgttgtagtacctgataaattctacgaattggctcgtaaaaatgaagaaatgtacctcttcagcccttactctgtagaaaaagaatacggtgtgccattcaattacatcgacattactgaaaaatacgatgaattggtcgcaaatccaaatattcgcaagacaaaaatcaaggcgcgggatttggaaactgaaatctctaaattgcaacaagagtctggctatccttatgtagtcaacatcgatacggctaaccgtgcaaatcctgttgatggaaagattatcatgagtaacttgtgttctgagattcttcaagttcaagaaccaagcttgatcaacgatgctcaagaattccttcaaatgggaacagatgtttcatgtaacctgggttcaaccaacgtggttaacatgatgacttcacctgattttggtcgttctatccgtgctatggttcgtgcccttactttcgttacagatagttcacatatcgtagctgtaccaacgattgaccatggaaatagccaagcccacacctttggtctcggtgccatgggactgcacagctaccttgcccaacaactcattgaatatggttcacctgagtctgttgaatttacaagcatctactttatgcttatgaactactggaccttggtagagtcaaacaatattgcgcgtgaacgtggtattaccttccacaactttgaaaaatcagactatgctaacggaagttactttgacaagtatgtaactggtgaatttgttccaacatcagaccgtgttaaagaactcttcaaaaatgtctttatccctggtgttgctgattgggctgaacttcgcgacaaggttcaagaagatggtctttaccaccaaaatcgccttgctgtagcgccaaatggttctatcagctatatcaacgacgtttctgcttctatccacccgattacgcaacgtatcgaagaacgccaagagaagaaaattggtaaaatctactaccctgctgctggcttgtctacagaaaccattccttactacacttctgcctacgatatggatatgcgtaaagtcatcgatgtttacgctgctgcgactgaacacgtggatcaaggactttcactcaccctcttcatgcgtagtgacattccaaaaggcctttacgaatggaagagggaaaataaacaaacgacacgtgacttgtccatccttcgtaactatgcctttaacaagggaatcaagtctatctactacgtccgtacctttacagatgacggtggagaagtcggcgccaaccaatgtgaaagctgtgtgatttag

SEQ ID NO: 9182 - DNA, 264 bp, Streptococcus pneumoniae
  CDS (1)...(264)
atggcttctaaagatttccacgtagtggcagaaacaggtattcacgcacgtccagcaacattgttggtacaaactgctagcaaatttgcttcagatatcactcttgagtacaaaggtaaatcagttaaccttaaatcaattatgggtgttatgagtcttggtgttggccaaggtgctgacgtaactatctcagctgaaggtgcagatgcagatgacgctatcgctgcaatctcagaaacaatggaaaaagaaggattggcataa

SEQ ID NO: 9183 - DNA, 1734 bp, Streptococcus pneumoniae
  CDS (1)...(1734)
atgacagaaatgcttaaaggaatcgcagcatctgacggtgttgcagttgcaaaagcatatctactcgttcagccggatttgtcatttgagactattacagtcgaagatacaaacgcagaagaagctcgccttgatgccgctctacaggcatcacaagacgagctttctgttattcgcgagaaagcagtaggtacgctcggtgaagaagcagctcaagtttttgatgctcacttaatggttcttgctgacccagaaatgatcagccaaatcaaggaaactatccgtgcgaagaaagtgaatgcagaagcaggtctgaaagaagttacagatatgtttatcactatctttgaaggcatggaagacaacccatacatgcaagaacgcgcagcggatatccgcgacgtgacaaaacgtgtattggcaaaccttcttggtaaaaaattgccaaacccagcttctatcaatgaagaagtgattgtgattgcgcatgacttgactccttcagatacagctcaattggacaaaaactttgtaaaagcttttgtaaccaacattggtggacgtacaagccactcagctatcatggcacgtacacttgaaattgctgctgtattaggtacaaacaacatcactgaaatcgttaaagacggtgacatccttgctgttaacgggatcactggagaagtgattatcaacccaacagatgaacaagcggcagaatttaaagcagctggtgaagcctatgcgaaacaaaaagctgaatgggcacttttgaaagatgctcaaacagtgactgctgacggtaaacacttcgagttggctgccaatattggtactccaaaagacgttgaaggtgttaacaacaacggtgcagaagctgttggactttaccgtacagagttcttgtacatggattctcaagacttcccaactgaagatgagcagtatgaagcatacaaggctgttcttgaaggaatgaacggtaaacctgttgtcgttcgtacaatggatatcggtggagataaggaacttccttacttcgatatgcctcacgaaatgaacccattccttggattccgtgctcttcgtatctctatctctgagactggagatgctatgttccgcacacaaatccgtgctcttcttcgtgcgtctgttcacggtcaattgcgtatcatgttcccaatggttgcgctcttgaaagaattccgtgcagcgaaagcagtctttgatgaagaaaaagcaaaccttcttgctgaaggtgttgcagttgcggataacattcaagttggtatcatgatcgagattcctgcagcggctatgcttgcagaccaatttgctaaagaagttgacttcttctcaattggtacaaacgacttgatccaatatacaatggcagcagaccgtatgaacgaacaagtttcatacctttaccaaccatacaacccatcaatcctacgcttgattaacaatgtgatcaaagcagctcacgctgaaggtaaatgggctggtatgtgtggtgagatggctggtgaccaacaagctgttccacttcttgtcggaatgggcttggatgagttctctatgtcagcaacatctgtacttcgtacacgcagcttgatgaagaaactcgacacagctaagatggaagagtacgcaaaccgtgcccttacagaatgctcaacaatggaagaagttcttgaacttcaaaaagaatacgttaattttgattaa

SEQ ID NO: 9184 - DNA, 957 bp, Streptococcus pneumoniae
  CDS (1)...(957)
atggatattagaccgcaatcaagtgatgaacttgattcgcaaagaagagtaaggagagacatgtcaaatagtttaaaagggactttactaacagttgtggctggtattgcttgggggttgtcaggaacgagtggccaatacctaatggcacacggaatttcggctctggtcttgaccaacttgcgtcttttaatcgctggtggaattctcatgctcttggcttatgctactgcaaaggataaaatactggtctttttaaaggatagaaagagtttgctgtctcttcttatttttgctctgattggtctttttctcaaccaattcgcctatctgtctgctattcaggagaccaatgcgggaacagcgacggtgcttcagtatgtttgtcctgtcggaattttaatttatagctgtatcaaggatagggtggcaccgacactgggagagatagtttccatcatattcgccatcggaggaaccttcctgatcgcaacacatgggcagttggaccagttatccatgacacctgctggcctgttctggggtctcttttctgccttgacttatgctctatatatcattttacccatagccttgattaaaaagtgggggagcagcttggtcattggtgtgggaatggtcatagcaggtttggtcgcccttccttttacaggggttctacaggccgatatcccgactagtcttgattttctccttgcgtttgcaggcattatccttatcgggactgtctttgcctatacagctttccttaaaggagccagtctgataggaccggtcaagtcaagcttgttggcttcaattgagccaatatcggcgattttctttgccttcttaataatgaatgaacaattttatcccattgattttcttggtatggcaatgatattgtttgctgtaactttgatttctttgaaagatttattcttagaaaaataa

SEQ ID NO: 9185 - DNA, 1563 bp, Streptococcus pneumoniae
  CDS (1)...(1563)
atgagcaacatttcaactgatttgcaagatgtagaaaaaatcatcgtattggactatggtagccagtacaaccagctgatttcacgccgtatccgtgagattggtgttttttcagaactaaaaagccataaaatttcagctgctgaagttcgtgaagtcaatcctgtaggaattattctatcaggtggtccaaattctgtatatgaagatggttcatttgatattgacccagaaatcttcgaactcggaattccaattttgggaatctgttatggtatgcagttattgacccataaacttggaggaaaagttgttcctgcaggtgatgctggaaatcgtgaatacggtcaatcaaccctaactcacacaccatcagcgctttttgaatcaacacctgatgaacagactgttttgatgagccatggtgatgcggttactgagattcctgctgactttgttcgtacaggtacatcagctgactgcccatacgcagccatcgaaaacccagataaacacatttacggtatccaattccacccagaagttcgtcattctgtatacggaaatgatatccttcgtaactttgcccttaacatttgtaaggctaaaggtgactggtcaatggataatttcattgacatgcagatcaaaaaaattcgtgaaaccgtcggtgataaacgtgtccttcttggtctatcaggtggtgttgactcatctgtcgttggggttcttctccaaaaagcgattggcgatcaattgatctgtatcttcgtagaccacggtcttcttcgtaaaggcgaagctgatcaagttatggacatgctcggtggtaagtttggtttgaatatcgtcaaagcagacgctgctaaacgtttccttgacaaacttgctggcgtttctgatcctgaacaaaaacgtaaaatcattggtaacgagtttgtctatgtattcgatgacgaagcaagcaagctcaaagatgtgaaattccttgctcaaggtactttatatacagatgttatcgagtctggtacggatacagctcaaactatcaagtcacaccacaacgtgggtggtcttccagaagatatgcagtttgaattgattgaaccactcaatactctttacaaggatgaagttcgtgctcttggtacagagcttggtatgccagaccatatcgtatggcgccaaccattcccaggaccaggacttgctatccgtgtcatgggtgaaatcactgaagagaaacttgaaaccgttcgtgaatcagacgctattcttcgtgaagaaatcgctaaagctggacttgaccgcgatatttggcaatacttcactgttaacacaggcgttcgttcagtcggtgttatgggtgacggtcgtacgtatgactacacgattgcaatccgtgctatcacttctatcgatggtatgactgctgattttgccaaaattccatgggaagtacttcaaaaaatctcagtacgtatcgtaaatgaagtggatcatgttaaccgtatcgtctacgatattacaagtaaaccacctgcaacagttgagtgggagtaa

SEQ ID NO: 9186 - DNA, 1287 bp, Streptococcus pneumoniae
  CDS (1)...(1287)
atgacaaaaacattaaaacgtcctgaggttttatcacctgcagggactttagagaagctaaaggtagctgttcagtatggagcagatgctgtttttatcggtggtcaggcctatggtcttcgtagccgtgcgggaaactttactttcgaacagatggaagaaggcgtgcagtttgcggccaagtatggtgccaaggtctatgtagcggctaatatggttatgcacgaaggaaatgaagctggtgctggtgagtggttccgtaaactgcgtgatatcgggattgcagcagttatcgtatctgacccagccttgattatgattgcagcgactgaagcaccaggccttgaaatccacctttctacccaagccagtgccactaactatgaaacccttgagttctggaaagagctaggcttgactcgtgtcgttttagcgcgtgaggtttcaatggaagaattagctgagatccgcaaacgtacagatgttgaaattgaagcctttgtccatggagctatgtgtatttcatactctggacgttgtactctttcaaaccacatgagtatgcgtgatgccaaccgtggtggatgttctcagtcatgccgttggaaatacgacctttacgatatgccatttgggaaagaacgtaagagtttgcagggtgagattccagaagaattttcaatgtcagccgttgacatgtctatgattgaccacattccagatatgattgaaaatggtgtggacagtctaaaaatcgaaggacgtatgaagtctattcactacgtatcaacagtaaccaactgctacaaggcggctgtggatgcctatcttgaaagtcctgaaaagtttgaagctatcaaacaagacttggtggacgagatgtggaaggttgcccaacgtgaattggcaacaggtttctactacggtataccatctgaaaatgagcagttgtttggtgctcgccgtaaaattcctgagtacaagtttgtcgctgaagtggtttcttatgatgatgcggtacaaacagcaaccattcgtcaacgaaacgtcattaacgaaggggaccaagttgagttttatggtccaggtttccgtcattttgaaacctatattgaagatttgcatgatgccaaaggcaataaaatcgaccgcgctccaaatccaatggaactattgactattaaagtcccacaacccgttcaatcaggagacatggttcgtgcattaaaagaaggactcatcaatttttataaggaagatggaaccagcgtcacagttcgagcttaa

SEQ ID NO: 9187 - DNA, 1461 bp, Streptococcus pneumoniae
  CDS (1)...(1461)
atgtatccagatgatagtttgacattgcacacggacttgtaccagatcaacatgatgcaggtttactttgaccaagggattcacaataagaaggcggtctttgaggtgtatttccgccaacagccttttaagaacggctatgcggtttttgcaggtttggaaagaattgtgaactatcttgaagacttgcgtttttcagatagtgatatagcctatttggagtcgcttggttatcatggggcgttcttggattaccttcgcaatttcaagttggagttgaccgttcgttctgcccaagaaggggatttggtttttgctaatgaaccgattgtgcaggtggaaggacctctagcccaatgtcagttggtcgaaacggctcttttgaacatcgtcaactaccagaccttggtggcgacgaaggcagctcgtattcgttcggttatcgaagatgaacccttgatggagtttgggacacgtcgggctcaagaaatggatgcggccatctggggaacacgcgcagctgtgattggtggcgccaatggaaccagcaacgtgcgtgcgggtaagctctttgacattcctgttttgggaacccatgcccatgccttggtacaggtttatggcaatgactatgaagctttcaaggcttacgctgcgacccacaaaaattgtgtctttcttgtggatacctatgacacccttcgcatcggtgtaccagctgccattcaggtggcgcgtgagctgggtgatcagattaactttatgggtgtgcggattgactctggggatattgcctacatttctaagaaagtccgtcagcaactggacgaggctggatttacagaggctaagatttatgcttctaatgatttggacgaaaatactatcctcaacctcaagatgcaaaaggccaagattgatgtctggggcgtgggtaccaagctgattacagcctatgaccagccagctcttggggcggtttacaagattgttgcaatcgaagatgaaactggtcagatgcgcaatacgattaagctgtctaataatgcggaaaaagtgtcgacgccaggtaagaagcaggtgtggcgcattaccagtcgtgaaaaaggcaagtcagaaggtgactacatcacttatgatggtgtggatattagcgacatgacagaaatcaagatgttccatccgacctatacatacatcaagaagacggttcgtaattttgatgccgttcctctcttggtggatatcttcaaagaaggtatattagtttacaacttgcctagtttgactgacattcaggattatgcccgtaaggaatttgacaagttgtgggatgagtataagcgtgtgctcaatccgcagcactatccagtggatttggcgcgtgatgtatggcaagataagatggacttgattgataagatgcgcaaggaagcccttggtgaaggagaagaagaatga

SEQ ID NO: 9188 - DNA, 825 bp, Streptococcus pneumoniae
  CDS (1)...(825)
atgagtttgcaagaaacgattatccaagagctgggtgtcaaaccagtgattgatgcccaggaagaaatccgtcgttctattgatttcttaaaaagatatctgaaaaaacatcccttcctaaaaacctttgtactagggatttctgggggacaagattcaaccttggcaggacgtttggcgcaattagctatggaagaactgcgagctgaaacgggagacgatagctacaaatttatcgctgtccgcctgccatacggagtgcaagctgatgaagcagatgctcaaaaagccctagccttcatccagccagatgtcagcttggttgtgaatatcaaggaatcagctgatgccatgacagctgcagttgaagcgacaggtagtcctgtttcagacttcaacaaggggaatatcaaggcacgttgccgtatgattgctcagtatgcccttgctggttcccatagcggagcggtcattggaacagaccacgccgcggaaaatatcacaggtttctttaccaagtttggtgacggcggtgcggatattctccctctttaccgcctcaataaacgccaaggaaaacaactcttgcagaaacttggcgcagagccagccctttatgaaaaaatcccaacggcagacctagaagaagacaaaccaggcctagctgacgaagtcgcacttggagtcacctatgcagagattgacgattacctagaaggcaaaacaatcagcccagaagctcaagcgaccattgaaaactggtggcacaaaggccaacacaaacgccacttacccatcaccgtatttgatgacttttgggagtaa

SEQ ID NO: 9189 - DNA, 1041 bp, Streptococcus pneumoniae
  CDS (1)...(1041)
atgaacagatatatgaatacagctgattttgatttccacttgccagaggaattgattgcccaaacgccccttgaaaaacgtgatgcctccaaactcctcatcgtcaaccgtgagacaggagaaatgcaagataaacacttccactctattattgatatgctggaacctggtgatgcccttgtcatgaacgacacccgagttctccctgcccgcctctatggtcaaaaagtggagacaggaagtcatgtggaacttctcctccttaagaacactagtggagacgagtgggaagttctggctaaacctgccaaacgcctcaaggtcggtactcgtatcagctttggtgatggccgcctcagcgctgtcgttacagaagaattgacccacgggggacgcattgtccgctttgaataccaaagaattttcctagaagtcttggaaagtctgggagaaatgcctctgccaccttatatccacgaaaaattagatgaccgtgaacgttatcaaaccgtctacgccaaggaaagcggctctgctgcagcaccgactgctggtcttcacttcaccaaagaactgctggcagaaatccaagctaagggtgtccatctagtctatctgactctccatgtcggactcggaacctttagacctgtttctgtggataatctggacgaacacgaaatgcactcagagttctatcaactttctgaggaagctgcggccacccttcgctctgtcaaagaaaatggtggtcgtgtcatcgctgtcggaaccacttctatccgtaccttggaaactattggttccaagtttgatgggcaaatccaagcagattctggttggaccaatatctttatcaaacctgggtatgagtggaaggtcgtggatgccttctcaaccaacttccacctgccaaaatcaactctggtcatgttggtttctgcctttgcaggccgtgaattagtcttagatgcctaccaccattccatccaagaacactaccgcttcttcagttttggtgacgccatgtttatttattga

SEQ ID NO: 9190 - DNA, 186 bp, Streptococcus pneumoniae
  CDS (1)...(186)
gtgaaaaaaatgtctaaaacagtagtacgtaagaatgaatctcttgacgacgcacttcgccgtttcaaacgtgcggttactaaagctggtactcttcaagaaacacgcaaacgtgaattctatgaaaaaccttctgtaaaacgtaaacgtaaatcagaagtagctcgtaaacgtaaaaaattctaa

SEQ ID NO: 9191 - DNA, 948 bp, Streptococcus pneumoniae
  CDS (1)...(948)
  misc_feature (1)...(948): n = A,T,C or G
atgatgtcggttttagtaaaagaagtgattgaaaagcttagactagacattgtctatggtgaaccagaattgcttgaaaaggaaatcaatatagcggatattacgcgacctggtcttgaaatgacaggctattttgactactatacaccagagcggattcaacttttggggatgaaggagtggtcttatctgatcagcatgccttccaacagccgttatgaagttttgaaaaaaatgtttctacctgagacaccagcagtcattgttgcccgtggtttggtggttccagaggagatgttaaaggctgctagagaatgtaagattgctattttaaccagccgtgcagctaccagtcgtttatctggagagttatctagctatctggattctcgtttggcagaacgtaccagtgtgcacggtgtcttgatggatatttatgggatgggcgtcttgattcagggagatagtggaattggtaagagtgagacaggtcttgagcttgtcaaacgtggtcaccgtttggtagccgatgaccgtgtcgatatctttgccaaggatgagattactctctggggtgaaccagctgaaattttgaaacacttgattgaaattcgtggggttggtattatcgatgttatgagtctctacggtgcgagtgctgtcaaggattcttcacaggttcagcttgctgtctatttggaaaattacgatacgcataagacctttgatcgtcttggaaacaatgcagaggaacttgaagtttctggcgtagccattcctcgtattcgtattccagttaaaacaggtcgtaatatctctgttgtgattgaggcagctgccatgaattatcgtgccaaggaaatgggctttgatgcgacccgtttgttcgacgaacgactgacaagtctcatcgctcgaaatgaggtgcgaaatgcaaaatancattga

SEQ ID NO: 9192 - DNA, 843 bp, Streptococcus pneumoniae
  CDS (1)...(843)
atgaatacctatcaattaaataatggagtagaaattccagtattgggatttggaacttttaaggctaaggatggagaagaagcctatcgtgcagtgttagaagccttgaaggctggttatcgtcatattgatacggcggcgatttatcagaatgaagaaagtgttggtcaagcaatcaaagatagcggagttccacgtgaagaaatgttcgtaactaccaagctttggaatagtcagcaaacctatgagcaaactcgtcaagctttggaaaaatctatagaaaaactgggcttggattatttggatttgtatttgattcattggccgaacccaaaaccgctcagagaaaatgacgcatggaaaactcgcaatgcggaagtttggagagcgatggaagacctctatcaagaagggaaaatccgtgctatcggcgttagcaattttcttccccatcatttggatgccttgcttgaaactgcaactatcgttcctgcggtcaatcaagttcgcttggcgccaggtgtgtatcaagatcaagtcgtagcttactgtcgtgaaaagggcatcttattggaagcttgggggccttttggacaaggagaactgtttgatcgcaagcaagtccaagacatagcagcaaatcacggaaaatcggttgctcagatagccttggcctggagcttggcagaaggatttttaccacttccaaaatctgtcacaacctctcgtattcaagctaatcttgattgctttggaattgaactgagtcatgaggagagagaaaccttaaaaacgattgctgttcaatcgggtgctccacgagttgatgatgtggatttctag

SEQ ID NO: 9193 - DNA, 918 bp, Streptococcus pneumoniae
  CDS (1)...(918)
atgaatcaagaagaattagctaagaaaatgttgcttccatcaaagaattctcgtctggagaaattaggaaaaggtttgacctttgcctgtctttctttgatagtcatccttgtggccatgattttggttttcgtagcgcaaaaaggcttgtcgaccttctttgtcaatggtgtgaatatctttgactttcttttgggaggaacttggaatccttctagtaaagaatttggtgcccttcctatgattttgggttcctttatcgttaccattctctcagcccttatcgcaacaccctttgctattggtgcagcagtttttatgaccgaagtatcaccaaaaggggcgaagattttgcaaccagctattgaactcctggttgggattccttcagtagtgtacggatttattggcttgcaagtcgtcgttccctttgttcgcagtgtctttggtgggactggttttgggattttgtcagggatttccgtcctctttgtcatgattttgccgaccgtaacctttatgacaacggatagcttgcgtgcggttcctcgttattatcgtgaagccagtttcgctatgggagccactcgctggcagactatctggcgtgtgatcttgaaggcggcccgttctggtattttcactgcagtggtctttgggatggcgcgtgcctttggtgaggctttagctatccagatggttgtcggaaactcagctgttatcccaacttccttgaccacaccagctgcaactttaacttctatattaactatgggaattgggaacactgtcatgggaactgtaaataataatgttctctggtcactggccttggtactgctcttgatgagtttagtttttaacagtgtgattaaattgattacgaaagaaagaggaaagaaaaattatgcgcgctaa

SEQ ID NO: 9194 - DNA, 816 bp, Streptococcus pneumoniae
  CDS (1)...(816)
atgaaatcaaaaaaatggatatttgttttatgtaattttcttgcaagtttcttcttagtagcttgccagtcaggttctaatggttctcagtcagctgttgaggccattaagcaaaaggggaaattagttgtggcaaccagtcctgactatgcaccctttgaatttcaatcattggttgatggaaagaaccaggtagtcggtgcagacatcgacatggctcaggctatcgctgatgaacttggggttaagttggaaatctcaagcatgagttttgacaatgttttgaccagtcttcaaactggtaaggctgacctagcagttgcaggaattagtgctactgacgagagaaaagaagtctttgatttttcaatcccatactatgaaaacaagattagtttcttggttcgtaaggctgatgtggaaaaatacaaggatttaactagcctagaaagtgctaatattgcagcccaaaaagggactgttccagaatcaatggtcaaggaacaattgccaaaagctcaattaacttccctaactaatatgggtgaagcagtcaatgaattgcaggctggaaaagtagatgctgttcatatggatgagcctgttgcacttagttatgctgctaaaaacgctggcttagctgtcgcaactgtcagcttgaagatgaaggacggcgacgccaatgccgttgctcttagaaaaaatagtgatgatttgaaagaagtggtagacaaggtcatccaaaaacttaagaatgaaggaacttaccaaagctatcttgaaaaagcagcaagtctaactgaagttgaagaataa

SEQ ID NO: 9195 - DNA, 732 bp, Streptococcus pneumoniae
  CDS (1)...(732)
atggataagaacgtgcaggaaccagtgaaattatttcaatacaatactcttggagccttgatggctggcctttatggtggtactatgacagtaggagaattgctagaacatggtgaccttggtttgggaaccttggattccattgatggggaattgattgtcttggatggcaaggcttatcaggccaaagggtcaggagaccagccagaaattgtggaagtgtcaccagatgcccttattccttacgctgcagtggtaccgcatcaggcagaggtcattttccgccagcgctttgagatgacagacaaggaattgaaagaacgaattgagtcttattatgatggggaaaatcttttccgctctatcaagattcggggggaattttcacatatgcatgtgcgtatgattcctaagtcaacacccgataccaagtttgctgatgtcgcaacccatcaaccggaatatagtcgtgacaatgttgcggggactattgttggtttctggacgcctgagattttccatggggtcagtgtggcaggctaccatctgcacttcatatcagatgatttgaccttcggtggacatgtcatggattttgtcatcaaggaaggcattatcgaggtgggagcagttgaccagttggaccaacgtttcccagtccaagaccgtcaatacttgtttgctaagttcaatgttgacgagatgaaaaaagatattgaaaaggcagaatag

SEQ ID NO: 9196 - DNA, 951 bp, Streptococcus pneumoniae
  CDS (1)...(951)
atgtctgtaagagaaaaaatgcttgaaatcttagaaggaattgatatccgttttaaggaacccttgcataggtatagttatactaaagtaggtggagaggctgattatttggtctttccacgaaatcgttttgagttggctcgcgttgtgaaatttgccaaccaagaaaatatcccttggatggttcttggcaatgcaagcaatatcatcgttcgtgatggtgggattcgtggatttgtcatcttgtgtgacaagctcaataacgtttctgttgatggctataccattgaagcagaagctggggctaacttgattgaaacaactcgcattgccctccgtcatagtttaactggctttgagtttgcttgtggtattccaggaagcgttggcggtgctgtctttatgaatgcgggtgcctatggtggcgagattgctcacatcttgcagtcttgtaaggtcttgaccaaggatggagaaatcgaaaccctgtctgctaaagacttggcttttggttaccgccattcagctattcaggagtctggtgcagttgtcttgtcagttaaatttgccctagctccaggaacccatcaggttatcaagcaggaaatggaccgcttgacgcacctacgtgaactcaagcaacctttggaatacccatcttgtggctcggtctttaagcgtccagtcgggcattttgcaggtcagttaatttcagaagctggcttgaaaggctatcgtatcggtggcgtagaagtgtcagaaaagcatgcaggatttatgatcaatgtcgcagatggaacggccaaagactacgaggacttgatccaatcggttatcgaaaaagtcaaggaacactcaggtattacgcttgaaagagaagtccggatcttgggtgaaagcctatcggtagcgaagatgtatgcaggtggttttactccctgcaagaggtag

SEQ ID NO: 9197 - DNA, 2619 bp, Streptococcus pneumoniae
  CDS (1)...(2619)
atgaaacaactatctagtgcacaagtacgccaaatgtggcttgatttctgggcgaccaaaggtcactcagtagaaccatcagtaagtttggttcctgtaaatgacccaactcttttgtggatcaactctggggtagcaacccttaagaaatactttgacgggaccattatccctgaaaatccacgtattaccaatgcccaaaaggctatccgtaccaacgacatcgaaaacgtagggaagactgcgcgtcaccataccatgtttgaaatgctggggaacttctctatcggggattacttccgtgacgaagctatcacttgggcttatgagcttttgacaagccctgaatggtttgatttccctgctgaaaaactttacatgacctactatccagacgataaagattcttacaaccgctggattgaagtgggagtggatccaagtcacttgattccaattgaggacaacttctgggaaatcggtgcgggaccttctggaccagatacagaaatcttctttgaccgtggggaagcctttgacccagaaaatatcggtcttcgcctgcttgcagaagatattgaaaacgaccgttatattgaaatctggaacatcgttttgtcacaatttaacgcagaccctgctgttcctcgtagcgaatacaaggaattgccacataagaacattgatacgggcgctggtttggagcgtttggtggccgttatccaaggggctaagaccaactttgaaacggacctcttcatgccgattatccgtgaagtcgagaaattgtctggtaaggtttatgaccaagatggcgacaacatgagcttcaaggttatcgcagaccacattcgttctctttcatttgctatcggtgatggtgcccttccaggaaatgaaggtcgtggttatgttcttcgtcgtcttctccgtcgtgcttctatgcatggtcaaaaattgggtatcaacgagcctttcctttacaaattggttccaactgttggaaaaatcatggaaagctactacccagaagtgcttgagaaacgtgactttattgagaaaatcgttaagagcgaagaagaatcatttgcccgtacccttcactcaggtcaacactttgcccaaggcattgtggcagacttgaaagaaaaaggtcaatctgtcattgctggtcaagatgtctttaaactctatgatacttatgggttcccagttgaattgactgaagaaatcgctgaagaagctggtatgactgtagaccgtgaaggttttgaagcagccatgaaagaacagcaagaacgcgcgcgtgcgtcagctgtcaagggtggctcaatgggtatgcaaaatgaaactcttcaaaacatcactgtagaaagtgtcttcaactacaatactagccaattgtcttctaaattggtagctatcgttgctgacaatgcagaagtaggagctgtttcagaaggaactgcctctcttatctttgcggaaacgtcattttatgctgaaatgggtggacaggtagctgactacggacaaatcttggatgagtcaggtaagattgtggctactgtgaccaatgttcagaaagccccaaatggtcaagcccttcatacagttgaagtccttgcaccgcttgccttgaaccaagaatataccttggcaattgatagcaatcgccgtcaccgtgtcatgaaaaaccacactgcgactcatttgcttcacgctgcccttcacaatatccttggaaaccacgcaacacaggcaggatctcttaacgaagttgaattccttcgctttgactttacccacttccaagcagtaactgctgaggaacttcgtgcgattgaacagcaagttaacgagaaaatttgggaagcacttgaagtgaagacagttgaaacggatattgacactgctaaagaaatgggagctatggccctctttggtgagaaatacggcaaggaagttcgtgtcgtgactatcggtgactactctattgaactttgtggtggtactcatgttgacaacacttctgagattggtctcttcaaaattgtcaaagaagaaggaatcggttcaggaactcgccgtatcttggcagtgactggtaaggaagcctttgaagcctatcgtgaacaagaggatgctcttaaagctatcgcagcaaccttgaaagcacctcaagtcaaggaagtacctcacaaggtagaaggacttcaagaacaacttcgtcaacttcaaaaagaaaatgctgagttgaaagaaaaagccgcagctgcagccgcaggcgatatcttcaaagatgttaaggaagtcaacggtcatcgttacattgctagtcaagtgtctgtatccgatgacggtgcccttcgtacttttgcagataactggaaacaaaaagactactctgatcttcttgtcctagttgccgctatcggtgacaaagtcaatgtccttgtagcaagcaagacaaaagaccttcatgcaggaaaccttgtcaaagaattagcaccaatcatcgatggacgtggtggtggtaaaccagatatggccatggcaggaggaagcaaccaacctaagatccaagaattgttggatgcagtagcaggtaaattgtaa

SEQ ID NO: 9198 - DNA, 750 bp, Streptococcus pneumoniae
  CDS (1)...(750)
atgattgaatttcaaaatgttagtaagttgtatggtgataaagaggccttgagtaatctcaatttgcagattgaaaatggagagattatgggcttgattggtcataatggggctggaaaatcgaccaccataaaatccctagtcagtatcatttcacccagcagtggtcgtattttggtaaatggtcaggagttatcggaaaatcgcttggcgatcaaacgaaagattggctacgtagcagactcgcctgacttatttttacgtttaacggccaatgaattttgggaattgatcgcctcatcctatgatctgactagctctgacttggagactagtctagctaggctattgaacgtttttgattttgctgaaaatcgttatcaggttattgaaaccctttctcatggaatgcgtcagaaagtttttgtcatcggggcactcttgtctgatcctgatatttgggtcttggacgaacccttgactggtttggatccccaggctgcctttgatttgaaacagatgatgaaggaacatgcacaaaaagggaagacagtcttgttttcaactcatgtcctagaggtggcagagcaagtctgtgatcggattgccattttgaaaaaggggcatttgatttattgtggtagtgtagaggacttgagaaaagattacccagaccagtctttggaaagtatctaccttagtcttgctggtagaaaagaggaggttgcggatgcgtctcaaggtcattaa

SEQ ID NO: 9199 - DNA, 678 bp, Streptococcus pneumoniae
  CDS (1)...(678)
atgaaattaatcgtttcagtaatgccaagaagtttagaggaggctcaggctctggatgccacgaggtacctggatgccgacatcattgaatggcgtgccgactatctgcctaaagaagcgattttgcaggtagctccagccatttttgaaaaattcgcaggccgtgagttggttttcacgctacgaactcgctccgaaggtggagaaatcgacctttctccagaagagtatatccatctaatcaaggaagttgcgcaactctatcaaccagactatattgattttgagtactatagctacaaggatgtttttgaggaaatgctggacttcccaaatcttgttttgagttaccataatttccaagaaacacctgagaacatgatggaaatcttgtcagagttgacgatcctaaatccaaaacttgttaaggttgcggtgatggctcacacggagcaggatgtcttagacttgatgaactatacacgaggctttaaaaccctcaatcctgaacaggaatatgtgaccatttctatgggtaaggtgggcaaggtctctcgtatcactgcggatgtgactggttcgagttggtcttttgccagtctggatgaggttagtgcccctgggcagatttctctagctagcatgaaaaaaatcagggagattttggatgaagcttga

SEQ ID NO: 9200 - DNA, 855 bp, Streptococcus pneumoniae
  CDS (1)...(855)
atgaagcttgatggctatacacgtttagctgcagttgttgccaatcctattaagcattctatttctcccttcatccacaatagagcctttgaggcgacagctaccaacggtgcttatgtggcttgggagattgaagcgagtgacttggtagaaacagtggccaatattcgtcgctaccagatgtttggcatcaatctgtccatgccctataaggagcaggtgattccttatttggataagctgagcgatgaagcgcgcttgattggtgcggttaatacggttgtcaatgagaatggcaatttaattggatataatacagatggcaagggattttttaagtgcttgccttcttttacaatttcaggtaaaaagatgaccctgctgggtgcaggtggtgcggctaaatcaatcttggcacaggctattttggatggcgtcagtcagatttcggtctttgttcgttccgtttctatggaaaaaacaagaccttacctagacaagttacaggagcagacaggctttaaagtggatttgtgtgctttagaatatgtttctgaactgcaagcaaggattgccgagtcggatttgctagttaatgccaccagtgtgggcatggatggccaatcctctcctgttcctgaaaacatagtcttaccagaaactctcttagttgcagatatcatataccaaccctttgaaacaccgtttttgaaatgggctagaagtcagggcaatccagcagtcaatggtctgggaatgttgctctatcaagctgcagaagcttttcaactgtggacaggcaaggaaatgccgacagaagagatttggcagtctttaacagaaaaataccaataa

SEQ ID NO: 9201 - DNA, 1167 bp, Streptococcus pneumoniae
  CDS (1)...(1167)
atgagatatttaactgcaggagaatcacacggcccccgtctaacagctattattgagggaattccagctggacttccattgacagctgaggatatcaatgaggaccttagacgccgtcagggtggctacggtcgtggtggtcgtatgaagattgagaatgaccaggttgtctttacttcgggcgttcgccacgggaagacgacaggggcgcctattactatggatgtcatcaataaggaccaccagaaatggctggacatcatgtctgcggaggacattgaagaccgccttaaaagcaagcggaaaattactcatcctcgcccaggtcatgccgatttggttggggggattaagtaccgttttgatgatttgcgaaattctttggagcgttcatcagctcgtgaaaccaccatgcgggtggcagttggtgcagtagccaaacgcctcttggctgagctggatatggagattgccaaccatgtcgtggtctttggtggtaaggaaatcgatgttcctgaaaatctgacagtcgctgaaattaagcaaagagctgcccagtctgaagtttctattgtcaaccaagaacgagaacaggaaatcaaggactatattgaccaaatcaaacgtgatggtgataccatcggtggggttgtggagacagtcgtcggaggcgttccagttggtcttggttcctatgtccaatgggatagaaaattggatgcaagattggctcaagctgttgtctctatcaatgcctttaaaggggtggaatttggtcttggctttgaggctggttatcgtaaaggcagccaagttatggatgatattctctggtctaaagaagacggttatactcgccgtaccaataatctaggtggttttgaaggtggtatgactaatgggcaacccatcgttgttcgtggggtcatgaaacctattcctactctttataaacctcttatgagtgtggatatcgaaacccacgaaccttacaaggcaaccgtggagagaagcgatccgactgctcttccagctgcaggaatggtcatggaagcagttgtagcaacggttctggcgcaagaaatcctcgaaaaattctcatcagataatcttgaggaactaaaagaagcggtagccaaacaccgagactatacaaagaactattaa

SEQ ID NO: 9202 - DNA, 1275 bp, Streptococcus pneumoniae
  CDS (1)...(1275)
atgagtaaagaaaatcccttaagtcatcatgagcagttgcgttatgattatttgctaaaaaatattcactatctcaatgagagagaaaaaaatgagtttgcctatttgcaagaaaagctaactcttgctaggggaaatagtagctctagcttggaacaagaaagagaagagcaggttgacttaccaagctatgcgaaccggagtcgctcacaatccaaatcacaagcactctctttccctccaaaaaagaaaagacggaagctccgtcttaaacgaatttttatggtgattttttcacttttggtctgtgtggctttggccatggtattcatgtttttgcgtggttaccaagatgctagcgcaaagaaaactgctgatgcccgggcagctcaagtagaagtctttaatggtcaggacactagagatggagttaatattttaatcatgggtactgatggtcgaatcggccagaacagtgttgagacacgaactgactctattatggtattaaatgtcgggggctcagataagaaaatgaagctagtcagtttcatgcgtgataatttggtctatatagatggttatagtcaagtgattaacggtagaaaacagacagataacaagttaaacgtagcctacgagttaggagaacaagaggggcaaaaaggggcagaaatggttcgccaagtcttgaaagataattttgacttggacattaagtactacgccttggttgatttccaggcctttgccacagcgattgacacgcttttccctgatggggtgacgattgatgctcaattttcaacattgaatgggcgtcccctaacagaagctacagtcggagatgatttatacgctaccgagactgagtctccaacccaaaccattaaagtcggaaaacagcagatgaatggctcgaccctgctcaattatgctcgtttccgtgatgatgatgaggcggattacggccgtacaaaaagacagcaacaagttttaacagcaattttagagcaaattaaagatcccactaaacttttcactggttctgaagctcttggaaaggtttttgctatgacctcaaccaacgtaccctatactttcctcctaacaaacggtttatctgttttggatggagcaaaaaatggtattgaaaaattgacgattccagaactgggtgactgggtagatgcctatgatgtttatggaggcttgggcttgctggttgatcaaaacaaatatcaaaccaagctcgctcaaatgggcttgagataa

SEQ ID NO: 9203 - DNA, 588 bp, Streptococcus pneumoniae
  CDS (1)...(588)
gtgcgggcttgtatatttacgagtccgctattggttttctctaataaaacaaaagaggtgaaaaccatagcaaagcaagacttattcatcaatgatgagattcgtgtacgtgaagttcgcttgattggtcttgagggagaacagctaggcatcaagccactcagtgaagcgcaagctttggctgataacgctaatgttgacctagtattgattcaaccccaagccaaaccgcctgttgcaaaaattatggactacggtaagttcaaatttgagtaccagaagaagcaaaaagaacaacgtaaaaaacaaagcgttgttactgtgaaagaagttcgtctaagtccaactattgacaagggtgactttgatacaaaacttcgtaatgcacgtaagttccttgaaaaaggaaataaagttaaggtatctattcgctttaagggtcgtatgattacccataaagagattggtgcaaaagttttagccgagtttgctgaagcaactcaagatattgccatcatcgaacaacgtgctaaaatggatggacgtcaaatgttcatgcaattggcgccagcgactgacaaaaaataa

SEQ ID NO: 9204 - DNA, 201 bp, Streptococcus pneumoniae
  CDS (1)...(201)
atgccaaaacaaaaaacacaccgcgcatcagctaaacgtttcaaacgtacaggttctggtggacttaaacgtttccgtgcttacacttctcaccgtttccacggaaaaactaagaaacaacgtcgtcatcttcgtaaagcatctatggtgcattcaggagattacaaacgtatcaaagcaatgcttactcgcttgaaataa

SEQ ID NO: 9205 - DNA, 360 bp, Streptococcus pneumoniae
  CDS (1)...(360)
atggcacgtgttaaaggtggcgttgtatcacgcaaacgtcgtaaacgtattcttaaattagcaaaaggttactatggagctaaacacatcttgttccgtactgcaaaagaacaagtaatgaactcttactactatgcataccgtgaccgtcgtcagaaaaaacgtgacttccgcaaattgtggattactcgtatcaatgcggcagctcgtatgaacggactttcatactcacaattgatgcatggtttgaaattggctgagattgaagttaaccgtaaaatgcttgctgacttggctgttaacgatgcagtagctttcacagctcttgcagatgcagctaaagcaaaacttggtaaataa

SEQ ID NO: 9206 - DNA, 1683 bp, Streptococcus pneumoniae
  CDS (1)...(1683)
atggaatacaatcacaaggagagaacgatgtcatttgacggattttttttacaccacatagttgaggaattgcgaacgaagttagtgaatggtcgcatccagaaaatcaatcagccttttgaacaagagttggtcttgcaaatccgcagcaatcgccaaagccatcgcctgctcctttctgcccatccagtttttggacgcattcagctgacccaaacgacttttgaaaatccagctcaaccttctacctttatcatggttttgagaaagtatttgcagggggccctgattgagtcgattgagcaagtggaaaatgaccgtattgtggaaatgacagtttccaataaaaacgagattggagaccatatccaggctaccttgattatcgaaattatggggaaacacagtaatattctactggtcgataaaagcagtcataaaatcctcgaagttatcaaacacgtcggtttttcacaaaatagctaccgcaccttacttccaggatcgacctatatcgctccgccaagtacagaatctctcaatccttttactatcaaggatgaaaagctctttgaaatcctgcaaacccaagaactaacagcaaaaaatcttcaaagcctctttcaaggtctgggacgcgatacggcaaatgaattggaaaggatactggttagtgaaaaactttccgctttccgaaattttttcaatcaagaaaccaagccatgcttgactgagacttccttcagtccagttccttttgcaaatcaggcgggagagccttttgcaaatctttctgatttgttggacacctactataagaataaggctgagcgcgaccgcgtcaaacaacaggccagtgaactgattcgtcgtgttgaaaatgaacttcagaaaaaccgacacaaactcaaaaaacaggaaagagagttactggcgacagacaacgctgaagaatttcgtcaaaaaggagaattgctgacaaccttcctccaccaagtgcctaacgaccaagaccaggttatcctagacaactactataccaaccaacctatcatgattgcgcttgataaggctctgactcccaaccagaatgcccaacgctattttaaacggtatcagaaactcaaagaagctgtcaaatacttgactgatttgattgaagaaaccaaagccactattctctatctggaaagtgtagaaaccgtcctcaaccaagctggactggaagaaatcgctgaaatccgtgaagaattgattcaaacaggttttatccgcagaagacaacgggagaaaatccagaaacgcaaaaaactagaacaatatctagcaagcgatggcaaaaccatcatctatgtcggacgaaacaatcttcaaaatgaggaattgacctttaaaatggcccgcaaggaggaactttggttccatgctaaggacattcctggaagccatgttgtcatctcaggaaatcttgacccatctgatgcagtcaagacagacgcagcagagttagctgcctacttctctcaagggcgcctgtcgaatctggtgcaggtagatatgattgaagtcaaaaaactcaataaaccaactggtggaaaacccggctttgtcacttacacaggacaaaagaccctccgcgtcacaccagactccaaaaaaattgcatccatgaaaaaatcctga

SEQ ID NO: 9207 - DNA, 900 bp, Streptococcus pneumoniae
  CDS (1)...(900)
atgacttttaaatcaggctttgtagccattttaggacgtcccaatgttgggaagtcaacctttttaaatcacgttatggggcaaaagattgccatcatgagtgacaaggcgcagacaacgcgcaataaaatcatgggaatttacacgactgataaggagcaaattgtctttatcgacacaccagggattcacaaacctaaaacagctctcggagatttcatggttgagtctgcctacagtacccttcgcgaagtggacactgttcttttcatggtgcctgctgatgaagcgcgtggtaagggggacgatatgattatcgagcgtctcaaggctgccaaggttcctgtgattttggtggtgaataaaatcgataaggtccatccagaccagctcttgtctcagattgatgacttccgtaatcaaatggactttaaggaaattgttccaatctcagcccttcagggaaataacgtgtctcgtctagtggatattttgagtgaaaatctggatgaaggtttccaatatttcccgtctgatcaaatcacagatcatccagaacgtttcttagtttcagaaatggttcgcgagaaagtcttgcacctaactcgtgaagagattccgcattctgtagcagtagttgttgactctatgaaacgagacgaagagacagacaaggttcacatccgtgcaaccatcatggtcgagcgcgatagccaaaaagggattatcatcggtaaaggtggcgctatgcttaagaaaatcggtagtatggcccgtcgtgatatcgaactcatgctaggagacaaggtcttcctagaaacctgggtcaaggtcaagaaaaactggcgcgataaaaagctagatttggctgactttggctataatgaaagagaatactaa

SEQ ID NO: 9208 - DNA, 621 bp, Streptococcus pneumoniae
  CDS (1)...(621)
atgaaactctactttgtccgccacggtcgtaccctctggaaccaagaaggtcgttttcaaggtgctagcggtgattctcctcttcttcctgaatccattgaaaccctaaaacgacttggccagtatctcaaggaaattccttttgatcagatttattcaagtgatttacctcgagcggtcaaatctgctgagattatccaaagtcaactccataccccctgttctttagaaatcgttcctaatctccgtgaatggcaacttgggaagttagaaggtttgaaaattgcaaccctggaagctatttacccgcaacaaatccaggcttttcgttcaaatcttgctcaatttgacactcgaatgttcggagccgaatccctctatagtacaactcagcggaccatccaatttatcaaatcattaaaagatagtccagctgagcgtattctaattgtcggacacggcgccaatcttactgccagtcttcgtactctcctaggctataaagaaccacttcttcgtaaagatggcggtctagcaaatgccagcctgaccattatagaaacccatgattttgaaacattcactctcaatacttggaatgatacttcttatcaatcataa

SEQ ID NO: 9209 - DNA, 1440 bp, Streptococcus pneumoniae
  CDS (1)...(1440)
gtgcggaatgatttgaaatatggtataataaaagggaatttctacagaaaagagaagattatgtcaaattttgccattattttagcagcgggtaaagggactcgcatgaaatctgatttgccaaaagttttgcacaaggttgcgggtatttctatgttggaacatgttttccgtagtgtgggagctatccaacctgaaaagacagtaacagttgtaggacacaaggcagaattggttgaggaggtcttggctgaacagacagaatttgtgactcaatctgaacagttgggaactggtcatgcagttatgatgacagagcctatcttagaaggtttgtcaggacacaccttggtcattgcaggagatactcctttaatcactggtgaaagcttgaaaaacttgattgatttccatatcaatcataaaaatgtggccactatcttgactgctgaaacggataatccttttggctatggacgaattgttcgtaatgacaatgctgaggttcttcgtattgttgagcagaaggatgctacagattttgaaaagcaaatcaaggaaatcaacactggaacatacgtctttgacaacgagcgtttgtttgaggctttgaaaaatatcaataccaataacgctcaaggcgaatactatattacagacgtcattggtattttccgtgaaactggtgaaaaagttggcgcttatactttgaaagattttgatgaaagtcttggggtaaatgaccgtgtggcgcttgcgacagctgagtcagttatgcgtcgtcgcatcaatcataaacacatggtcaacggtgttagctttgtcaatccagaagcaacttatatcgatattgatgttgagattgctccggaagttcaaatcgaagccaatgttatcttgaaagggcaaacgaaaattggtgctgagactgttttgacaaacggtacttatgtagtggacagcactatcggagcaggagcggtcattaccaattctatgattgaggaaagtagtgttgcagacggtgtgacagtcggtccttatgctcacattcgtccaaattcaagtctgggtgcccaagttcatattggtaactttgttgaggtgaaaggatcttcaatcggtgagaataccaaggctggtcatttgacttatatcggaaactgtgaagtgggaagcaacgttaatttcggtgctggaactattacagtcaactatgacggcaaaaacaaatacaagacagtcattggagacaatgtctttgttggttcaaattcaaccattattgcaccagtagaacttggtgacaattccctcgttggtgctggttcaactattactaaagacgtgccagcagatgctattgctattggtcgcggtcgtcagatcaataaagacgaatatgcaacacgtcttcctcatcatcctaagaaccagtag

SEQ ID NO: 9210 - DNA, 969 bp, Streptococcus pneumoniae
  CDS (1)...(969)
atgtcaactttagataaaaatcttttgctagaaatgttccgtaagatggaagaaatccgtcgcatggacttaaaaattgcacaattagtaaagaaagggaaagtgccaggaatgacgcacttttctgttggtgaagaggcagctaacgtgggggctatgttagctctcaatccagatgatctgattacctcaaaccaccgtggacacgggcaagctattgctaaagggattgacctcaacggaatgatggctgaaatccttggtaaatacactggaacctgtaaagggaaaggtggatctatgcatatcgctgaccttgatgctgggaaccttggtgccaatggtatcgtaggtggtggtatggggatcgctgtcggtgcagccctcagtcagcaaatgcaaaataccggtaaaatcgttgtttgcttctttggagatggtgcgaccaatgaaggtgttttccacgaagcagtgaacatggcttctatctggaacctgccagtcattttctattgcattaacaacggttacggtatctctgcggatatcaagaaaatgaccaatatagaacatatccatcaacgtagcgccgcttatggaattcctggaatgttcatcgaagacggtaacaatgtcatcgatgtctatgaaggatttcagaaagctgtagaccatgttcgcagtggcaatggtccagtcttgattgaaagtgtaacttatcgctggcttggtcactcatcatctgaccctggtaaatatcgtacgcgtgaagaagtggaattgtggaaacaaaaagatccaatcgaaaacctccgcaattaccttattgaaaataacattgcaagtgccgaagaattggaaaaaatccaagcgcaagtaaaggaagcagtagaagcttctgttaaatttgcagaggaaagcccattcccaccgcttgaatcagcctttgaagatatttacacagactaa

SEQ ID NO: 9211 - DNA, 993 bp, Streptococcus pneumoniae
  CDS (1)...(993)
atggaaacaaaaacaatgtccttccgtgacaccattatccttgctatgtctgaggaaatgcgtcgcgatgaaaatgtgttcttgatgggagaagatgtcggtgtcttcggaggagacttcggtacttctgttggaatgcttgaagaatttggtccagaacgtgtccgtgactgtccgatttctgaagctgccatctctggagcagcagcaggagcagccatgacaggacttcgtccaatcgtcgatatgaccttcatggacttctctgttattgccatggacaatatcgtcaaccaagctgctaaaacacgttacatgtttggtggtaaaggtcaggttccaatgactgttcgttgtgcagctggtaacggagttggctctgccgcccagcactcacaatctctagagtcttggtttactcacattccaggacttaaggttgtggcacctggaacacctgcggacatgaaaggcctgcttaagtcttctatccgtgataacaacccagttattatacttgagtacaagtcagaatttaaccaaaaaggggaagtgccagttgatccagactacacaattccacttggggttggtgaaatcaaacgccaaggaacggatgtaacagttgttacttatggaaaaatgcttcgccgtgtggttcaagctgctgaagaattagcagaagaaggaatttcagttgaaattgttgacccacgtacccttgttccgcttgataaggatatcatcataaactcagtgaagaagactggtaaggttattctggtcaacgatgcccacaaaacaagtggctatatcggtgaaatttcagctattatttcagaatcagaagcatttgactatctagatgcaccaatacgccgttgtgcaggagaagatgtgccgatgccttatgcacaaaacctagaaaatgcaatgattccaacagttgaaagtatcaaagatgcaatccgaaaaacttataacaaagactag

SEQ ID NO: 9212 - DNA, 1044 bp, Streptococcus pneumoniae
  CDS (1)...(1044)
atggctgatgacaagctaagagcgactcctgcagctagaaagttagcggatgatttagggataaacctctacgacgtttctggctcaggtgcaaacggtcgtgtccacaaagaagacgtggaaacttataaagacacaaacgtggttcgcatttcgccacttgcaaaacgaattgccctcgaacataacattgcttggcaggaaatccaaggaaccggtcatcgtggtaaaatcatgaagaaggatgttttggccctgcttcctgaaaatatcgaaaacgatagcatcaaatctcctgctcagattgaaaaagtggaagaagtccctgataacgtaacaccatatggtaaaatcgagcgtattccaatgacaccaatgcgtaaggttattgcccaacgcatggttgaatcttacttgactgcgccaaccttcaccctcaactatgaagttgatatgactgaaatgttggctcttcgtaagaaggttcttgagccaatcatggaagcaactgggaagaagactactgtaacagaccttctttcgcttgcagttgttaagactcttatgaaacacccatacatcaacgcttcattgacagaagatggcaagactattatcactcacaactatgtcaatcttgccatggcagttgggatggataatggattgatgacacctgttgtttacaatgctgagaagatgagtctttcagaactggttgtagcctttaaggatgttattggccgtaccttggatggtaaattggctccaagtgagttacaaaattcaacattcacaatcagtaatttgggaatgtttggtgttcagtcctttggtccgattattaaccaacccaactcagctatccttggtgtcagttcgacaatcgagaagccagttgtcgtcaatggtgaaattgtgattcgcccaatcatgagtttaggattaaccattgaccaccgtgtcgtagatggtatggctggtgctaagtttatgaaggacttgaaagagttgattgaaacgccaatctcaatgttaatttaa

SEQ ID NO: 9213 - DNA, 852 bp, Streptococcus pneumoniae
  CDS (1)...(852)
atggctactattcaatggtttcctggtcacatgtctaaagcgcgtcgacaggtgcaggaaaatttaaaatttgttgattttgtgacgattttagtagatgcacgcttgcctctatctagtcaaaatcctatgttgaccaagattgttggtgataaaccaaaactcttgattttaaacaaggccgacttggctgatccagcaatgaccaaggaatggcgtcagtattttgaatcacaaggaatccagacgctagctatcaactccaaagagcaagtgactgtaaaagttgtaacagatgcggccaagaagctcatggctgataagattgctcgccagaaagaacgtgggattcagattgaaaccttgcgtaccatgattatcgggattccaaacgctggtaaatccactctgatgaaccgtttggctggtaaaaagattgctgttgttggaaacaagccaggggtcacaaaaggtcaacaatggcttaaaaccaataaagatctggaaatcttggatacaccggggattctctggcctaagtttgaggatgaaactgttgcacttaagttggcattgactggagctatcaaggatcagttgcttcctatggatgaggttaccatttttggtatcaattatttcaaagaacattatccagaaaagctggctgaacgcttcaaacaaatgaaaattgaagaagaagcgcctgtgattattatagatatgacccgcgccctcggtttccgtgatgactatgaccgtttttacagtctcttcgtgaaggaagtccgtgatggcaaactcggtaactataccttagatacattggaagacctcgatggcaacgattaa

SEQ ID NO: 9214 - DNA, 3651 bp, Streptococcus pneumoniae
  CDS (1)...(3651)
atgaagcttattccctttttaagtgaggaggagattcaaaaactgcaagaagcagaagcaaattcgagcaaggaacagaagaaaactgccgagcaaatcgaagctatctacacttctgcccagaatatcctggtctcagcatcggctggttctggaaagacctttgtcatggcagagcgcattctggaccaattggcgcgtggtgtcgaaatttctcaactctttatctcaacctttaccgtcaaggctgcaactgaacttaaagaacgtttagagaaaaaaatcagcaagaaaatccaagaaacagatgatgtcgacctcaaacaacacttgggtcgccagttggcagacctacccaacgctgccattggaaccatggattctttcacacaaaaattccttggcaaacatggttatctgcttgatattgcacctaatttccgtattttacaaaaccaaagcgagcaacttattctcgaaaacgaagtctttcatgaggtctttgaagcgcattaccaaggtaaacagaaagagacctttagtcatttgctgaaaaactttgctgggcgtggcaaggacgaacggggtctgcgccagcaggtctataaaatctatgacttcctccaatccaccagtaatcctcaaaagtggctgagtgaatctttcctcaaaggatttgagaaagctgattttaccagtgaaaaagaaaaactgaccgagcaaatcaaacaagccctttgggatttggaaagctttttccgttaccatctggataacgatgccaaggagtttgcaaaggctgcctatttagaaaatgttcagttaattctggatgaaattggctccctaaatcaggagtccgatagtcaggcttatcaggcagtgcttgcgcgtgttgtcgccatctctaaggagaaaaacggtcgagctctgactaatgccagccgtaaggctgatttgaagcccctggctgatgcctacaacgaagagagaaagacccagtttgctaaactaggacaattatcagaccagatagcgattctcgactatcaagaacgttatcatggagacacttggaaactagctaaaaccttccaatctttcatgagcgattttgtagaggcttatcgtcagagaaaacgacaggaaaatgcctttgaattcgctgatatcagccattacaccattgagattttagagaatttcccacaagttcgtgagtcttatcaggagcgcttccatgaagtcatggtcgatgagtatcaggataccaaccatattcaagaacggatgctggaattgttgtctaatggccacaatcgctttatggtgggagatatcaagcaatccatctatcgtttccgtcaggcagacccgcagattttcaatgagaaattccaacgctatgcgcaaaatccccaagaaggcaggctcattatcctcaaggaaaatttccgtagtagttcagaagtgctgtcagcaaccaatgatgtctttgaacgtctcatggaccaagaggtcggcgaaatcaactatgataacaagcaccagcttgtttttgccaataccaaactgactcccaatccagacaacaaggcagcatttctcctctacgacaaggacgatacaggtgaggaagaagagagtcaaacagaaacgaaactaacaggcgaaatgcgcttagttatcaaggagattctgaaacttcatcaagaaaaaggtgttgcctttaaggaaattgcccttctgacctccagccgcagtcgtaatgaccagattctcctcgccctgtctgagtacggaattcctgtcaaaactgacggagagcaaaacaattatctccaatccctagaagtgcaagtcatgctagacactcttcgtgtcattcacaatcccctgcaagactacgccttggttgcccttatgaagtctccaatgtttggttttgatgaggatgagctagcacgtttgtcccttcagaaagcagaggataaagtccacgaaaatctctatgagaaactggtcaatgcacaaaaaatggcaagtagtcaaaaaggcttgattcacacagctctagctgaaaaactaaagcaattcatggatatcctagcttcttggcgcttgtatgccaaaacccactctctctatgacttgatttggaagatttacaacgaccgtttttattatgactatgttggggctttgccgaatggtcctgctaggcaggccaatctctatgccctagcactgcgtgctgatcaatttgaaaagagcaatttcaaaggtttgtcgcgttttattcgtatgattgaccaagtcttagaagcccagcacgatttggcaagcgtggccgtcgcaccgccaaaagatgcagtagagctcatgaccatccacaagagtaaagggctggagtttccttacgtctttatcctcaatatggatcaagatttcaacaagcaagactctatgtcagaagtcattctcagtcgtcagaatggtcttggtgtcaaatatattgccaagatggagacaggggcagtagaagaccactatcctaaaaccatcaaactctccattcctagtctgacctataggcagaacgaagaggaattacagctagcaagctattctgagcagatgcgtttgctgtatgttgctatgacgcgggctgagaaaaagctctatcttgtcggcaagggttctcgtgaaaagctggaatccaaggaatacccagcagccaaaaatgggaaactaaatagcaatactagactgcaagcacggaatttccaagattggctttgggctatcagtaaagtgtttactaaggacaagctcaactttagttatcgttttattggcgaagatcagttgaccagagaagctatcggagagttggaaaccaagagtcctctccaagatagctcccaagcagacaatcgtcagtcagataccatcaaagaagctctggaaatgctgaaggaggtggaagtttataatactcttcaccgcgcagctattgaacttcctagtgttcaaaccccaagtcaaatcaagaaattctacgaaccagttatggatatggaaggtgtcgagattgctggtcaaggtcagtcagtaggcaagaaaatcagcttcgatttgccagatttttcaaccaaagaaaaggtaactggagctgagattggtagtgctactcacgaactcatgcagagaattgacctcagccagcaactaacccttgctagcctaacagaaacactcaaacaagttcaaactagccaagctgtcagagacaagatcaatcttgataaaattcttgctttctttgacacagtactcggtcaggaaattcttgctaataccgaccatctttatcgcgagcaacctttctccatgctcaaacgagaccaaaagagtcaggaagactttgttgtccgtggtatccttgatggctatctgctttacgaaaacaaaattgttctgttcgactacaagacagaccgctatgatgaaccaagtcaactcgtagaccgctatcgtggtcagttagctctatacgaagaggctttatcacgagcctattcgattgaaaatattgaaaaatacttgattttactcggtaaagacgaggttcaagttgtaaaagtataa

SEQ ID NO: 9215 - DNA, 1305 bp, Streptococcus pneumoniae
  CDS (1)...(1305)
atgtcaattattactgatgtttacgctcgcgaagtcctagactcacgcggtaacccaacacttgaagtagaagtttacactgaatcaggtgctttcggacgtggtatggttccatcaggagcttctactggtgaacacgaagcagttgaacttcgcgacggtgacaaatctcgttacggtggtcttggtacacaaaaagctgttgacaacgtaaacaacatcattgctgaagctatcattggctacgatgtacgtgatcaacaagctattgaccgtgctatgatcgcacttgacggtactcctaacaaaggtaaattgggtgcgaatgcaatcctcggtgtgtctatcgctgtagctcgtgctgctgctgactaccttgaaatcccactttacagctaccttggtggattcaacactaaagttcttccaactccaatgatgaacatcatcaacggtggttctcactctgacgctccaatcgctttccaagagttcatgatcttgccagttggtgcgccaacatttaaagaagcccttcgttacggtgctgaaatcttccacgctcttaagaaaatccttaaatcacgtggtttggaaactgccgtaggtgacgaaggtggattcgctcctcgtttcgaaggaactgaagatggtgttgaaactatccttgctgcgattgaagctgctggatatgtaccaggtaaagacgtatttctcggatttgactgtgcttcatcagaattctacgataaagaacgtaaagtttacgactacactaaatttgaaggcgaaggtgctgctgttcgtacatctgcagaacaaatcgactaccttgaagaattggttaacaaatacccaatcatcactattgaagatggtatggatgaaaacgactgggatggttggaaagctcttactgaacgtcttggtaagaaagtacaacttgttggtgacgacttcttcgtaacaaacactgactaccttgcacgtggtatccaagaaggtgctgctaactcaatccttatcaaagttaaccaaatcggtactcttactgaaacttttgaagctatcgaaatggctaaagaagctggttacactgctgttgtatcacaccgttcaggtgaaactgaagattcaacaatcgctgatatcgcagttgcaactaacgcaggacaaatcaagactggttcactttcacgtacagaccgtatcgctaaatacaaccaattgcttcgtatcgaagaccaacttggtgaagtagctgaatatcgtggattgaaatcattctacaaccttaaaaaataa

SEQ ID NO: 9216 - DNA, 1128 bp, Streptococcus pneumoniae
  CDS (1)...(1128)
atgagggaaaatatgaagattgtaattgcaccggattcgtttaaggaaagcttgacagctcaacaggtagctgaagcaataaaaagaggcttccaacaatcgatagcagatgtagaatgtctcctctgccctgttggtgatgggggagaaggtactgtagatgctatccgacattctcttgacctaaaagaaaaatggatccaagtgacagacccttctggacaaaaagaagccatgcgctattttcaaaaaggggaactggcactatttgaagtagctgacttggttggtcttggaaaaattccgctagagaaacgaaatccacttcaaatccaaacttgtggtattggagagttgattctccatctcatttctaaagggattaaagatatttatatcgaaattggtggcacggccagtaatgatggaggactggggattgctgctggtttaggttatcaattttatgatagggatggaaatgtcttgcctgcttccggtcaatccttattaaacttagcttctgtttcaacagaaaattgctataaaattcctgaaggtgttcaaattcatattttagcagatgtcgtgagtcccttatgtggtcatcaaggtgcgacttacacttttggcaatcaaaaaggtctacatccgactatgtttgcagtcgtagatcaggcgatccaagatttttatgaaaaattctcacctgcaacattagaaattaaaggagcaggagcaggtggaggccttgctggtggtttgtgtgcctttgctcaggcaagtatcgtgtctggaattgatacctgcttggacttaatcaactttgataagaaagtttcagatgctgacttggttgttgttggagaaggaagacttgatagtcaaagctttgctgggaaagcgcctataggtgttgcaaaaagaacccctgttggagttcctgttattgctatttgcggtagtcttgctgaagatttacctcccctaccatttgaaaatatccaagctgtcttttctattttggagaaaagtgaacctttagaagatagtttgaaaaatgccagtctctatctggagcgcacggctgccaatattgggcacttattaaatatgtgcaagatttag

SEQ ID NO: 9217 - DNA, 1656 bp, Streptococcus pneumoniae
  CDS (1)...(1656)
atgtatcaagcactttatcgaaaatatagaagtcaaaacttctcccagttagttggtcaagaagttgtggctaagactcttaaacaagcggtggagcaagagaaaataagtcacgcttatcttttttctggtcctcgtggaacgggaaaaaccagtgttgctaaaatctttgccaaggctatgaactgtcccaatcaagtgggtggcgaaccttgcaataactgctatatttgtcaagcagtgacggacggtagtttagaagatgtcattgaaatggatgcagcttctaataatggggtagatgaaattcgcgaaattcgtgataaatctacctatgcgcctagccttgctcgttataaggtttatatcatagatgaggttcacatgctgtctacaggggcttttaatgccctcttaaagacgctggaagaaccaacacagaatgtagtctttattttggccactactgaattgcacaagattcctgctactattctatcccgtgtgcaacgttttgagtttaaatcaattaagacacaggatattaaggaacatattcactatatcttagaaaaagaaaatatcagttctgaaccagaggctgtggaaatcattgccagacgggcggaaggtggaatgcgggacgccttgtctattttggatcaagccctgagtttgacacagggaaatgagctgacgactgctatctctgaagaaattactggcaccattagcctaccagccttggatgattatgtggcggccttgtctcaacaggatgttcccaaagctttgtcttgcttgaatcttctttttgacaatggtaagagcatgactcgttttgtgaccgatcttttgcactatttaagagacttgttaattgttcaaacagggggagaaaatactcatcatagttcagtctttgtagaaaatttggcacttcctcaaaaaaatctgtttgaaatgattcgcttagcaacagtgagtttagcagatattaagtctagtttgcagcccaagatttatgctgaaatgatgaccgtccgtttggcggaaatcaagtccgaaccagctctatcaggagcggttgaaaatgaaattgctacgctgagacaggaagttgcccgtctcaaacaagagctttctaatgtaggtgcggttcctaaacaagttgcaccagctcctagtcgaccagctacgggcaaaacagtctatcgtgtcgatcgcaataaagtgcaatctatcttacaagaggccgtcgaaaatcctgatttagcacgtcaaaatttaattcgtttgcagaatgcctggggagaggtaattgaaagtctaggtgggccggacaaggctctgctagctggttctcaaccggttgctgccaatgaacaccatgctattcttgcttttgagtctaacttcaatgctggtcaaactatgaaacgagacaatctcaataccatgtttggtaatatcctcagtcaggcggcaggtttttcacctgagattttagctatttccatggaggaatggaaagaagttcgcgcagccttttcagccaaagccaaatcttctcaaactgaaaaagaagtagaagaaagcctgattccagaaggatttgaatttttggctgataaagtgaaggtagaggaagactaa

SEQ ID NO: 9218 - DNA, 1320 bp, Streptococcus pneumoniae
  CDS (1)...(1320)
atgactcagactgaagctgatgaggctatgcaagctgcgcgtgcagccctgccagcatggcgagctttatcagcaattgaacgtgcggcttatttgcataaaacagcagctattttagaacgcgataaggaaaaaattggtactatccttgccaaagaagtagcaaaagggattaaagcagcaattggagaagtagtgcgtacagcagacttgattcgttatgctgctgaggaaggtctccgtatcactggacaagcaatggaaggtggtggttttgaggcagcaagtaaaaacaaactggctgttgtccgtcgtgaaccagttggtatcgtgctagcgattgctccctttaattatccagttaatttatctgcttctaaaattgcacctgccttgattgcagggaatgtggtcatgttgaagccaccaacacaaggttccatttctggactcttgttggctaaagcatttgaagaagcagggattccggcaggtgttttcaacaccattacaggtcgtggttcagaaattggggattatatcattgagcacaaagaagtcaacttcatcaactttacaggttcaactcctattggagaacgtattggtcgtttagctggtatgcgtcctatcatgttggaacttggtgggaaagatgcagctcttgtactagaagatgcagatttggaacatgctgccaagcaaattgttgcgggagcctttagctactcaggacaacgttgcacggccattaaacgtgtcattgttctcgaaagtgtagcagataaattagctactttgcttcaggaagaagtttctaaattaacagttggtgatccatttgacaatgctgatattacacctgttattgacaatgcttcagccgacttcatttggggcttgattgaggatgcacaagaaaaagaggctcaggctcttacaccaatcaaacgtgagggcaatctcctctggccagtgctttttgaccaagttacaaaagatatgaaagtggcatgggaagagccatttggtcctgttttaccaatcattcgtgtggctagtgtagaggaagctattgcctttgccaacgaatctgaattcggccttcaatcatcagtctttacaaatgatttcaaaaaagcctttgaaattgctgaaaaacttgaagtaggtacagtccacattaataataaaacccagcgtggtccagataatttcccattccttggtgtcaaaggttctggagctggagtgcaaggaattaaatatagcattgaagcgatgacaaatgtcaaatccattgtttttgatgtgaaataa

SEQ ID NO: 9219 - DNA, 1959 bp, Streptococcus pneumoniae
  CDS (1)...(1959)
atgaataaaagaatgaatgagttagtcgctttgctcaatcgctatgcgactgagtactataccagcgataatccctcggtttcagacagtgagtatgaccgcctttaccgtgagttggtcgagttagaaactgcttatccagagcaagtgctagcagacagtccgactcatcgtgttggtggcaaggttttagatggttttgaaaaatacagtcatcagtatcctctttatagtttgcaggatgctttttcacgtgaggagctagatgcttttgatgcgcgtgttcgtaaggaagtggctcatccgacctatatttgtgagctgaaaatcgatggcttatctatctcgctgacttatgaaaaggggattttggttgctggggtaacacgtggagatggttcaattggtgaaaatatcacagaaaacctcaagcgtgttaaggacatccctttgactttgccagaagaactagatatcacagttcgtggggaatgttacatgccacgcgcttcctttgaccaagttaaccaagcgcgccaagaaaatggagagcctgaatttgctaatcctcgtaatgcggcagcaggaactctgcgtcagttggatacagcagtagttgccaagcgtaatcttgcaacgtttctctatcaagaagccagcccttcaactcgtgatagccaagaaaagggtttgaagtacctagaacaactaggttttgtggtcaatcctaagcgaatcttggctgaaaacatagatgaaatctggaattttatccaagaagtaggacaggaacgggaaaatctgccttacgatattgatggagtggtaatcaaggtcaacgacctagcaagtcaagaagaacttggttttaccgttaaggctccaaagtgggcagtagcctacaagttccctgctgaagaaaaagaagctcaactcttatcagttgactggacagttggccgtaccggtgttgtaactccaactgctaatctaacaccagtacaacttgccggtacgactgttagccgtgcgaccctgcacaatgtagattatattgctgaaaaagatatccgaaaagacgatacggtcattgtatataaggctggtgacatcatccctgccgttttacgtgtggtagagtccaaacgggtttctgaagaaaaactagatatccctacaaactgtccaagttgtaactctgacttgttgcactttgaagatgaagtggccctacgttgtatcaatccgcgttgccctgctcaaatcatggaaggcttgattcactttgcttctcgtgatgctatgaatattacaggccttggtccatctattgttgagaagctttttgctgctaatttagtcaaggatgtggcggatatttatcgtttgcaagaagaggatttcctccttttagagggggttaaggaaaagtccgctgctaaactgtatcaggctatccaagcatcaaaggaaaattctgccgagaagctcttatttggtttgggaattcgtcatgtcggaagcaaggctagtcagcttttacttcaatatttccattcaattgaaaatctgtatcaggcagattcagaggaagtggctagtattgaaagtctaggtggcgtgattgccaaaagtcttcagacttattttgcggcagaaggctctgaaattctgctcagagaattgaaagaaactggggtcaatctggactataaaggacagacggtagtagcggatgcggccttgtcaggtttgaccgtggtattgacaggaaaattggaacgactcaagcgctcagaagctaaaagtaaactcgaaagtctgggtgccaaagtgacaggtagtgtttctaaaaagaccgacctcgtcgtggtaggtgcagacgctggaagtaaactgcaaaaagcacaagaacttggtatccaggtcagagatgaggcatggctagaaagtttgtaa

SEQ ID NO: 9220 - DNA, 1902 bp, Streptococcus pneumoniae
  CDS (1)...(1902)
atgattattttacaagctaataaaattgaacgttcttttgcaggagaggttcttttcgataatatcaacctgcaggttgatgaacgagatcggattgctcttgttgggaaaaatggtgcaggtaagtctactcttttgaagattttagttggagaagaggagccaactagcggagaaatcaataagaaaaaagatatttctctgtcttacctagcccaagatagccgttttgagtctgaaaataccatctacgatgaaatgcttcatgtctttaatgatttgcgtcggacggagagacaactgcgtcagatggagctggagatgggtgaaaagtctggtgaggatttggataaactgatgtcagattatgaccgcttatctgagaattttcgccaagcaggtggctttacctatgaagctgatattcgagcgattttgaatggattcaagtttgacgagtctatgtggcagatgaaaattgctgagctttctggtggtcaaaatactcgtttggcacttgccaaaatgctccttgaaaagcccaatctcttggtcttggacgagccaactaaccacttggatattgaaaccatcgcctggctagagaattacttggtaaactatagcggtgccctcattatcgtcagccacgaccgttatttcttggacaaggttgcgacaattacgctagatttgaccaagcattccttggatcgctatgtggggaattactctcgttttgtcgaattgaaggagcaaaagctagttactgaggcaaaaaactatgaaaagcaacagaaggaaatcgctgctctggaagactttgtcaatcgcaatctagttcgtgcttcaacgactaaacgtgctcaatctcgccgtaaacaactggaaaaaatggaacgtttggacaagcctgaagctggcaagaaatcagccaacatgaccttccagtctgaaaaaacgtcgggcaatgttgttttgactgttgaaaatgcagctgttggctatgacggggaagtcttgtcacaaccgattaacctagatcttcgtaagatgaatgctgtcgctatcgttggtccaaatggtatcggcaagtcaacctttatcaagtctattgtggaccagattccttttatcaagggagaaaagcgctttggcgctaatgttgaggttggttactatgaccaaacccaaagcaagctgacaccaagtaatacggtgctggatgaactctggaatgatttcaaactgacaccagaagttgaaatccgcaaccgtcttggagccttccttttctcaggagatgatgttaaaaaatcagtcggcatgctatctggtggcgaaaaagctcgtttgcttttagctaaattgtctatggaaaacaataattttttgattctggatgagccgaccaaccacttggatattgatagtaaggaagtgctagaaaatgccttgattgactttgatggaaccttgctgtttgtcagtcatgatcgttactttatcaatcgtgtggcaactcatgttttggaattgtctgagaatggttcaactctctaccttggagattacgactactatgttgagaagaaagcaacagcagaaatgagtcagactgaggaagcttcaactagcaatcaagcaaaggaagcaagtccagtcaatgactatcaggcccagaaagaaagtcaaaaagaagttcgcaaactcatgcgacaaatcgaaagtctagaagctgaaattgaagagctagaaagtcaaagccaagccatttctgaacaaatgttggaaacaaacgatgccgacaaactcatggaattacaggctgagctggacaaaatcagccatcgtcaggaagaagctatgcttgagtgggaagaattatcagagcaggtgtaa

SEQ ID NO: 9221 - DNA, 276 bp, Streptococcus pneumoniae
  CDS (1)...(276)
atggcaaacaaacaagatttgatcgctaaagtagcagaagctacagaattgactaagaaagactcagcagcagcagttgaagctgtatttgcagcagtagctgactatcttgcagctggtgaaaaagttcaattgatcggttttggtaactttgaagttcgtgagcgtgcagaacgtaaaggtcgcaacccacaaactggtaaagaaatgacaattgcagcttctaaagtaccagcattcaaagctggtaaagctcttaaagacgctgttaaataa

SEQ ID NO: 9222 - DNA, 294 bp, Streptococcus pneumoniae
  CDS (1)...(294)
atgttaaaaatgactcttaacaacttgcaacttttcgcccacaaaaaaggtggaggttctacatcaaacggacgtgattcacaagcaaaacgtcttggagctaaagcagctgacggacaaactgtaacaggtggatcaatcctttaccgtcaacgtggtacacacatctatccaggtgtaaacgttggtcgtggtggagacgatactttgttcgctaaagttgaaggcgtagtacgctttgaacgtaaaggacgcgataaaaaacaagtttctgtttacccaatcgcaaaataa

SEQ ID NO: 9223 - DNA, 345 bp, Streptococcus pneumoniae
  CDS (1)...(345)
atgatacaggcagtctttgagagagccgaagatggcgagctgaggagtgcggaaattactggacacgccgagagtggcgaatacggcttagatgtcgtgtgtgcatcggtttctacgcttgccattaactttatcaattctattgagaaatttgcaggctatgaaccaatcctagaattaaacgaagatgaaggtggctatctgatggttgaaataccaaaagatcttccttcacaccagagagaaatgacccagttattctttgaatcatttttcttaggtatggcaaacttatcggagaactcttctgagttcgtccaaaccagagttatcacagaaaactaa

SEQ ID NO: 9224 - DNA, 390 bp, Streptococcus pneumoniae
  CDS (1)...(390)
gtggttcgtcccacgatgctaggcgagtcttcacaaaaaatcggggaaatccataaaaatcataggaggtgcataatgagcacatacgcaattatcaaaactggcggaaaacaagttaaagttgaagttggtcaagcagtttacgttgaaaaattgaacgttgaagctggtcaagaagttacttttaacgaagttgttcttgttggtggtgaaaacactgttgtcggaactccacttgttgctggagctactgtagttggaactgttgaaaaacaaggaaaacaaaagaaagtggttacttacaagtacaaacctaaaaaaggtagccaccgtaaacaaggtcaccgtcaaccatatacaaaagttgtcatcaacgcaatcaacgcttaa

SEQ ID NO: 9225 - DNA, 300 bp, Streptococcus pneumoniae
  CDS (1)...(300)
atgatgaacatgcaaaacatgatgcgtcaagcacaaaaacttcaaaaacaaatggaacaaagccaagctgaacttgctgctatgcaatttgttggcaaatctgctcaagatcttgtccaagcgaccttaactggcgataagaaagttgtcagcattgatttcaatccagctgtcgttgacccagaggaccttgagactctttctgatatgaccgttcaagccatcaactctgctcttgaacaaatcgatgaaactaccaagaaaaaactgggtgctttcgctgggaaattacctttctaa

SEQ ID NO: 9226 - DNA, 975 bp, Streptococcus pneumoniae
  CDS (1)...(975)
atggaagtttttgaaagtctcaaagccaaccttgttggtaaaaatgctcgtatcgttctccctgaaggggaagagcctcgtattcttcaagcaacaaaacgcttagtaaaagaaacagaagtgattcctgttttgcttggaaatcctgaaaaaattaaaatttatcttgaaattgaaggaatcatggatggttatgaggtcatcgaccctcaacattatcctcaatttgaagaaatggtttctgccttggtggagcgtcgcaagggcaaaatgactgaagaagatgtacgcaaggttttggttgaagatgtcaactactttggtgtgatgttggtttacttgggcttggttgatggaatggtgtcaggagcgattcactcaacagcttcaacagttcgcccagctctacaaatcatcaaaactcgtccaaatgtaactcgtacttcaggagccttcctcatggttcgtggtacggaacgttacctatttggagactgtgccattaatatcaatccagatgcagaagccttggctgaaattgccatcaactcagcaatcacagctaagatgtttggcatcgaacctaaaattgccatgttgagctattctactaaaggttcagggtttggtgaaagcgttgataaggtcgttgaagcaactaaaattgctcacgacttgcgtcctgaccttgaaatcgatggtgagttgcaatttgatgcggcctttgttcccgaaactgcagctctgaaagctccgggaagtacagtagctggtcaagcaaatgtcttcatcttcccaggtatcgaggcaggaaatatcggttacaagatggctgaacgcctgggtggctttgcggctgtaggacctgttttgcaaggtttaaacaagccagttaatgatctttctcgtggatgtaatgcagatgatgtttacaagttgaccctcatcacagcagctcaagcagttcatcaatag

SEQ ID NO: 9227 - DNA, 897 bp, Streptococcus pneumoniae
  CDS (1)...(897)
atgaggtttgaatttatcgcagatgaacatgtcaaggttaagacctttttaaaaaagcacgaggtttctaagggattgctggccaagattaagtttcgaggtggagctattctggtcaataatcaaccgcaaaatgcaacgtatctattggacgttggagactacgttaccattgacattcccgctgagaaaggctttgaaaccttggaggctattgagcttccattagatattctctatgaggatgaccactttctagtcttgaataaaccctatggagtggcttctattcctagtgttaatcactctaataccattgccaattttatcaagggttactatgtcaagcaaaattatgaaaatcagcaggttcacattgttaccagactagatagggacacttctggcttgatgctctttgccaagcacggttatgcccatgcacgattagacaagcagttgcagaagaaatctatcgagaaacgctactttgctttggttaagggagatggacatttggagccagaaggggaaattattgctccgattgcgcgtgatgaagattccattattaccagacgagtggctaaaggcggaaagtatgcccatacttcatacaagattgtagcttcttatggaaatattcacttggtctatattcacctgcacactggtcgaacccatcaaatccgagtccatttttctcatatcggttttcctttgctgggagatgatttgtatggtggtagtctggaagatggtattcaacgtcaggctctgcattgccattacctatccttttatcatccatttttagagcaagacttgcagttagaaagtcccttgccggatgatttcagtaaccttattacccagttatcaactaatactctataa

SEQ ID NO: 9228 - DNA, 771 bp, Streptococcus pneumoniae
  CDS (1)...(771)
atgtcagtattagagatcaaagatcttcacgttgagattgaaggaaaagaaattttaaaaggggttaacctgaccctgaaaacaggagaaattgccgctatcatgggaccaaatggtacaggtaaatcgactctttctgccgctatcatgggaaatccaaactatgaagtaactaaaggtgaagttttgtttgatggcgtaaacatccttgagttggaagtggatgagcgtgcgcgtatgggacttttccttgctatgcaatacccatcagaaatccctggaattaccaatgctgagtttcttcgtgccgctatgaatgcgggtaaagaagatgatgagaagatttcagttcgtgagtttattactaagctagatgaaaaaatggaattgcttaacatgaaagaagaaatggcagagcgttacctcaacgaaggcttctctggtggtgagaaaaaacgcaatgaaattctccaacttttgatgttggagccaacatttgctcttttggacgagattgactcaggtcttgatattgacgctcttaaagttgtgtctaaaggtgtcaatgccatgcgtggtgaaggttttggtgctatgatcatcactcactaccaacgtcttttgaactatatcacacctgatgtggtacacgtgatgatggaaggtcgtgttgtcctttctggtggtccagaattggctgcgcgtttggaacgtgaaggatacgcaaaattagctgaagaacttggctacgactacaaggaagaattgtaa

SEQ ID NO: 9229 - DNA, 831 bp, Streptococcus pneumoniae
  CDS (1)...(831)
gtgacgatacagatgaagaatacaggtaaacgaattgatctgatagccaatagaaaaccgcagagtcaaagggttttgtatgaattgcgagatcgtttgaagagaaatcagtttatactcaatgataccaatccggatattgtcatttccattggcggggatggtatgctcttgtcggcctttcataagtacgaaaatcagcttgacaaggtccgctttatcggtcttcatactggacatttgggcttctatacagattatcgtgattttgagttggacaagctagtgactaatttgcaactagatactggggcaagggtttcttaccctgttctgaatgtgaaggtctttcttgaaaatggtgaagttaagattttcagagcactcaacgaagccagcatccgcaggtctgatcgaaccatggtggcagatattgtaataaatggtgttccctttgaacgttttcgtggagacgggctaacagtttcgacaccgactggtagtactgcctataacaagtctcttggcggtgctgttttacaccctaccattgaagctttgcaattaacggagattgccagccttaataatcgtgtctatcgaacattgggctcttccattattgtgcctaagaaggataagattgaacttattccaacaagaaacgattatcatactatttcggttgacaatagcgtttattctttccgtaatattgagcgtattgagtatcaaatcgaccatcataagattcactttgtcgcgactcctagccataccagtttctggaaccgtgttaaggatgcctttatcggtgaggtggatgaatga

SEQ ID NO: 9230 - DNA, 672 bp, Streptococcus pneumoniae
  CDS (1)...(672)
atgaccttagaatgggaagaatttctagatccttacattcaagctgttggtgagttaaagattaaacttcgtggtattcgtaagcaatatcgtaagcaaaataagcattctccaattgagtttgtgaccggtcgagtcaagccaattgagagcatcaaagaaaaaatggctcgtcgtggcattacttatgcgaccttggaacacgatttgcaggatattgctggcttacgtgtgatggttcagtttgtagatgacgtcaaggaagtagtggatattttgcacaagcgtcaggatatgcgaatcatacaggagcgagattacattactcatagaaaagcatcaggctatcgttcctatcatgtggtagtagaatatacggttgataccatcaatggagctaagactattttggcagaaattcaaattcgtactttggccatgaatttctgggcaacgatagaacattctctcaactacaagtaccaaggggatttcccagatgagattaagaagcgactggaaattacagctagaatcgcccatcagttggatgaagaaatgggtgaaattcgtgatgatatccaagaagcccaggcactttttgatcctttgagtagaaaattaaatgacggtgtaggaaacagtgacgatacagatgaagaatacaggtaa

SEQ ID NO: 9231 - DNA, 642 bp, Streptococcus pneumoniae
  CDS (1)...(642)
atgattacaatagttttattaatcctagcctatctgctgggttcgattccatctggtctctggattggacaagtattctttcaaatcaatctacgcgagcatggttctggtaacactggaacgaccaacaccttccgcattttaggtaagaaagctggtatggcaacctttgtgattgactttttcaaaggaaccctagcaacgctgcttccgattatttttcatctacaaggcgtttctcctctcatctttggacttttggctgttatcggccataccttccctatctttgcaggatttaaaggtggtaaggctgtcgcaaccagtgctggagtgattttcggatttgcgcctatcttctgtctctaccttgcgattatcttctttggagctctctatcttggcagtatgatttcactgtctagtgtcacagcatcgatcgcggctgttatcggggttctgctctttccactttttggttttatcctgagtaactatgactctctcttcatcgctattatcttagcacttgctagtttgattatcattcgtcataaggacaatatagctcgtatcaaaaataaaactgaaaatttggtcccttggggattgaacctaacccatcaagatcctaaaaaataa

SEQ ID NO: 9232 - DNA, 1260 bp, Streptococcus pneumoniae
  CDS (1)...(1260)
atgagaaaaattgttatcaatggtggattaccactgcaaggtgaaatcactattagtggtgctaaaaatagtgtcgttgccttaattccagctattatcttggctgatgatgtggtgactttggattgcgttccagatatttcggatgtagccagtcttgtcgaaatcatggaattgatgggagctactgttaagcgttatgacgatgtattggagattgacccaagaggtgttcaaaatattccaatgccttatggtaaaattaacagtcttcgtgcatcttactatttttatgggagcctcttaggccgttttggtgaagcgacagttggtctaccgggaggatgtgatcttggtcctcgtccgattgacttacaccttaaggcgtttgaagctatgggtgccactgctagctacgagggagataacatgaagttatctgctaaagatacaggacttcatggtgcaagtatttacatggatacggttagtgtgggagcaacgattaatacgatgattgctgcggttaaagcaaatggtcgtactattattgaaaatgcagcccgtgaacctgagattattgatgtagctactctcttgaataatatgggtgcccatatccgtggggcaggaactaatatcatcattattgatggtgttgaaagattacatgggacacgtcatcaggtgattccagaccgcattgaagctggaacatatatatctttagctgctgcagttggtaaaggaattcgtataaataatgttctttacgaacacctggaagggtttgttgctaagttggaagaaatgggagtgagaatgactgtatctgaagacagcatttttgtcgaggaacagtctaatttgaaagcaatcaatattaagacagctccttacccaggctttgcaactgatttgcaacaaccgcttacccctcttttactaagagcgaatggtcgtggtacaattgtcgatacgatttacgaaaaacgtgtaaatcatgtttttgaactagcaaagatggatgcggatatttcgacaacaaatggtcatattttgtacacgggtggacgtgatttacgtggggccagtgttaaagcgaccgacttaagagctggggctgcactagtcattgctgggcttatggctgaaggcaaaactgaaattaccaatatcgagtttatcttacgtggttattctgatattatcgaaaaattacgtaatttaggagcggatattagacttgttgaggattaa

SEQ ID NO: 9233 - DNA, 1311 bp, Streptococcus pneumoniae
  CDS (1)...(1311)
atgagtatgtttttagatacagctaagattaaggtcaaggctggtaatggtggcgatggtatggttgcctttcgtcgtgaaaaatatgtccctaatggaggcccttggggtggtgatggtggtcgtggaggcaatgtggtcttcgttgtagacgaaggactacgtaccttgatggatttccgctacaatcgtcatttcaaggctgattctggtgaaaaagggatgaccaaagggatgcatggtcgtggtgctgaggaccttagagttcgagtaccacaaggtacgactgttcgtgatgcggagactggcaaggttttaacagatttgattgaacatgggcaagaatttatcgttgcccacggtggtcgtggtggacgtggaaatattcgtttcgcgacaccaaaaaatcctgcaccggaaatctctgaaaatggagaaccaggtcaggaacgtgagttacaattggaactaaaaatcttggcagatgtcggtttagtaggattcccatctgtagggaagtcaacacttttaagtgttattacctcagctaagcctaaaattggtgcctaccactttaccactattgtaccaaatttaggtatggttcgcacccaatcaggtgaatcctttgcagtagccgacttgccaggtttgattgaaggggctagtcaaggtgttggtttgggaactcagttcctccgtcacatcgagcgtacacgtgttatccttcacatcattgatatgtcagctagcgaaggccgtgatccatatgaggattacctagctatcaataaagagctggagtcttacaatcttcgcctcatggagcgtccacagattattgtaactaataagatggacatgcctgagagtcaggaaaatcttgaagaatttaagaaaaaattggctgaaaattatgatgaatttgaagagttaccagctatcttcccaatttctggattgaccaagcaaggtctggcaacacttttagatgctacagctgaattgttagacaagacaccagaatttttgctctacgacgagtccgatatggaagaagaagtttactatggatttgacgaagaagaaaaagcctttgaaattagtcgtgatgacgatgcgacatgggtactttctggtgaaaaactcatgaaactctttaatatgaccaactttgatcgtgatgaatctgtcatgaaatttgcccgtcagcttcgtggtatgggggttgatgaagcccttcgtgcgcgtggagctaaagatggggatttggtccgcattggtaaatttgagtttgaatttgtagactag

SEQ ID NO: 9234 - DNA, 1125 bp, Streptococcus pneumoniae
  CDS (1)...(1125)
gtgaggaaatttcccctcttttcctctagtctctcctttcttttgctgattttattcaaagaaaatgatataatagtagttatggagaaaaagaaattacgcatcaatatgttgagttcaagtgagaaagtagcaggacagggagtttcaggtgcttaccgtgaattagttcgtcttcttcaccgtgctgccaaggaccaattgattgttacagaaaatcttccaatcgaggcagatgtgactcactttcatacgattgattttccctattatttatcaaccttccaaaagaaacgctcagggagaaagattggctatgtgcatttcttgccagctacacttgagggaagtttgaaaattccatttttcttaaagggaattgtgaaacgctatgtattttctttttacaaccggatggagcacttggttgtggtcaatcctatgtttattgaggatttggtagcagctggtattccacgtgaaaaagtgacctatattcctaactttgtcaacaaggaaaaatggcatcctctaccacaagaagaggtagttagactgcgcacagatcttggtcttagtgacaatcagtttatcgtagtaggtgctgggcaagttcagaaacgtaaagggattgatgactttatccgtctggctgaggaattgcctcagattacctttatctgggctggtggcttctcttttggtggtatgacagatggttatgaacactataagacaattatggaaaatccccctaaaaatttgatttttccaggcattgtatcgccagagcggatgcgcgaattgtatgctctagcggatcttttcttgttgcctagttacaatgagctctttcctatgactattttagaagctgcgagttgtgaggctcctattatgttgcgtgatttagatctctataaggtgattttggagggaaattatcgggcgacagcgggtagagaagagatgaaagaggctattttggaatatcaagcaaatcctgctgtcttaaaagatctcaaagaaaaggctaagaatatttccagagagtattctgaagagcatctgttacaaatctggttggacttttatgagaaacaagccgctttagggagaaagtaa

SEQ ID NO: 9235 - DNA, 1230 bp, Streptococcus pneumoniae
  CDS (1)...(1230)
atgaagattagtaagaggcacttattaaattattccatcttgattccctacttgcttttatctattttgggcttgattgtggtctattcgaccaccagtgctattttaattgaagaaggcaagagcgccttgcagttggttcgaaaccaaggaatcttttggattgttagtttgatactgattgccttaatttataaattgagactagattttttgagaaatgagcgactaatcattttagttatattaatagaaatgcttttattgttcttggctcgttttattggtatttcagtaaacggggcatacggttggatttcggttgcaggagtaactattcagccagctgagtacttaaaaatcattattatttggtatttagctcaccgattctccaaacagcaagaagaaatagctacttatgattttcaagttttgactcaaaatcaatggcttccccgtgcttttaatgattggcgattcgttctcctagttctgattggaagtttgggaattttccctgatttaggaaatgcgactattttagtcttggtttccttgattatgtatacagttagtggaatcgcttatcgctggttttcaaccattctggcgctcgtatctgccgcttctgtctttgtcttgaccactatcagcctaatcggtgttgagaccttttcaaaaattccagtatttggctatgtagccaaacgctttagtgccttttttaatccttttgccgatcgtgctgatgcaggtcaccagttagctaattcttattttgccatggtcaatggtggttggtttggtctaggtcttggaaactcgattgaaaaacgaggttatttgccagaagctcatacagactttgtcttttctatcgtgattgaagaatttggctttgttggtgccagtcttattttagctctcttgtttttcatgattttgcggattatcttggtcggtattcgagcggagaatcctttcaatgccatggttgcactcggtgtcggagggatgatgttggttcaggtatttgtcaatatcggagggatttcgggcttgattccatctacaggagtaaccttccccttcttatcccagggtggaaatagtcttctagtcttatcagtggcagtagcctttgtcttaaatattgatgccagtgaaaaacgcgctaagttgtaccgagaattggaaaatcaaccaatgaaccttctgttgaagtag

SEQ ID NO: 9236 - DNA, 885 bp, Streptococcus pneumoniae
  CDS (1)...(885)
atgaaaaaagcaatggtaattatcaaccctacttctggtggcgagaaggctttggattacaaagaaaagctggagaataaagcaaaagaatactttgaatatgttgaaaccaaaattaccgaaaaagtgctggatgcaacacattttgctgaagaagcttctcgtgagcagtatgatgcagtggttgtgtttggtggagatggaactgtcaatgaagtcatttcaggtattgatgagagagactacattcctaagttagggattatcccaggcggtacgggtaacctcattacaaaacttttggaaatcaatcaagacatcgatggcgcaattgacgaactagattttgatttaaccaataagattgatatcggtaaagcaaatgacaactattttggttatatctttagtatcggttctctgcctgaggcgattcacaatgttgaaatagaggacaaaacaaaattcggtattttaacctatgctgtaaataccatgaagtctgtcatgacagatcaggtctttaacattaaggttgagacagaaaatggaaattatgttggtgaagctagccatgttttggtccttttgacaaattacttcgctgataagaaaatctttgaagaaaacaaggacggctatgccaacattttgattctgaaagatgcctctatattctccaaattatccgtcattcctgatttattaaaaggggatgttgtcgcaaatgataatatcgagtatatcaaagcgcgtaatattaaaatctcttcagatagtgaattggagtcagatgttgacggagataaatcagataacctacctgtagaaatcaaagtcctagctcagcgagtagaagtattttcaaaaccgaaagaggattag

SEQ ID NO: 9237 - DNA, 1257 bp, Streptococcus pneumoniae
  CDS (1)...(1257)
atgatttttgacaaagatgattttaaagcatatgatgctgatctctggaatgctattgccaaagaagaagaacgccaacaaaataatatcgagttaattgcttcggaaaacgtagtttccaaggctgttatggcagctcaagggtctatcttgacaaataaatatgccgagggttacccaggacgccgttattatggtggaactgatgtagtagacgttgtagagactcttgctattgaacgcgcaaaagaaattttcggtgctaaatttgctaatgtccaaccacattcaggaagccaagctaactgtgcggcttacatgtccttgattgagccaggtgatacggttatgggaatggatttggcagcaggtggacacttgacccacggagctccagttagcttctctggtcaaacctacaactttctttcctatagtgtggatcctgaaacggaacttttggactttgatgctatcttgaaacaagcccaagaagtaaaaccaaaactgattgtagctggtgcttcagcatattctcaaattatcgatttttcaaaattccgtgaaatcgcagatgctgtcggtgcgaagctcatggtggacatggcccatatcgctggtttggttgcggctggccttcatccaagcccagttccatacgctcatatcacaacaacaacgacccacaaaacccttcgtggacctcgtggtggtttgattttgaccaatgacgaagaacttgctaaaaaaatcaattcagctattttcccaggtattcagggcggtcctttagagcatgttgtggcggctaaggcagtttccttcaaagaagttttggatccagccttcaaggaatatgctgccaatgtaattaagaacagcaaggctatggcagatgtcttcttgcaagaccctgatttccgtattatttcaggtggaactgaaaaccatctcttccttgttgatgtgactaaggttgtagaaaacggaaaagttgctcaaaacttgctggatgaagtcaatattaccctaaataaaaattcaatcccttacgaaaccttgtcgccattcaagacaagtgggattcgtatcggagcagcagctattactgcacgtggatttggtgaagaagaaagtcgcaaagtggctgaactcatcattaaaacccttaagaattcagaaaatgaggctgtattagaagaagtgagaagtgcagtcaaagaattgacagatgccttcccattatacgaggactaa

SEQ ID NO: 9238 - DNA, 1080 bp, Streptococcus pneumoniae
  CDS (1)...(1080)
atgaacatctatgatcaactacaagctgtagaagaccgttatgaagaactaggagaattgctgagtgaccctgatgtcgtttcagacaccaagcgttttatggagctttcaaaagaagaagcttccaatcgtgacaccgtaatagcctaccgtgagtataaacaagtccttcaaaatatcgtcgatgccgaagagatgattaaggaatcaggcggagatgcggacttggaagaaatggccaagcaagaactcaaagatgccaaggctgaaaaagaagaatatgaagaaaaactgaaaattttgctccttccaaaggatccaaacgatgacaagaatatcatccttgaaatccgtggagcagctggtggagacgaagcggcacttttcgctggagatttgctaactatgtaccaaaagtatgcggaagcccaaggttggcgctttgaagtcatggaagcctctatgaatggtgtcggtggttttaaagaagtggttgctatggtttcaggtcagtctgtatactctaagcttaagtatgaatcaggtgcccaccgtgtgcaacgtgttcctgtgacagaaagccaaggccgtgttcatacttcgacagcgacagttcttgttatgccagaagttgaagaggttgaatacgacattgatccaaaagaccttcgtgtcgacatctatcacgcctctggtgctggtggacagaacgtcaataaggttgcgactgccgttcgtatcgttcacttgccaaccaatatcaaggttgagatgcaggaagaacgtacccagcagaagaaccgcgagaaggctatgaagattatccgtgcacgcgtcgctgaccactttgctcagattgctcaggatgaacaagacgctgagcgtaagtcgacaatcggtactggtgaccgttcagaacggatccgaacttataacttcccacaaaaccgtgtcacagaccaccgtatcggcttgaccctccaaaaactagatacgattttgtctggtaaattggacgaagttgtggatgccttggtgctttatgaccaaacacaaaaactagaagaattaaacaaataa

SEQ ID NO: 9239 - DNA, 600 bp, Streptococcus pneumoniae
  CDS (1)...(600)
atggcacagttgtactatcgttatgggaccatgaactctggtaaaacgattgagattctcaaagtggcctataactacgaggagcaaggaaaaggtgttgtcattatgacctcggctctggatacgcgtgacggtgttggctatgtgtcgagtcgaattggcatgaaacgccctgcccttgcgattgaggaaacaacggatatctttggctatatccgagacctaccagaaaaaccttactgtgttttggtcgatgaagcccagtttcttaaacgccaccatgtttacgacctagctcgtgttgtggacgagttagacatacccgtcatggcttttggcttgaaaaatgactttcgcaatgaattgttcgaaggttccaaatatctcttgcttttagcggacaagattgacgaaatcaagaccatctgtcagtattgcaagaaaaaggcgaccatggtgttgcgaacacaggatggactgcccgtttacgatggagaacagatccagattggtggtaatgaaacctatatctcggtttgccgtaaacattattttgcgccaatgataacctctaacaaggagcaaaactatgacaattga

SEQ ID NO: 9240 - DNA, 1374 bp, Streptococcus pneumoniae
  CDS (1)...(1374)
atgattacacgtgaatttgataccatcgctgctatctctactccactaggtgaaggggctattggtattgtccgcctgagcggaacagacagttttgctattgcgcaaaagatttttaaaggaaaagacttgaacaaggttgccagccacactctcaactacggtcacattattgatcctctgactggtaaagtcatggacgaggttatggttggggctatgaagtctccaaagaccttcactcgtgaggatattatcgagattaacacccacggtgggattgcggtgaccaatgaaattctccagctagctattcgtgaaggggctcggttggcagaacctggtgaatttaccaaacgtgcttttttaaacggtcgcgtagacttgacacaggcagaggctgtgatggatatcatccgtgccaagactgacaaggccatgaacattgcggtcaaacaattagacggctccctttctgacctcattaacaatacccgtcaagaaatcctcaatacacttgcccaagttgaggtcaatatcgactatcctgagtatgacgatgttgaggaagccactactgctgttgtccgagagaagacaatggagtttgagcaattactaaccaaactccttaggacagcacgtcgtggtaaaatccttcgtgaaggaatttcaacggctatcattggacgtcccaacgttgggaaatcaagccttctcaacaacctcttgcgtgaggacaaggctatcgtaacagatatcgctgggacaacacgagatgtcatcgaagagtacgtcaacatcaatggtgtacctctcaaattgattgatacagccggtattcgtgaaacagatgacatagtggaacaaatcggtgttgagcgttcgaaaaaagccctcaaggaagccgacttggttctactagtgctaaatgccagtgaaccactgactgcgcaagacagacaacttcttgaaattagccaagataccaatcgcattattctacttaataaaaccgacctgccagaaacgattgaaacttcgaaactacctgaagacgttatccgtatttcagtccttaaaaaccaaaacatcgacaagattgaagagcgaatcaacaacctcttctttgaaaatgctggcttggtcgagcaagatgctacttacttgtcaaacgcccgtcacatttccctgattgaaaaagcagttgaaagcctacaagccgttaatcaaggtcttgagctggggatgccagttgatttgcttcaagttgacttgactcgtacttgggaaatcctcggagaaatcactggggatgctactccagatgaactcatcacccaactctttagccaattctgtttaggaaaataa

SEQ ID NO: 9241 - DNA, 1221 bp, Streptococcus pneumoniae
  CDS (1)...(1221)
atgacttatccaaatctcttggaccgcttcttaacctacgttaaggtcaacacgcgctctgatgaacactctactactactccaagtacacagagtcaggttgacttcgcaacaaatgtcctaattcctgaaatgaaacgtgttggactgcaaaatgtttactatctaccgaatggttttgctattggaaccttgccagccaacgatccgtctttaacacgtaagattggttttatatcgcacatggatactgctgattttaatgctgaaggagtcaatccacaggtaattgaaaactacgatggttgtgtgattgaactagggaattctggtttcaaactcgatccagctgacttcaagagtcttgaaaaatatccaggacaaacgctcatcacaacagatggaacaaccttgctaggtgctgatgacaagtcaggaattgctgaaattatgacagccattgaatatctaactgctcatcctgaaattaagcactgtgagattcgtgttggttttggtccagatgaagaaatcggtgttggtgccaataaatttgatgcagaagattttgatgtggattttgcctacactgttgatggtggtccactaggtgaacttcagtacgagactttctcagccgctggtgctgaattgcatttccaaggccgtaatgtccaccctggtactgccaaagggcagatggtcaatgcccttcagctagcaattgattttcataatcaacttccagaaaatgaccgacctgagttaactgaaggttaccaaggtttttaccatctaatggatgtgacaggtagtgttgaggaggcgcgtgcaagctacatcattcgtgattttgaaaaagatgcctttgaagcgcgtaaagcatccatgcaatctatcgctgataagatgaatgaagaacttgggagcaaccgtgtcactctcaacttgacagaccagtactacaatatgaaagaagtcattgaaaaagatatgactccaattaccattgctaaagccgttatggaagatctaggtatcacgcctattatcgaaccaatccgaggtggaacagacggctctaagatttcctttatgggaatcccaactccgaatatctttgcaggtggcgaaaatatgcacggacgttttgaatacgttagccttcagactatggaacgtgcagttgataccatcattggcatcgtacgtagcttataa

SEQ ID NO: 9242 - DNA, 912 bp, Streptococcus pneumoniae
  CDS (1)...(912)
atgatttatacagtcacactcaatccatccattgactatatcgttcgtttggaccaagtcaaagttggtagtgtaaatcgtatggacagtgatgataagtttgctggtgggaaaggaatcaatgtcagccgtgtcttgaaacgtttgaatataccaaatacagcgacgggatttatcggtggctttactggtaaatttatcacagatactttagcagaggaagaaatcgagacacgttttgtccaggtggcagaagatactcgtatcaatgttaaaatcaaagcagaccaagaaacagaaatcaacggaacgggtccaactgttgaaccggttcagctagaagaattgaaagctattttatctagtctgacagcagaagatacagttgtctttgcaggttcaagtgctaaaaatctaggcaatgttatctataaggatttgatttccttgacgcgccagactggtgcgcaagtggtctgtgactttgaaggacagaccttaattgatagtttggactaccagcctcttcttgtaaaaccaaacaatcatgaacttggagcgatttttggggttaaactcgaaagtttagatgaaattgagaaatacgctcgtgagttactggctaagggtgctcaaaatgttattatctctatggctggtgatggcgcccttcttgtcacatctgagggagcttacttcgctaaaccaatcaaaggaacagtcaaaaattcagttggagctggtgattctatggttgctggattcacaggtgaatttgtcaaatcaaaagacgcagtagaagccttcaaatggggagtggcttgcggaacggcaactaccttctcagatgacttggcaacggcggaatttattaaagaaacatatggaaaagttgaggtagaaaaaagatga

SEQ ID NO: 9243 - DNA, 1953 bp, Streptococcus pneumoniae
  CDS (1)...(1953)
atgaaaattcaagacctattgagaaaagatgtcatgttgctagatttgcaggcaactgaaaaaacagctgtcatcgacgagatgattaaaaatttgacagagcacggttatgtaacagattttgaaacatttaaagaaggaattttggcgcgtgaagctttgacttctactggtttgggtgatggaatcgcaatgcctcacagcaaaaacgctgctgtcaaagaagcgacagttctatttgctaagtcaaataagggtgttgactacgagagcttggatggacaagcaactgacctcttcttcatgattgcagctccagaaggtgccaatgatactcacttggcagccttggcagaattgtctcaatacttgatgaaagacggttttgcagacaaacttcgtcaagcaacatctgcagaccaagttatcgaactttttgaccaagcttcagaaaaaactgaggaacttgttcaagcacctgctaatgactctggtgactttatcgtagctgttacagcttgtacaacaggtattgcccacacttacatggcccaagaagcccttcaaaaagtagctgctgaaatgggggttggtatcaaggtcgaaaccaacggtgctagcggtgttggaaatcaactaactgcagaagatatccgtaaggctaaagctattatcattgcagcagacaaggccgttgaaatggatcgatttgatggaaaaccattgatcaatcgtccagttgctgacggtatccgtaagacagaagagctaattaacttggctctttcaggagatactgaagtctaccgtgccgctaatggtgccaaagctgcaacagcctctaacgaaaaacaaagccttggtggtgccttgtacaaacacttgatgagtggtgtatctcaaatgttaccattcgttatcggtggtggtatcatgattgcccttgccttcttgattgacggtgctttgggtgttccaaatgaaaaccttggcaatcttggttcttaccatgagttagcttctatgttcatgaaaattggtggagctgcctttggtttgatgcttccagtctttgcgggttatgttgcctactctattgctgaaaaaccgggtttggtagcaggtttcgtggctggtgctattgccaaagaaggttttgcctttggtaaaattccttatgccgcaggtggtgaagcaacttcaactcttgcaggtgtctcatctggtttcctaggtgcccttgttggtggatttatcgcaggtgccttggttcttgccatcaagaaatacgttaaagttcctcgttcactcgaaggtgctaaatcaatccttctattgccacttcttggaacaatcttgacaggatttgttatgctagctgtgaatatcccaatggctgcaatcaacactgctatgaatgacttcctaggcggtcttggaggaggttcagctgtccttcttggtatcgtccttggtggaatgatggctgttgacatgggtggaccagttaataaagcagcttatgtctttggtacaggtacgcttgcagcaactgtttcttcaggtggttctgtagccatggcagcagttatggctggaggaatggtgccaccacttgcaatctttgtcgcaactcttcttttcaaagataaatttactaaggaagaacgtaactctggtttgacaaacatcatcatgggcttgtcatttatcactgagggagcgattccatttggtgccgctgacccagctcgtgcgattccaagcttcatccttggttcagcagtagcaggtggactcgttggtcttactggtatcaaactcatggcgccacacggaggaatcttcgttatcgcccttacttcaaatgctctcctttacctcgtttctgtcttggtaggagcaatcgtaagtggtgtggtttatggttacctacgcaaaccacaagcataa

SEQ ID NO: 9244 - DNA, 1944 bp, Streptococcus pneumoniae
  CDS (1)...(1944)
gtgtcaaaaaaggaaatcaatattaacaattataatgatgatgctattcaggtgctagaagggttggatgcggtccgaaaacgtccagggatgtatattggatcgaccgatggcgctggtcttcatcacctagtttgggaaatcgttgataatgcagtcgatgaagccttgtctgggtttggtgatcgtattgatgtaactatcaataaagacggtagtctaacggttcaagaccatggacgtgggatgccgacaggtatgcacgctatgggaattccaactgttgaggttatctttaccattcttcatgccggagggaaattcggtcaaggtggctataagacatcaggtggacttcacggagtgggttcttccgttgttaacgccctttctagctggttagaagttgaaattacccgtgatggcgcagtttacaagcaacgttttgaaaatggtggaaaacctgtcacgactttgaagaaaatcggtacagcactcaagtctaaaacaggcaccaaagttacttttatgcctgacgcgactatcttttctacgacagatttcaagtacaataccatttcagagcgccttaatgaatcagcctttctcttgaaaaatgtgaccttgtctttaacggacaagcgaacagatgaagcgattgagttccactatgagaatggagtacaaaattttgtttcttatctcaacgaagataaggaaatcttgacgccagttctttactttgaaggggaagacaatggttttcaagtggaagtagccctccagtacaatgacggattctcagataacattctatcctttgtcaataacgttcgcaccaaggacggtggaacgcacgagacaggactcaagtctgccattaccaaggtcatgaatgactatgcacgtaaaacaggtcttctcaaggaaaaagataaaaaccttgaaggttcagactatcgtgagggactagcggccgttctttctatcttagttcctgaagaacacttgcagtttgaaggacagaccaaggataaactaggaagccccctagctcgcccagttgtggatggaatagtggctgataagttgacctttttccttatggaaaatggggaattagcttctaacctcatccgcaaggctatcaaggcccgtgatgctcgtgaagcagcacgtaaggcgcgtgatgagagccgaaatgggaagaaaaacaagaaagataagggcttgttgtctgggaaattgaccccagcccaatctaagaatcctgctaagaatgaactctatctagttgagggggactctgccggtggttctgccaaacaaggtcgtgaccgcaagttccaggctattctacctcttcgtggtaaggttatcaatacagccaaggccaagatggcggatatcctcaaaaatgaagagatcaataccatgatttataccattggtgcgggtgttggagcagacttctctattgaagatgccaactatgataagatcattatcatgaccgatgcggataccgacggtgcccatatccagaccttgctcttgacatttttctaccgttacatgcgtccgctagtcgaggcaggtcatgtctatattgccctcccacctctttacaagatgtccaaaggtaaaggcaagaaagaagaagtggcctacgcttggacggacggagaactagaagaactccgtaaacagttcggtaaaggcgctaccctccaacgatacaaaggacttggtgagatgaatgcggaccagctctgggaaacaaccatgaacccagaaacacgtaccctcatccgtgtcacaattgaagatttagcgcgcgccgaacgccgcgtcaatgttctcatgggagataaggtagaaccacgccgtaaatggattgaagataatgtcaagtttacgctagaagaagcgacagtgttttaa

SEQ ID NO: 9245 - DNA, 2304 bp, Streptococcus pneumoniae
  CDS (1)...(2304)
atggcaaacaagaatacaagtacaacaagacggagaccgtctaaagcagaactggaaagaaaagaagcgattcaacgaatgttgatttcgttaggaattgcgattttattgattttcgcagccttcaaattaggggctgcaggtataaccctttataatttaattcgcttgctagtgggtagcctagcttatctggcgatattcggcctattaatctatctcttctttttcaagtggatacgaaaacaggaaggactcttatctggctttttcaccatatttgctggcttactcttgatttttgaggcctacttggtttggaaatatggtttggacaagtccgttctaaaagggaccatggctcaggttgtgacagatctgactggttttcgaacgactagctttgctggagggggcttgatcggggtcgctctttatattccaacagcctttctcttttcaaatatcggaacttactttattggttctatcttgattttagtgggttctctcctagtcagcccttggtctgtttacgatattgctgaatttttcagtagaggctttgccaaatggtgggaagggcacgagcgtcgaaaagaggaacgctttgtcaaacaagaagaaaaagctcgccaaaaggctgagaaagaggctagattagaacaagaagagactgaaaaagccttactcgatttgcctcctgttgatatggaaacgggtgaaattctgacagaggaagctgttcaaaatcttccacctattccagaagaaaagtgggtggaaccagaaatcatcctgcctcaagctgaacttaaattccctgaacaggaagatgactcagatgacgaagatgttcaggtcgatttttcagccaaagaagcccttgaatacaaacttccaagcttacaactctttgcaccagataaaccaaaagatcagtctaaagagaagaaaattgtcagagaaaatatcaaaatcttagaagcaacctttgctagctttggtattaaggtaacagttgaacgggccgaaattgggccatcagtgaccaagtatgaagtcaagccggctgttggtgtaagggtcaaccgcatttccaatctatcagatgacctcgctctagccttggctgccaaagatgtccggattgaagcaccaatccctgggaaatccctaatcggaattgaagtgcccaactccgatattgccactgtatctttccgagaactatgggaacaatcgcaaacgaaagcagaaaatttcttggaaattcctttagggaaggctgttaatggaaccgcaagagcttttgacctttctaaaatgccccacttgctagttgcaggttcaacgggttcagggaagtcagtagcagttaacggcattattgctagcattctcatgaaggcgagaccagatcaagttaaatttatgatggtcgatcccaagatggttgagttatctgtttacaatgatattccccacctcttgattccagtcgtgaccaatccacgcaaagccagcaaggctctgcaaaaggttgtggatgaaatggaaaaccgttatgaactctttgccaaggtgggagttcggaatattgcaggttttaatgccaaggtagaagagttcaattcccagtctgagtacaagcaaattccgctaccattcattgtcgtgattgtggatgagttggctgacctcatgatggtggccagcaaggaagtggaagatgctatcatccgtcttgggcagaaggcgcgtgctgcaggtatccacatgattcttgcaactcagcgtccatctgttgatgtcatctctggtttgattaaggccaatgttccatctcgtgtagcatttgcggtttcatcaggaacagactcccgtacgattttggatgaaaatggagcagaaaaacttcttggtcgaggagacatgctctttaaaccgattgatgaaaatcatccagttcgtctccaaggctcctttatctcggatgacgatgttgagcgcattgtgaacttcatcaagactcaggcagatgcagactacgatgagagttttgatccaggtgaggtttctgaaaatgaaggagaattttcggatggagatgctggtggtgatccgctttttgaagaagctaagtctttggttatcgaaacacagaaagccagtgcgtctatgattcagcgtcgtttatcagttggatttaaccgtgcgacccgtctcatggaagaactggagatagcaggtgtcatcggtccagctgaaggtaccaaacctcgaaaagtgttacaacaataa

SEQ ID NO: 9246 - DNA, 1494 bp, Streptococcus pneumoniae
  CDS (1)...(1494)
atgattacaggcgaattaaaaaataaaatcgatcagctgtgggaaattctttggacagaaggaaacgcaaatcctttaacaaatattgaacagttgacttatctcttatttatgaaagatttggatagtgtcgagcttggacgtgaaagtgatgctgaatttctagggattccttatgagggagtttttccaaaagataaacctgaataccgttggtcaacttttaaaaatataggagatgctcaggaagtttatcgtttaatgactcaggagatttttccgtttattaaaaatctcaagggggatacagatgatacagccttttcacgatatatgcgagaagctatttttcaaataaataaacctgctacgcttcaaaaggcaatttctatcttagatgtttttccaactaggggattagatgtagattttgataatgacaaacaaagtattactgatatcggagatatctatgaatatctgttatcaaaattgtcgaccgcaggtaaaaatggacagttccgtacacctcgtcacatcatcgatatgatggttgagttgatgcaaccgactatcaaagatatcatctcagatcccgctatgggttctgctggcttcttagtatctgctagccgttacttaaagcgtaagaaagatgaatgggaaaccaatacagataatatcaatcattttcataatcagatgtttcatggaaatgatacggatacgactatgttgagacttggggcgatgaacatgatgctacatggagtagaaaatccacaaatcagttaccttgactcgctgtctcaagataatgaagaagccgataaatatactttggttttagcaaatcctccttttaagggctcacttgactacaattcaacctctaatgaccttcttgcaaccgtaaaaaccaaaaaaacagaattactctttctttctcttttcttgcgaactttaaaaccaggtggacgagcagcagttatcgtacctgatggtgtcctttttggttcgtctaaagctcataaaggaattcgtcaggaaattgtagagaatcataagcttgatgctgtaatctcaatgcctagtggtgtgttcaagccttatgctggagtttcaactgccattctcatctttacaaaaactggtaatggtggtactgacaaagtctggttttacgatatgaaagcggatggtttaagtttggatgataagcgacaaccgattagcgacaatgatattccagatattatcgaacgctttcatcatcttgaaaaagaagcagaacgtcagagaacggatcaatctttctttgttccagttgctgagataaaggaaaatgattatgatttgtctatcaataaatataaagagattgagtatgaaaaagttgagtatgaaccaacagaggtcatcttaaagaaaatcaatgatttagaaaaagaaattcaagctggcttggctgaattagaaaaattactcaagtag

SEQ ID NO: 9247 - DNA, 3129 bp, Streptococcus pneumoniae
  CDS (1)...(3129)
gtgagaaggatagaggagaagtgtaaattgatcgcacaactagatacaaaaacagtctatagttttatggaaagcgtcatttcgatcgaaaagtatgtgagagcagctaaagaatacggctacactcatttggctatgatggatattgacaatctttatggcgctttcgactttctagagattacaaaaaaatacggcattcatcctttgctagggcttgaaatgacagtgtttgtagatgatcaggaagtgaatttgcgctttttagctctatctagtgtgggctatcagcagttgatgaagctttcgacagccaagatgcagggggagaaaacttggtcagtcctgtcccagtacctggaggatatcgcggtcattgtgccttattttgatagagttgagtcgttagaactaggctgtgattactatataggggtttatccagaaacactagcaagcgaatttcatcatcctatcttacctctttatcgggtcaacgcttttgaaagcagggatagagaagttcttcaagttttaacagcgattaaagaaaatctaccgctcagagaagttcccttgcgttcgagacaagatgtctttatatcagcaagttctttagagaaactattccaagagtgttttccgcaagctttggacaatttagaaaagcttatttcaggcatttcttacgacttggatactagtctgaaactgcctcgttttaatccagctagaccagcagtagaggagttgagagagcgtgctgaactggggcttgttcagaaggggttgactagtaaagaatatcaagatagactagaccaagaattgtctgttattcatgatatgggctttgatgattatttcttggttgtttgggatttgttgcgttttggacgatcgaatggctattatatgggaatgggaaggggttctgcagtaggcagtttggtttcttatgccttagacatcacggggattgacccagtagagaaaaatctgatttttgaacgctttcttaatcgtgaacgctataccatgcctgatattgatattgatatcccagatatttatcgtccagattttatcagatatgttggtaataaatatggtagtaaacatgcggcacaaatcgttactttttcaacctttggagccaagcaagctcttcgagatgtcttgaaacgctttggtgtgccagagtatgaattatctgcaattactaagaaaatcagttttcgtgacaatcttaagtcggcctatgagggcaatctccagtttcgtcagcaaatcaatagtaagttagaataccaaaaagcttttgagattgcttgcaagatagagggctatccaagacaaacctctgtccatgcggctggtgttgtaattagtgaccaagatttaaccaactatattcctctaaagtatggtgatgaaattccactgactcagtatgatgctcatggagttgaggctagcggacttttgaagatggactttctgggactacgaaatttgacctttgttcagaagatgcaagagttgcttgctgaaatagaaggtattcaccttaaaattgaagaaatagatttggaagacaaagaaacgttagctttatttgcctctggaaatacaaaaggtatctttcaatttgagcaaccaggtgccattcgtctgcttaagcgtgtgcaaccagtctgttttgaagatgtcgtcgcgactacttctctaaatcgaccgggtgctagtgactatatcaataattttgtggcaagaaagcatgggcaggaagaagtgactgttctggatccagtactggaggatattttggctccaacctacggcataatgctctatcaggagcaggttatgcaggttgcccagcgatttgccggatttagtcttgggaaagccgatattttgcgtcgggctatggggaaaaaggatgcctctgccatgcatgagatgagggcttcctttattcaaggttcattagaagctggtcatactgtggaaaaagcagagcaggtctttgatgttatggagaagtttgcaggttatggttttaacaggtcacacgcctatgcctactcagccttggccttccagttggcttattttaaaacacattatccagccattttttatcaggtcatgttaaattcttccaacagtgattacttaatagatgcacttgaagcaggttttgaagtagcctctctatccatcaacaccattccctatcacgataaaattgccaacaaggccatctatctaggtttgaaatccattaaaggagtcagtaatgatttagctctctggattattgaaaatagaccttattctaacattgaagattttatagctaaattacctgagaattatctgaaacttcctctgctagaacctttggtaaaagttggtcttttcgattcatttgaaaaaaatcgtcaaaaagtatttaataatttagctaatctatttgaatttgtgaaagagttgggaagtttgtttggagatgctatttatagttggcaggaatcggaagattggacggaacaagaaaaattttatatggaacaagagcttttagggataggtgtcagcaaacatccactacaagctattgcaagtaaggctatttacccgattaccccaatcggaaatttgtcagaaaatagctatgctattatcttggttgaagttcagaaaataaaagtgattcgtaccaaaaagggtgaaaatatggccttcttacaggcagatgatagtaagaaaaaattggatgtcactctcttttcagacttatatcgtcaggttggacaggaaataaaagagggagccttctactatgtaaaacgaaaaatacaatcacgtgatggccgtctgcaaatgattgcacaagaaataagagaagcagttgctgaacgcttttggatacaggtgaaaaatcatgaatcggatcaagaaatttcacgcattttagaacaatttaaaggcccaatcccagtcatcatccggtatgaagaggaacagaaaaccatcgtttctccccatcattttgtagctaaatccaatgaattagaggagaaattgaatgaaatcgttatgaaaacgatttatcgctaa

SEQ ID NO: 9248 - DNA, 1008 bp, Streptococcus pneumoniae
  CDS (1)...(1008)
atgaaacgtattgctgttttgactagtggcggagacgcacctggtatgaacgctgccatccgtgcagttgttcgtcaagcaatttcagaaggaatggaagtgtttggtatctatgacggatatgctggtatggttgccggtgaaattcatcccctagatgcagcttcagtaggggacatcatttctcgtggtggtacttttcttcactcagctcgttatccagagttcgctcaacttgaagggcaacttaaagggattgagcaattgaaaaaacacggaattgaaggtgtagttgttatcggtggtgacggatcttaccacggcgctatgcgtttgactgaacatggcttcccagctattggtcttccaggtacaatcgataacgatatcgttggtactgactttacaatcggttttgacacagcggttactactgccatggacgctatcgataagattcgtgatacatcatcaagtcaccgtcgtacttttgtaatcgaagttatgggacgtaacgctggtgatatcgctctttgggctggtattgcaactggtgctgatgaaatcatcatccctgaagcaggcttcaagatggaagatatcgtagcaagcatcaaagctggttatgaatgtggtaaaaaacacaatatcatcgtcttagctgaaggtgtgatgtcagcggctgaatttggtcaaaaacttaaagaagctggagatataagcgaccttcgtgtaacagaacttggacatattcaacgtggtggttctccaactccgcgtgaccgtgttttggcgtcacgtatgggtgcacatgctgttaaacttcttaaagaaggtatcggtggtgttgcggttggtattcgtaacgaaaaaatggttgaaaatccaattcttggtactgcagaagaaggggcattgtttagccttactgcagaaggtaagattgtggttaacaacccacacgaagccgatattgagctatctagcttgaataagagcttgtcataa

SEQ ID NO: 9249 - DNA, 1506 bp, Streptococcus pneumoniae
  CDS (1)...(1506)
atgaacaaacgtgtaaaaatcgttgcaactttgggtcctgcggtagaaatccgtggtggtaaaaaattcggtgaggacggatactggggtgaaaaacttgatgttgaagcttcagctaaaaacattgctaaattgattgaagctggtgctaacacattccgattcaacttctcacacggcgaccaccaagaacaaggtgagcgtatggcaactgttaaacttgcggaaaaaattgcaggtaaaaaagttggtttccttcttgatacaaaaggacctgaaatccgtacagaattgttcgaaggtgaagctaaagaatattcatacaaaactggtgaaaaaattcgtgttgcaactaaacaaggaatcaaatcaactcgtgaagtgattgcgttgaacgttgctggtgctcttgatatctatgatgatgttgaagttggtcgtcaagttttggttgacgatggtaaacttggtcttcgtgtggttgctaaagatgatgcaactcgtgaatttgaagttgaagttgaaaacgatggtatcatcgctaaacaaaaaggtgtgaacatccctaacactaaaattcctttcccagctcttgctgaacgcgataacgacgatatccgtttcggtcttgaacaaggtatcaacttcatcgcaatttcattcgtacgtactgcaaaagatgtgaacgaagttcgtgcaatctgtgaagaaactggaaacggacatgttcaattgttcgctaaaatcgaaaaccaacaaggtatcgataacttagacgaaatcatcgaagcagctgatggtattatgattgctcgtggtgatatgggtatcgaagtaccgttcgaaatggttccagtttatcaaaaaatgattatcaagaaagtcaatgctgcaggtaaagttgttatcactgcaacaaacatgcttgaaacaatgactgaaaaaccacgtgcaactcgttcagaagtatcagacgtattcaacgctgttatcgacggaactgacgctacaatgctgtcaggcgagtctgcaaacggtaaatacccactcgagtcagtaactacaatggctacaatcgacaagaacgctcaagctcttcttaatgaatacggacgtcttgattcagattcatttgagcgtaactctaagacagaagtaatggcttctgctgttaaagatgctactagctcaatggatatcaaattggttgtaactcttactaagacaggtcatactgcacgtttgatttctaaataccgtccaaatgctgacatcttagcattgacatttgacgaattgacagaacgtggcttgatgttgaactggggtgttatcccaatgttgacagatgctccatcttcaactgacgatatgttcgaaatcgctgaacgtaaagcggtagaagcaggtctcgttgagtcaggcgatgatatcgttatcgttgctggtgtgccagtaggagaagctgttcgcacaaacacaatgcgtatccgcacagtacgttaa

SEQ ID NO: 9250 - DNA, 2472 bp, Streptococcus pneumoniae
  CDS (1)...(2472)
atgtctaacattcaaaacatgtccctggaggacatcatgggagagcgctttggtcgctactccaagtacattattcaagaccgggctttgccagatattcgtgatgggttgaagccggttcaacgccgtattctttattctatgaataaggatagcaatacttttgacaagagctaccgtaagtcggccaagtcagtcgggaacatcatggggaatttccacccacacggggattcttctatctatgatgccatggttcgtatgtcacagaactggaaaaatcgtgagattctagttgaaatgcacggtaataacggttctatggacggagatcctcctgcggctatgcgttatactgaggcacgtttgtctgaaattgcaggctaccttcttcaggatatcgagaaaaagacagttccttttgcatggaactttgacgatacggagaaagaaccaacggtcttgccagcagcctttccaaacctcttggtcaatggttcgactgggatttcggctggttatgccacagacattcctccccataatttagctgaggtcatagatgctgcagtttacatgattgaccacccaactgcaaagattgataaactcatggaattcttacctggaccagacttccctacaggggctattattcagggtcgtgatgaaatcaagaaagcctatgagactgggaaagggcgcgtggttgttcgttccaagactgaaattgaaaagctaaaaggtggtaaggaacaaatcgttattactgagattccttatgaaatcaataaggccaatctagtcaagaaaatcgatgatgttcgtgttaataacaaggtagctgggattgctgaggttcgtgatgagtctgaccgtgatggtcttcgtatcgctattgaacttaagaaagacgctaatactgagcttgttctcaactacttatttaagtacaccgacctacaaatcaactacaactttaatatggtggcgattgacaatttcacacctcgtcaggttgggattgttccaatcctgtctagctacatcgctcaccgtcgagaagtgattttggcgcgttcacgctttgacaaagaaaaggctgagaaacgtctccgtatcgtcgaaggtttgattcgtgtgatttcgattttggatgaagtcattgctcttatccgtgcttctgagaataagcgagacgccaaggaaaacctcaaagttagctatgattttacggaagaacaggctgaggctatcgtaactttgcaactgtaccgtttgaccaataccgatgtggttgtcttgcaggaagaagaagcagagcttcgtgagaagattgctatgctggcggctattatcggtgatgaaaggactatgtacaatctcatgaagaaagaacttcgtgaggtcaagaagaactttgcaactcctcgtttgagttctttagaagacactgcgaaagcaattgagattgatacagctagtcttatcgctgaggaagatacctacgtcagcgtgaccaaggcaggttacatcaagcgtaccagtccacgttcctttgcggcttccaccttggaagaaattggcaagcgtgatgatgaccgtttgatttttgttcaatctgccaagacaacccagcacctcttgatgttcacaagtcttggaaatgtcatctacagaccaatccatgagttggcagatattcgttggaaggacatcggagagcatctgagccaaaccatcacaaactttgaaacgaatgaagcaatcctttatgtggaagtactggatcagtttgacgatgcgacaacctactttgcagcgactcgccttggtcaaatcaaacgggtagagcgaaaagaattcactccatggcggacctatagatctaagtctgtcaagtatgctaagctcaaagacgatacagatcagattgtagcagtggctccgattaaactagatgatgttgtcttggttagtcaaaatggttatgccctgcgtttcaatatcgaagaggttccggttgtcggtgctaaggcagcaggtgtcaaggctatgaatttgaaagaagatgatgtcctccaatctggctttatctgtaatacttcgtccttctacctcttgacccagcgtggaagcttgaaacgtgtttccattgaggaaattctagcaaccagccgtgccaaacgaggattacaagtcttgcgtgagttgaaaaacaaaccgcatcgtgtcttcttggcaggagcagttgcagagcaaggatttgttggcgatttcttcagtacggaagtggatgtgaacgaccaaactctgcttgtccaatccaataaaggaacaatctatgaaagccgattgcaagacttgaacttgtcagaacgcactagcaatggaagcttcatttctgacacgatttcagatgaagaagtttttgacgcttatcttcaggaagtagttactgaagataaataa

SEQ ID NO: 9251 - DNA, 2130 bp, Streptococcus pneumoniae
  CDS (1)...(2130)
atggataaaaaatatgaaaaaatctctcaggatttgggagtgacgttaaagcaaattgataccgttctaagtttgacagctgaaggggcgactattccctttatcgcgcgttatcgcaaggacatgactggtagtctggatgaggtggcgattaaggctattattgatttggataaaagtctgacaaatctcaatgaccgtaaggaagctgtcttagctaagattcaagaacaaggtaagttgaccaaggaattggaagaagctatcttagttgccgaaaaattagcagacgttgaagaactctatcttccttataaggaaaagcgtcgtaccaaggcaaccattgcccgtgaagctggactctttcctcttgctcgtttgattttgcagaatatagttgacttagagaaagaagctgaaaagttcgtctgtgaaggatttgcgactggcaaggaagccttgaccggtgcagttgatattttggtcgaagccttatcggaagatgtgaccttgcgttctatgacttatcaggaagtgctgagacactctaaactcacttctcaagccaaggatgaaagtcttgatgaaaagcaggtttttcagatttattatgatttttcagagacagttggaactatgcaaggctatcgtaccttggctctcaatcgtggggagaaacttggtgtcttgaagatcggttttgaacatgcgacggaccgtattcttgccttctttgctactcgtttcaaggtgaaaaatgcttatattgatgaagttgttcagcaatccgttaagaaaaaggtcttgcctgctattgagcgtcgtattcggacagaattaactgagaaagctgaagagggagctatccaacttttttctgacaatctgcgcaatctcctcttggttgctccactgaaagggcgcgtggttcttggatttgacccagcctttcgtacaggtgccaagttagctgtcgtggatgcaacaggaaaaatgctgacaactcaggttatttatcctgttaaaccagcatcagctcgtcaaatcgaagaagccaagaaagatttagcagatttaattggtcaatacggtgtagagattattgccattggaaatggaacggccagtcgtgaaagtgaagcttttgtagcggaagttctgaaagatttccctgaagtcagctatgttatcgttaatgaaagtggtgcttctgtctattctgccagcgaacttgctcgtcaggagtttccagacttgaccgttgaaaaacgctctgccatttctatcgcccgtcgtttgcaagatcctcttgcggaattggtcaaaatcgatcctaagtcaattggtgtcggtcaataccaacacgatgtcagtcagaagaaactatctgagagtctggactttgttgtcgatacagtggttaaccaagttggtgtcaatgtcaatacagctagcccagctcttctttcacacgtagctggactcaacaaaactatctctgaaaatattgtcaaataccgcgaggaagaaggaaaaatcacttcacgcgcccaaatcaagaaagttcctcgtctgggagccaaggcctttgagcaggctgctggtttccttcgtatccctgaaagtagcaatatccttgataatacaggagttcacccagagaattacactgcagttaaggaactcttcaaacgtttagatattaaagacctaaacgaagaagcccaaagcaaactcaagtccctttcagtcaaggaaatggctcaagagctagacctcggtccagaaacccttaaagatatcattgcagatcttctcaaaccaggtcgagatttccgtgattcctttgacgcacctgtgcttcgccaagatgtcctagatatcaaagacctagtggtaggtcagaagctagaaggtgttgtgcgtaacgttgttgacttcggtgccttcgttgatatcgggattcacgaggacggcttgattcatatttctcatatgagtcgcaagtttatcaaacaccctagtcaagtggtgtcagttggagatttggtgaccgtttgggtcaagaaaattgatactgaacgtgaaaaagttaatctgtcgctcctcgctccaaatgaaactgactga

SEQ ID NO: 9252 - DNA, 816 bp, Streptococcus pneumoniae
  CDS (1)...(816)
atgcactatgatgcaagctacatttcatttgatgggatattaagaaaggagattctcatgacacttttagatgtaaaacacgttcaaaaaatttataaaacacgttttcagggcaaccaagtagaagccctcaaggatattcactttaccgtcgaaaagggtgactacgttgccatcatgggtgagtctggttctggtaaatcaactcttctcaatattctagctatgctggataaaccaagtcgtggtcaggtttacttgaatggaactgacaccgcaaccattaaaaattcacaggcctctagcttccgtcgtgaaaagttgggctttgtcttccaagactttaacttgctagatactctatctgtaaaggacaatatcttgcttccgcttgtcttgtcaagaagacctattacagagatgatgaagaaattggtggtgacagctgagaatctgggaataaaccaattacaagagaagtacccttacgagatttctggtggtcagaaacagcgtgtagcagtagcccgcgccatcatcacagaacctgaaattctccttgcggacgaaccgacaggagctcttgactccaagtcatctgcagccttacttgatgtctttgatgaaatcaatgagcgcggccaaaccattctcatggtaacccactcaacagcagcagctagcagagctaaacgtgtactctttatcaaagacggcattctttacaatcaaatctaccgtggagagaagacagaacgtcagatgttccaagaaatctctgataccttgactgtcatggcaagcgaggtgaattag

SEQ ID NO: 9253 - DNA, 888 bp, Streptococcus pneumoniae
  CDS (1)...(888)
atggaaattaaaattgaaactggtggtctgcgtttggataaggctttgtcagatttgtcagaattatcacgtagtctcgcgaatgaacaaattaaatcaggccaggtcttggtcaatggtcaagtcaagaaagctaaatacacagtccaagagggtgatgtcgtcacttaccatgtgccagaaccagaggtattagagtatgtggctgaggatcttccgctagaaatagtctaccaagatgaggatgtggctgtcgttaacaaacctcagggaatggttgtgcacccgagtgctggtcataccagtggaaccctagtaaatgccctcatgtatcatattaaggacttgtcgggtatcaatggggttctgcgtccagggattgttcaccgtattgataaggatacgtcaggtcttctcatgattgctaaaaacgatgatgcgcatctagtacttgcccaagaactcaaagataaaaagtctctccgcaaatattgggcgattgttcatggaaatctgcctaatgatcgtggtgtaattgaagcgccgattggccggagtgaaaaagaccgtaagaaacaggctgtaactgctaaagggaagcctgcagtgacgcgttttcacgtcttggaacgctttggcgattatagcttagtagagttgcaactggagacagggcgcactcatcaaatccgtgtccacatggcttatatcggccatccagtcgctggtgatgaggtctatggtcctcgcaagactttgaaaggacatggacaatttcttcatgccaagactttaggttttactcatccgagaacaggtaagaccttggaatttaaagcagatatcccagagatttttaaggaaaccttggagagattgagaaagtaa

SEQ ID NO: 9254 - DNA, 639 bp, Streptococcus pneumoniae
  CDS (1)...(639)
atgtcaaaaggatttttagtctctcttgagggaccagagggagcaggcaagaccagtgttttagaggctctgctaccaattttagaggaaaaaggagtagaggtgctgacgacccgtgaacctggcggagtcttgattggggagaagattcgggaagtgattttggatccaagtcatactcagatggatgctaaaacagagctacttctctatattgccagtcgcagacagcatttggtggaaaaagttcttccagcccttgaagctggcaagttggtcatcatggatcgttttatcgatagttctgttgcctatcagggatttggtcgtggcttagatattgaagccattgactggctcaatcagtttgcgacagatggcctcaaacccgatttgacactctattttgacatcgaggtggaagaagggctggctcgtattgctgctaatagtgaccgcgaggttaatcgtttggatttggaagggttggacttgcataaaaaagttcgtcaaggctacctttctcttctggataaagagggaaatcgcattgtcaagattgatgctagtctccctttggagcaagttgtggaaactaccaatgctgtcttgtttgacggaatgggcttggccaaatga

SEQ ID NO: 9255 - DNA, 891 bp, Streptococcus pneumoniae
  CDS (1)...(891)
atgaaacaagatcaactaaaggcttggcaaccagctcagtttgaccgttttgtccgtatcttagaacaagaccagctcaatcacgcctatctcttttcaggtttctttggaagcttggaaatggcgcaatttttagctaagagccttttttgtacggataaagttggcgtcttaccatgtgagaaatgccgaagttgcaagctgattgaacaggaagagtttccagatgtcaccttgattaagccagtcaatcaggtcatcaagacagaacgcattcgggaattggtgggacagttttctcaagcagggattgaaagccagcaacaggtctttatcatcgagcaagcggataaaatgcatcccaacgcagccaattctctgctcaaggtcatcgaagaaccccagagtgaagtttatattttcttcttgactagcgatgaggaaaagatgttaccgacaatccgaagtcggactcagatcttccactttaaaaagcaagaagaaaaacttatcttactcttagaacaaatgggacttgttaagaaaaaagcgactcttttagctaagtttagtcaatcgcgagctgaagcagaaaagttggcacatcaggcaagtttttggaccttggtcgatgaaagtgaacgcctgctgacttggttagtagctaagaaaaaagaaagttatctacaggttgccaaattagccaacttggcagatgataaggaaaaacaggatcaggttttacggattcttgaagttctctgtgggcaggacctcttgcaggtaagagtaagagtgattctacaagatttactagaagctagaaaaatgtggcaagctaatgtcagctttcaaaatgccatggaatatctggtcttgaaagaaatataa

SEQ ID NO: 9256 - DNA, 1335 bp, Streptococcus pneumoniae
  CDS (1)...(1335)
gtgtctcaatcttatatcaatgttatcggtgctggtttggcaggttctgaagcagcctaccaaatcgcagagcgtggtattccagttaaactttatgaaatgcgtggtgtcaagtcaacacctcagcacaaaacagacaattttgctgagttggtttgttccaattccttgcgtggagatgctttgacaaatgctgttggcctccttaaggaagaaatgcgtcgcttgggttctgtgattttggaatctgctgaggctacacgtgttcctgcaggtggtgcccttgcagtggaccgtgatggtttctctcaaatggtgaccgaaaaagttgccaaccaccccttgattgaagtggttcgtgatgaaattacagaattgccgacagatgttattacggttatcgctactggtcctttgacaagtgatgccttggctgaaaagattcatgcccttaatgacggtgatggtttttatttctacgatgcggcagcgcctattatcgatgtcaacactatcgatatgagcaaggtctacctcaaatcacgttatgataagggagaagcggcctacctcaatgcccctatgaccaagcaagaatttatggatttccatgaagctttggtcaatgcagaagaagcaccgcttaattcttttgaaaaagaaaagtactttgaaggatgtatgcctatcgaagtcatggccaaacgtggcattaaaaccatgctttatggtcctatgaaaccagttggtcttgagtatccggacgactacacaggacctcgtgatggagaatttaaaacaccttatgcggttgtccagctccgtcaggataatgcagctggtagcctatacaatattgttggtttccagacccacctcaaatggggagaacaaaagcgtgtcttccaaatgattccgggtcttgaaaatgcggagtttgtccgttatggtgtcatgcatcgcaattcttacatggattcaccaaatcttcttgagcagacttaccgttccaagaaacaaccaaatctcttctttgctggtcagatgacgggggtggaaggctatgttgagtcggcggcttcgggcttagttgcgggaattaacgcagctcgtctcttcaaggaagaaagcgaggttattttccccgagacgacagcgattggaagcttagctcattacattacccatgccgacagcaaacatttccaaccaatgaatgtcaattttgggatcatcaaggagttggaaggcgagcgtatccgtgataagaaggctcgttatgaaaaaattgcagagcgtgcccttgccgacttagaggaatttttgactgtctaa

SEQ ID NO: 9257 - DNA, 558 bp, Streptococcus pneumoniae
  CDS (1)...(558)
atggctaacgtaattattgaaaaagctaaagagagaatgacccaatctcaccaatcacttgctcgtgaatttggtggtatccgtgctggtcgtgccaatgcaagcttgcttgaccgtgtacatgtagaatactatggagtcgaaactcctcttaaccaaatcgcttcaattacgattccagaagcgcgtgttttgttggtaacaccatttgacaagtcttcattgaaagacatcgaccgtgccttgaacgcttctgatcttggtatcacaccggctaatgacggttctgtgattcgcttggttatcccagctcttacagaagaaactcgtcgtgaccttgctaaagaagtgaagaaggtcggcgaaaatgctaaagtggctgtccgcaatatccgtcgcgatgctatggacgaagctaagaaacaagaaaaagcaaaagaaatcactgaagacgaattgaagactcttgaaaaagatattcaaaaagtaacagacgatgctgttaaacacatcgacgacatgactgctaacaaagagaaagaacttttggaagtctaa

SEQ ID NO: 9258 - DNA, 447 bp, Streptococcus pneumoniae
  CDS (1)...(447)
atgaacaaaacaacatttatggctaaaccaggccaagttgaacgtaaatggtacgtagttgacgcaactgatgtaccacttggacgtctttctgcagtagttgctagcgtacttcgcggaaaaaacaaaccaacatttacaccacacactgatacaggtgacttcgtgattgttatcaatgctgaaaaagttaaattgactggtaaaaaagcaactgataaaatctactacactcactcaaaccacccaggtggattgaaacaaatctctgcaggtgaacttcgttctaaaaatgcagtacgtttgattgagaaatcagttaaaggtatgcttccacacaatacacttggacgcgctcaaggtatgaagttgaaagtatttgttggagctgagcacactcatgctgcacaacaaccagaagttcttgacatttcaggacttatctaa

SEQ ID NO: 9259 - DNA, 975 bp, Streptococcus pneumoniae
  CDS (1)...(975)
atggcttttgcaaaaataagtcaggttgctcattatgtgccagagcaagtggttacaaatcacgacttggctcagattatggataccaatgatgagtggatttcaagtcgaacgggaatacgacaaaggcatatttcaagaacagaatctaccagtgatttggctacagaggttgctaagaaactgatggcaaaagctggaataacaggagaagaactggattttatcatcctagctaccattactccagattcgatgatgccctctacagctgctcgtgttcaagctaatattggcgctaataaagcctttgcttttgacttaaccgcggcttgcagtggatttgtatttgctctttcaactgctgaaaagtttatcgcttctggtcgctttcaaaaaggcttggtgattggtagtgaaaccctctctaaggcagtcgattggtcggatcgatcaacagctgtgttgtttggagatggtgctggtggtgtcttgttagaagctagcgagcaagagcatttcttagctgagagtctcaatagcgatggaagtcgcagcgagtgtttaacttatgggcattcaggtttgcattctccattttcagatcaagaaagtgcagattcatttttgaagatggatggacgcacagtctttgattttgccattcgagatgtagccaagtctatcaagcagactattgatgaatctcctatagaggtgacagacttggattatctgctacttcatcaagccaatgaccgtattttggataagatggctagaaaaattggtgttgaccgagccaaacttccagccaatatgatggaatatggcaataccagtgcagccagtatcccgattttactttcagagtgtgtagaacaaggtctcatccctttagatggtagccagactgttcttctatcaggcttcggtggaggcttgacctggggcacgctcattcttacaatttag

SEQ ID NO: 9260 - DNA, 225 bp, Streptococcus pneumoniae
  CDS (1)...(225)
atggcagtatttgaaaaagtacaagaaattatcgttgaagaacttggaaaagacgcatcagaagtaacacttgaatcaacttttgatgatttggacgcagattcattggacttgttccaagtaatctcagaaatcgaagatgcttttgatatccaaatcgaagcagaaaatgacttgaaaacagttggtgacttggttgcttacgttgaagagcaagcaaaataa

SEQ ID NO: 9261 - DNA, 975 bp, Streptococcus pneumoniae
  CDS (1)...(975)
atgaaaacgcgtattacagaattattgaagattgactatcctattttccaaggagggatggcctgggttgctgatggtgatttggcaggggctgtttccaaggctggaggattaggaattatcggtgggggaaatgccccgaaagaagttgtcaaggccaatattgataaaatcaaatcattgactgataaaccctttggggtcaacatcatgctcttatctccctttgtggaagatatcgtggatctcgttattgaagaaggtgttaaagttgtcacaacaggagcaggaaatccaagcaagtatatggaacgtttccatgaagctgggataatcgttattcctgtcgttcctagtgtcgctttagctaaacgcatggaaaaaatcggtgcagacgctgttattgcagaaggaatggaagctggggggcatatcggtaaattaacaaccatgaccttggtgcgacaggtagccacagctgtatctattcctgttattgctgcaggaggaattgcggatggtgaaggtgctgcggctggctttatgctaggtgcagaggctgtacaggtggggacacggtttgtagttgcaaaagagtcgaatgcccatccaaactacaaggagaaaattttaaaagcaagggatattgacactacgatttcagctcagcactttggtcatgctgttcgtgctattaaaaatcagttgactagagattttgaactggctgaaaaagatgcctttaagcaggaagatcctgatttagaaatctttgaacaaatgggagcaggtgccctagccaaagcagttgttcacggtgatgtggagggtggctctgtcatggcaggtcaaatcgcagggcttgtttctaaagaagaaacagctgaagaaatcctaaaagatttgtattacggagccgctaagaaaattcaagaagaagcctctcgctggacaggagttgtaagaaatgactaa

SEQ ID NO: 9262 - DNA, 732 bp, Streptococcus pneumoniae
  CDS (1)...(732)
atgaaactagaacataaaaatatctttattacaggttcgagtcgtggaattggtcttgccatcgcccacaagtttgctcaagcaggagccaacattgtcttaaacagtcgtggggcaatctcagaagaattgctcgctgagttttcaaactatggtatcaaggtggttcccatttcaggagatgtatcagattttgcagacgctaagcgtatgattgatcaagctattgcagaactgggttcagtagatgttttggtcaacaatgcagggattacccaagatactcttatgctcaagatgacagaagcagattttgaaaaagtgctcaaggtcaatctgactggtgcctttaatatgacacaatcagtcttgaaaccgatgatgaaagccagagaaggtgctatcattaatatgtctagtgttgttggtttgatggggaatattggtcaagctaactatgctgcttctaaggctggcttgattggctttaccaagtctgtggcacgcgaggtcgctagtcggaatatacgagtcaatgtgattgctccaggaatgattgagtctgatatgacagctatcttatcagataagattaaggaagctacactagctcagattccgatgaaagaatttgggcaggcagagcaggttgcagatttgacagtatttttagcaggccaagattatctaactggtcaagtgattgccattgatggtggcttaagtatgtag

SEQ ID NO: 9263 - DNA, 393 bp, Streptococcus pneumoniae
  CDS (1)...(393)
atgtcacaagcacaatatgcaggtactggacgtcgtaaaaacgctgttgcacgcgttcgccttgttccaggaactggtaaaatcactgttaacaaaaaagatgttgaagagtacatcccacacgctgaccttcgtcttgtcatcaaccaaccattcgcagttacttcaactgtaggttcatacgacgttttcgttaacgttgtaggtggtggatacgctggtcaatcaggagctatccgtcacggtatcgctcgtgcccttcttcaagtagacccagacttccgcgattcattgaaacgcgcaggacttcttacacgtgactcacgtaaagttgaacgtaagaaaccaggtcttaagaaagctcgtaaagcatcacaatttagtaaacgttaa

SEQ ID NO: 9264 - DNA, 1245 bp, Streptococcus pneumoniae
  CDS (1)...(1245)
gtgaaaagaatgaaactaaatcgagtagtggtaacaggttatggagtaacatctccaatcggaaatacaccagaagaattttggaatagtttagcaactgggaaaatcggcattggtggcattacaaaatttgatcatagtgactttgatgtgcataatgcggcagaaatccaagattttccgttcgataaatactttgtaaaaaaagataccaaccgttttgataactattctttatatgccttgtatgcagcccaagaggctgtaaaccatgccaatcttgatgtagaggctcttaatagggatcgttttggtgttatcgttgcatctggtattggtggaatcaaggaaattgaagatcaggtacttcgccttcatgaaaaaggacccaaacgtgtcaaaccaatgactcttccaaaagctttaccaaatatggcttctgggaatgtagccatgcgttttggtgcaaacggtgtttgtaaatctatcaatactgcctgctcttcatcaaatgatgcgattggggatgccttccgctccattaagtttggtttccaagatgtgatgttggtgggaggaacagaagcttctatcacaccttttgccatcgctggtttccaagccttaacagctctctctactacagaggatccaactcgtgcttcgatcccatttgataaggatcgcaatgggtttgttatgggtgaaggttcagggatgttggttctagaaagtcttgaacacgctgaaaaacgtggagctactatcctggctgaagtggttggttacggaaatacttgtgatgcctaccacatgacttctccacatccagaaggtcagggagctatcaaggccatcaaactagccttggaagaagctgagatttctccagagcaagtagcctatgttaatgctcacggaacgtcaactcctgccaatgaaaaaggagaaagtggtgctatcgtagctgttcttggtaaggaagtacctgtatcatcaaccaagtcttttacaggacatttgctgggggctgcgggtgcagtagaagctatcgtcaccatcgaagctatgcgtcataactttgtaccaatgacagctgggacaagtgaagtatcagattatatcgaagctaatgtcgtttatggacaaggtttggagaaagaaattccatacgctatttcaaatacttttggttttggaggccacaatgcagttcttgctttcaaacgttgggagaatagataa

SEQ ID NO: 9265 - DNA, 486 bp, Streptococcus pneumoniae
  CDS (1)...(486)
atgaatttaaacgatattaaagacttgatgactcaatttgaccagtcaagtttgagagaattttcttataaaaatgggacggatgagttgcagtttagcaagaatgaagcaagacctgtgcctgaagttgcaactcaagtcgctccagcacccgttctagcaacaccgagtccagtagctcctacatctgctccagcagagactgtagcagaagaagttccagctccagctgaagcaagtgtggctactgagggaaatcttgtagagagtccacttgttggagtggtttacttggctgctggaccagataaacctgccttcgttacagttggtgatagtgtcaaaaaaggtcaaacattggtaattatcgaagccatgaaagtcatgaatgaaatcccagctcctaaggatggtgtggtaacggaaattctcgtctctaacgaagaaatggttgagtttggtaaaggattggtacgtatcaaatga

SEQ ID NO: 9266 - DNA, 1368 bp, Streptococcus pneumoniae
  CDS (1)...(1368)
atgtttcgaaaaattttaattgccaatcgtggtgaaattgcggttcgtattatccgtgcggcacgtgaattggggattgcgacggtagcggtttattcaactgctgataaggaagctcttcatacgcttttggcagatgaagcagtttgtattggtcctggcaaggcaacagagtcttatctcaatattaatgcagttctatcagctgcagtcttgactgaggcagaagctattcaccctggttttggatttctcagtgaaaattccaaatttgcgaccatgtgtgaagaagtaggtatcaagtttatcggtccatctggtcatgttatggatatgatgggggataagatcaatgcgcgtgctcagatgattaaagcaggtgtgcctgttataccaggttcagatggagaagtgcataactctgaagaagctttgattgttgctgaaaaaattggctatcctgttatgctcaaggcttcagcaggtggaggtggtaaagggattcgtaaggttgaaaaaccagatgacctcgtttctgcctttgaaactgcctctagtgaggccaaggccaattatggcaatggtgccatgtacatagaacgggttatctatccagctcggcacattgaggttcaaatcctaggtgatgagcatggacatgtgattcacttgggtgaacgggattgttctcttcaaaggaataaccaaaaggttttggaagaaagtccctcgattgcaatcggaaaaacgctgcgtcatgaaataggtgctgctgctgttcgagcggcagagtttgttggctatgagaatgcaggaaccattgaatttcttcttgatgaagcaagtagaaatttctatttcatggagatgaatactcgtgttcaggtagaacatccagtaacagagtttgtttcaggtgttgatatcgttaaggaacagatttgcattgcggcaggtcagcctttgtctgttaagcaagaagatattgtcctacgcggtcatgccatcgagtgtcgtatcaatgcagaaaacccagcctttaactttgctccaagtccaggtaagattactaatctctatctgccaagtggtggagttggcttgcgcgtggattcagcagtttatccaggttataccattccgccttattatgatagtatgattgccaaaatcatagtacacggcgaaaatcgttttgacgccttgatgaaaatgcaacgtgccctctatgaattagagattgaaggagtgcagaccaatgcagatttccagcttgatctcatttcagatcgcaatgtcattgctggggattatgatacttccttcttgatggaaaccttcttacctaaatatcaagaaaaagaataa

SEQ ID NO: 9267 - DNA, 867 bp, Streptococcus pneumoniae
  CDS (1)...(867)
atggctctatttagtaaaaaagataagtatattcgaatcaatcccaatcgttcggttagggaaaaacctcaagctaagccagaggttccagatgaattattttcccagtgtccaggctgtaagcataccatctatcagaaggatctgggaagtgaacgtatctgtccgcactgtagctatacctttcgtatttctgcccaagaacgcttggctttgacgattgatatgggaaccttcaaagaattgtttacagggattgaaagcaaggatcccttgcatttccctggttaccaaaagaaactggcatctatgcgtgaaaaaacaggtctgcatgaagccgttgtgacaggaactgctcttattaaaggtcagactgtggctcttgggattatggattctaattttatcatggcttctatgggtacggttgtaggtgaaaaaatcactcgtttgtttgagtatgcgactgtcgaaaaattgccagttgtcctattcacagcctctggtggagcccgtatgcaggaaggaatcatgagtctcatgcagatggctaagatctctgcagcggttaaacgccattcaaatgctggtctcttttacctgaccattttgacagatccaacgactggtggtgtgacagcttctttcgctatggaaggcgatatcattctggctgaaccacagagcttggttggttttgctgggcgtcgtgtgattgaaaatacggttcgtgaaagcttgcctgaggatttccaaaaggcagaattcctattagaacatggctttgtggatgctattgtcaaaagaagagacttaccagatacgattgctagcctagtcagattgcatggagggagtcctagatga

SEQ ID NO: 9268 - DNA, 768 bp, Streptococcus pneumoniae
  CDS (1)...(768)
atgaatattgcaaaaatagtcagagaagcgcgtgagcagagtcgcttgacaaccttggactttgcgacaggcatttttgatgaatttatccaattacatggtgaccgttcttttcgtgatgatggtgcagttgttggtggtattggttggcttggagaccaagctgtaacagtggttggtatccaaaaaggcaagagtttgcaagacaacctcaaacggaattttggccaaccacatccagaaggctaccgaaaggcactgcggttgatgaaacaggctgagaaatttggccgtccagttgtgacctttatcaatacagcaggtgcttatcctggtgtcggagcggaagaacgtggtcaaggggaagctatcgctcgcaatctcatggaaatgagtgacctgaaagttcctattatcgccattattatcggtgaaggtggttcaggcggggctctggctctagctgtcgcggaccgtgtctggatgctggaaaattctatctatgccattctcagtccagaaggctttgcttccattttatggaaggacggtactcgcgccatggaagcagcagaactgatgaaaatcacttcgcatgaactgttagaaatggacgtggtggataaggtgatttctgaagtaggactttctagtaaagaactaattaagagtgtcaaaaaagaactccaaacggagctggctagactttcacaaaaaccgctagaagagttgctggaagaacgctatcaacgatttagaaaatactaa

SEQ ID NO: 9269 - DNA, 1443 bp, Streptococcus pneumoniae
  CDS (1)...(1443)
atgaactttgaaacagtcattggacttgaagtccacgtagagctcaacaccaattcaaaaatcttctcacctacttctgcccacttcggaaatgatcaaaatgccaacactaacgtgattgactggtctttcccaggagttctgccagttctcaataaaggggttgtcgatgccggaatcaaggctgctcttgccctcaacatggacatccacaaaaagatgcactttgaccgcaagaactacttctatcctgataaccccaaagcctaccaaatttctcaatttgatgaaccaatcggatataatggctggattgaagtcgaactagaagacggtacgaccaagaaaatcggtatcgaacgtgcccacctagaggaagacgctggtaaaaacacccatggtacagatggctactcttatgttgacctcaaccgccaaggggttcccttgattgagattgtatctgaggcagatatgcgttctcctgaagaagcctatgcttatctgacagccctcaaggaagttatccagtacgctggcatttctgacgttaagatggaggaaggttcgatgcgtgtggatgccaacatctcccttcgtccttatggtcaagagaaattcggtaccaagactgaattgaagaacctcaactccttctcaaacgttcgtaaaggtcttgaatacgaagtccaacgccaggctgaaattcttcgctcaggtggtcaaatccgccaagaaacacgccgttacgatgaagcgaataaagcaaccatcctcatgcgtgtcaaggaaggggctgctgactaccgctacttcccagaaccagacctacccctctttgaaatttctgacgagtggattgaggaaatgcggactgagttgccagagtttccaaaagaacgtcgtgcgcgttatgtatctgaccttggtttatcagactacgatgctagtcagttgactgctaataaagtcacttctgacttctttgaaaaagctgttgccctaggtggtgatgccaaacaagtctctaactggctccaaggggaagtcgctcagttcttgaatgctgaaggtaaaacactggaacaaatcgaattgacaccagaaaacttggttgaaatgattgccatcatcgaagacggtactatttcatctaagattgccaagaaagtctttgtccatctagctaaaaatggcggtggcgcgcgtgaatacgtggaaaaagcaggtatggttcaaatttcagatccagctatcttgatcccaatcatccaccaagtctttgccgataacgaagctgctgttgccgacttcaagtcaggcaaacgtaacgccgacaaagcctttacaggattccttatgaaggcaaccaaaggccaagccaacccacaagttgcccttaaactacttgcacaggaattggcgaagttgaaagaaaactag

SEQ ID NO: 9270 - DNA, 1467 bp, Streptococcus pneumoniae
  CDS (1)...(1467)
atgacttttaacaataaaactattgaagagttgcacaatctccttgtctctaaggaaatttctgcaacagaattgacccaagcaacacttgaaaatatcaagtctcgtgaggaagccctcaattcatttgtcaccatcgctgaggagcaagctcttgttcaagctaaagccattgatgaagctggaattgatgctgacaatgtcctttcaggaattccacttgctgttaaggataacatctctacagacggtattctcacaactgctgcctcaaaaatgctctacaactatgagccaatctttgatgcgacagctgttgccaatgcaaaaaccaagggcatgattgtcgttggaaagaccaacatggacgaatttgctatgggtggttccggtgaaacttcacactacggagcaactaaaaacgcttgggaccacagcaaggttcctggtgggtcatcaagtggttctgccgcagctgtagcctcaggacaagttcgcttgtcacttggttctgatactggtggttccatccgccaacctgctgccttcaacggaatcgttggtctcaaaccaacctacggaacagtttcacgtttcggtctcattgcctttggtagctcattagaccagattggaccttttgctcctactgttaaggaaaatgccctcttgctcaacgctattgccagcgaagatgctaaagactctacttctgctcctgtccgcatcgccgactttacttcaaaaatcggccaagacattaagggcatgaaaattgctttgcctaaggaatacctaggcgaaggaattgatccagaggttaaggaaacaatcttaaacgcggccaaacactttgaaaaattgggtgctatcgtcgaagaagtcagccttcctcactctaaatacggtgttgccgtttattacatcatcgcttcatcagaagcttcatcaaacttgcaacgttttgacggtatccgttacggctaccgcgcagaagatgcgactaatcttgatgaaatctatgtaaacagccgtagccaaggttttggtgaagaagtgaagcgccgtatcatgctgggtactttcagtctttcatcaggttactacgatgcctactacaagaaggctggacaggtccgtacacttatcattcaagatttcgaaaaagtcttcgcggattacgatttgattttgggtccaactgctccaagtgttgcctatgacttggattctctcaaccatgacccagttgccatgtacttagccgacctcttgaccatacctgtaaacttggcaggactgcctggaatttcgattcctgctggattctctcaaggtctacctgtcggtctgcaattgattggtcccaagcactctgaggaaaccatttaccaagttgctgctgcctttgaagcaacaacaggctaccacaaacaacaacccgtgatttttggaggtgacaactaa

SEQ ID NO: 9271 - DNA, 303 bp, Streptococcus pneumoniae
  CDS (1)...(303)
atgaaaattacgcaagaagaggtaacacacgttgccaatctttcaaaattaagattctctgaagaagaaactgctgcctttgcgaccaccttgtctaagattgttgacatggttgaattgctgggcgaagttgacacaactggtgtcgcacctactacgactatggctgaccgcaagactgtactccgccctgatgtggccgaagaaggaacagaccgtgatcgcttgtttaaaaacgtacctgaacaagacaactactatatcaaggtgccagctatcctagacgatggaggagatgcctga

SEQ ID NO: 9272 - DNA, 1437 bp, Streptococcus pneumoniae
  CDS (1)...(1437)
atgactacttttaaagatggatttttatggggtggtgctgttgctgctcatcaacttgaaggtggatggcaagaaggtggcaagggaattagtgttgctgatgttatgactgctggtcgtcatggagtagctcgtgaaattactttgggagttttagagggtaaatattatccaaatcatgaggcgatagatttttatcatcgttataaagaagacatagcactttttgctgaaatgggattcaagtgcttccgtacctctattgcatggacacgtatctttccaaaaggtgatgagttagagccgaatgaagaaggattacagttttatgataatctttttgatgaatgcttaaagaatggtattgaacctgtcatcactctatctcattttgaaatgccttatcacttagtgaccgaatatggtggttggaaaaataggaaattgattgatttctttgctcgttttgcagaagtcgtatttaaacgttacaaagataaggttaaatattggatgactttcaatgaaatcaataatcaagcgaattatcaggaagattttgcaccatttactaactcaggtattgtatatgaggaaggtgataatagagaagcaattatgtatcaagcagcacattacgaattagttgcttctgcacgagctgtaaaaattggtcatgagattaatccagattttcaaataggttgtatgattgcgatgtgtccaatttatccagttacttgcaatcctaaggatatcttaatggcaatgaaagctatgcagaagcgttattattttgctgatgtgcatgttttaggtaaatatcctgagcatattttcaagtattgggaacgaaaaggtatttcagttgattttactgaccaggataaagaagatttacttggtgggactgtagattacattggtttcagttactatatgtcctttgctatagactctcatcgtgaaaataatccttattttgattatcttgaaacagaagatttagtgaaaaataattatgttaaggcttctgaatgggagtggcaaattgatccagaaggtttacgttatgcgttaaattggtttacagaccactatcacttaccactctttattgttgaaaatggttttggagctatagatcaagttgcagcagatggtatggtacatgatgattatagaattgaatatctaggtgcccatattcgtgaaatgaaaaaggctgtagttgaagatggtgttgatttaatgggttatactccatggggatgtattgatttggtttcagctggtaccggtgaaatgcggaaacgttatggctttatttatgtagataaagatgacaatgggaagggaagttataatcgttccccgaaaaaatcttttggctggtataaggaagttatttcatctaacggtgaatcagtagaatag

SEQ ID NO: 9273 - DNA, 1701 bp, Streptococcus pneumoniae
  CDS (1)...(1701)
atggagaaaatcagtttagaatctcctaagacggggtcggacctagttttggaaacacttcgtgatttaggagttgataccatctttggttatcctggtggtgcggttttgcctttttatgatgcgatatataattttaaaggcattcgccacattctagggcgccatgagcaaggttgtttgcatgaagctgaaggctatgccaaatcaactggaaagttgggtgttgccgtcgtcactagtggaccaggagcaacaaatgccattacagggattgcggatgctatgagcgatagcgttccccttttggtctttacaggtcaggtggcgcgagcagggattgggaaggatgcctttcaggaggcagacatcgtaggaattaccatgccaatcactaagtacaattaccaagttcgtgagacagctgatattccgcgtatcattacggaagctgtccatatcgcaactacaggccgtccagggccagttgtaattgacctaccaaaagacatatctgctttagaaacagacttcatttattcatcagaagtgaatttaccaagttatcagccgactcttgagccgaatgatatgcaaatcaagaaaatcttgaagcaattgtccaaggctaaaaagccagtcttgttagctggtggtggaattagttatgctgaggctgctacggaactaaatgaatttgcagaacgctatcaaattccagtggtaaccagtcttttgggacaaggaacgattgcaacgagtcacccactctttcttggaatgggaggcatgcacgggtcattcgcagcaaatattgccatgacggaagcggactttatgattagtattggttctcgtttcgatgaccgtttgacggggaatcctaagactttcgctaagaatgctaaggttgcccacattgatattgacccagctgagattggcaagattatcagtgcagacattcctgtagttggagatgctaagaaggccttgcaaatgttgctagcagaaccaacagttcacaacaatactgaaaagtggattgagaaagtcactaaagacaagaatcgtgttcgttcgtatgacaagaaagagcgtgtggttcaaccgcaagcagttattgaacgaattggtgaattgacgaatggagatgccattgtggtaacagacgttggtcaacaccaaatgtggacagctcagtattatccctaccaaaatgaacgtcagttagtgacttcagatggtttgggaacaatgggctttggaattccagcagcaatcggtgctaaaattgctaacccagataaggaagtagtcttgtttgttggggatggtggtttccaaatgaccaaccaggagttggctattttgaatatttacaaggtgccaatcaaggtggttatgctgaacaatcattcactcggaatggttcgccagtggcaggaatccttctatgaaggcagaacatcagagtcggtctttgatacccttcctgatttccaattgatggcgcaggcttatggtattaaaaactataagtttgacaatcctgagaccttggctcaagaccttgaagtcatcactgaggatgttcctatgctaattgaggtagatatttctcgtaaggaacaggtgttaccaatggtaccggctggtaagagtaatcatgagatgttgggggtgcagttccatgcgtag

SEQ ID NO: 9274 - DNA, 501 bp, Streptococcus pneumoniae
  CDS (1)...(501)
atgagatgttgggggtgcagttccatgcgtagaatgttaacagcaaaactacaaaatcgttcaggagtcctcaatcgctttacaggtgtcctatctcgtcgtcaggttaatattgaaagcatctctgttggagcaacagaagatccgaatgtatcgcgtatcactattattattgatgttgcttctcatgatgaagtggagcaaatcatcaaacagctcaatcgtcagattgatgtgattcgcattcgagatattacagacaagcctcatttggagcgcgaggtgattttggttaagatgtcagcgccagctgagaagagagctgagattttagcgattattcaacctttccgtgcaacagtggtagacgtagcgccaagctcgattaccattcagatgacgggaaatgcagaaaagagcgaagccctattgcgagtcattcgcccatacggtattcgcaatattgctcgaacgggtgcaactggatttacccgcgattaa

SEQ ID NO: 9275 - DNA, 1023 bp, Streptococcus pneumoniae
  CDS (1)...(1023)
atgacagttcaaatggaatatgaaaaagatgttaaagtagcagcacttgacggtaaaaaaatcgccgttatcggttatggttcacaagggcatgcgcatgctcaaaacttgcgtgattcaggtcgtgacgttattatcggtgtacgtccaggtaaatcttttgataaagcaaaagaagatggatttgatacttacacagtagcagaagctactaagttggctgatgttatcatgatcttggcgccagacgaaattcaacaagaattgtacgaagcagaaatcgctccaaacttggaagctggaaacgcagttggatttgcccatggtttcaacatccactttgaatttatcaaagttcctgcggatgtagatgtcttcatgtgtgctcctaaaggaccaggacacttggtacgtcgtacttacgaagaaggatttggtgttccagctctttatgcagtataccaagatgcaacaggaaatgctaaaaacattgctatggactggtgtaaaggtgttggagcggctcgtgtaggtcttcttgaaacaacttacaaagaagaaactgaagaagatttgtttggtgaacaagctgtactttgtggtggtttgactgcccttatcgaagcaggtttcgaagtcttgacagaagcaggttacgctccagaattggcttactttgaagttcttcacgaaatgaaattgatcgttgacttgatctacgaaggtggattcaagaaaatgcgtcaatctatttcaaacactgctgaatacggtgactatgtatcaggtccacgtgtaatcactgaacaagttaaagaaaatatgaaggctgtcttggcagacatccaaaatggtaaatttgcaaatgactttgtaaatgactataaagctggacgtccaaaattgactgcttaccgtgaacaagcagctaaccttgaaattgaaaaagttggtgcagaattgcgtaaagcaatgccattcgttggtaaaaacgacgatgatgcattcaaaatctataactaa

SEQ ID NO: 9276 - DNA, 876 bp, Streptococcus pneumoniae
  CDS (1)...(876)
atgataaaggatatacaaggagataaaatgaataataatttactggtattacaatcagactttggtctggttgatggtgcggtatcggctatgattggagtggctttagaagagtctccaaccttaaaaatccatcacttgacgcacgatatcacgccttataatatttttgaggggagctatcgtctctttcagacggtggattactggcctgagggaacgacgtttgtatcggttgtcgatccaggtgtcggttcgaaacgtaagagtgtagttgccaagactgcaaaaaatcaatacattgtcacgccagataatgggacgctttcctttatcaagaaacacgttggcattgtagccattcgtgagatttctgaggtggccaataggcgtcaaaacacagagcattcttataccttccacggtcgtgatgtctatgcctatactggtgctaaactggccagtggtcacattacttttgaggaagtagggccagagctcagtgtggaccagattgtagagcttccagtcgtagcgaccatcatagaagatcatctggtgaagggagccattgatattctggatgtgcgtttcggttcgctttggacctctatcacacgggaagaattttacaagctggaaccagaatttggtgatcgttttgaagtgaccatctatcatgctgatatgctggtttatcaaaatcaggttgtctatggcaaatcatttgcagatgtgagaattgggcaacccattctttacatcaactctctctatcgtttaggtttggctatcaaccaaggttcctttgccaaggcctataatgtaggtgtcggttcatcttggaccattgaaataaagaaaatagaaggataa

SEQ ID NO: 9277 - DNA, 651 bp, Streptococcus pneumoniae
  CDS (1)...(651)
atgaaagataaacaaacatttttaatgaagggcagttttgcccttttacttttcgttattcttggctacatggtcaaattttaccctgaaacgctggtcaattttgaccaatcgattcagactgccattcgaggagacttaccagattatttgactattctttttcgagccctcacacgtctgattgatatcccagtgattatcacttgggttgtcattacagcttttgtcttttatcgtaagcgatggaagatagaaagtttcttcatgctgggaaatctggctttggcaggtcttttaatcgtgacctttaaaaatatctaccagcgcccacgaccagctatcttacatcttgtggaggagaagggattttccttcccaagtgggcattctctggctgtaaccttgatggtaggcactctgattgtcattctcagtcaacgaattaaaaatccagtctggagaaaaatcgtacaaattgtccttggcctctacctagtcagtgtgctggtatcaagagtctatctgggagttcattacccatcagacgtccttgccagtctctgtgtgggcttgggagtcctgtttatcgagtttcccttctatgacaagctccgcttccaatggcgatttaaaggcaaacagaagtga

SEQ ID NO: 9278 - DNA, 1608 bp, Streptococcus pneumoniae
  CDS (1)...(1608)
atgtctacgaaatatatttttgtaactggtggtgtggtatcgtctattgggaaagggattgtggcagcgagtctaggccgtctcttgaaaaatcgtggtctcaaagtaaccattcaaaagtttgacccttatatcaatattgatccgggaaccatgagtccttaccagcacggggaagtttttgtgacagatgacggagctgagacagatttggacttgggtcactatgaacgtttcatcgatatcaatctcaacaaatattccaacgtgacaactgggaaaatttacagtgaagttcttcgtaaagaacgccgtggagaataccttggggcaactgttcaagtcattcctcatatcacagatgctttgaaagaaaaaatcaagcgtgccgctctaacgaccgactctgatgtcattatcacagaggttggtggaacagtaggagatatcgagtccttgccattcctagaggctcttcgtcagatgaaggcagatgtgggtgcggataatgtcatgtatatccatacaaccttgcttccttacctcaaggctgctggtgaaatgaaaaccaaaccaacccaacactctgtcaaagaattgcgtggcttgggaatccaaccaaatatgttggttattcgtacagaagagccagctggtcaaggaattaaaaataaactggcccagttctgtgatgtggcaccagaagccgttatcgaatcgttggatgttgaacacctttaccaaattccactgaacttgcaggcacaagggatggaccaaattgtttgtgatcatttgaaattagacgcaccagcagcggatatgacagaatggtcagccatggtggacaaggtcatgaacctcaagaaacaagttaagatttcccttgttggtaagtatgtggagttgcaagatgcctatatctcagtggtcgaagccttgaaacactctggctatgtcaatgatgtagaagttaaaatcaattgggtcaatgccaatgatgtgacagcagagaatgtagcagaactcttgtctgatgcggacgggatcatcgtaccaggtggttttggtcaacgtggtacagaagggaaaatccaagccatccgctatgcgcgtgaaaatgatgttccaatgttgggagtctgcttgggaatgcagttgacatgtatcgagtttgctcgtcacgttttaggtcttgaaggtgccaattctgcagagcttgcaccagaaacaaaataccctatcattgatatcatgcgtgatcagattgatattgaggatatgggtggaacccttcgtttgggactttatccgtctaagttgaaacgtggctctaaggctgctgctgcttatcacaatcaagaagtggtgcaacgccgtcaccgtcaccgttatgagtttaataatgccttccgtgagcagtttgaggcagcaggttttgtcttttcaggagtttctccagacaatcgtttggtagaaatcgtggaaattcctgaaaataaattctttgtagcttgtcagtatcaccctgaactgtcaagccgtccaaaccgaccagaagaactctacactgcctttgttactgcagcggttgagaacagcaattag

SEQ ID NO: 9279 - DNA, 1197 bp, Streptococcus pneumoniae
  CDS (1)...(1197)
atggcaaaacttactgttaaagacgttgacttgaaaggtaaaaaagtcctcgttcgtgttgacttcaacgtaccattgaaagatggcgtaatcactaacgataaccgtatcacagcagctcttccaactattaagtacatcatcgaacaaggtggacgtgcaattcttttctctcaccttggacgtgtgaaagaagaatctgataaagctggtaaatcacttgctcctgtagcagctgacttggcagcaaaacttggtcaagatgttgttttcccaggtgtcactcgtggtgctgaattggaagcggcaatcaacgctcttgaagatggacaagttctcttggttgaaaacactcgttacgaagatgttgacggcaagaaagaatctaaaaacgatcctgaacttggtaaatactgggcatcacttggagatggtatcttcgtaaacgatgcattcggtacagctcaccgtgcacacgcatctaacgttggtatctcagcaaacgttgaaaaagcagttgctggtttccttcttgaaaacgaaattgcctacatccaagaagcagttgaaactccagaacgtccattcgtggctatccttggtggttcaaaagtttcagacaagatcggtgttatcgaaaacttgcttgaaaaagctgataaagtccttatcggtggtgggatgacttacacattctacaaagcacaaggtatcgaaatcggtaactcacttgtagaagaagacaaattggatgttgcgaaagctcttcttgaaaaagcaaatggtaaattgatcttgccagttgactcaaaagaagctaacgcatttgctggttacactgaagtgcgtgacactgaaggtgaagcagtttctgaaggcttccttggtcttgacatcggtccaaaatctatcgccaaatttgacgaagctttgactggtgccaaaacagttgtatggaacggacctatgggtgtatttgaaaacccagatttccaagctggtacaatcggtgtgatggacgctatcgtgaaacaaccaggagttaaatcaatcatcggtggtggtgactcagctgccgcagcgattaaccttggccgtgcagacaagttctcatggattagtacgggtggtggagcatcaatggaacttcttgaaggtaaggttcttccaggacttgcagccttgacagaaaaataa

SEQ ID NO: 9280 - DNA, 1347 bp, Streptococcus pneumoniae
  CDS (1)...(1347)
atgccaatcacagctgcagatattcgtcgtgaagtcaaggaaaaaaatgttacctttattcgtcttatgttctcagatattttgggaaccatgaaaaacgtcgaaattcctgctacagatgaacagttagataaggtcttgtcgaacaaggttatgtttgatggatcttctattgaaggttttgtacgtatcaatgagtcggatatgtacttgtacccggacttggatacatggacagtcttcccttggggagatgaaaatggaagtgttgcaggtctgatctgtgatgtctatacaacagaaggtgaaccatttgcgggtgaccctcgtggtaatttgaaacgagctcttcgtcacatggaagaagttggattcaaatccttcaaccttggtccagagccagaattcttcctatttaagttggatgaaaatggggacccaacacttgaagtgaatgacaagggtggctactttgatttggcacctactgaccttgcggacaacacacgtcgtgagattgtgaatgtcttgaccaaaatgggatttgaagtagaagcgagtcaccacgaggttgcggttggacagcatgagattgactttaagtacgatgaagttctccgtgcttgtgataagattcaaatctttaagcttgttgttaaaaccattgctcgcaaacacggactttacgcaacatttatggcgaagccaaaatttggtattgctggatcaggtatgcactgtaatatgtccttgtttgatgcagaaggaaataacgccttctttgatccaaatgatccaaaaggaatgcagttgtcagaaacagcttaccatttcctaggcggtttgatcaagcatgcttacaactatactgccatcatgaacccaacagttaactcatacaaacgtttggttccaggttatgaagcgcctgtttacattgcttgggctggtcgtaaccgttcgccacttgtgcgcgtacctgcttcacgtggtatgggaactcgtcttgagttgcgttcagtggatccaatggcgaacccttacgttgctatggctgttcttttggaagttggtttgtatggtattgaaaataaaatcgaagcaccagctcctatcgaagaaaatatctacatcatgacagcagaagagcgcaaggaagctggtattacagaccttccatcaactcttcacaacgctttgaaagctttgacagaagatgaagtggttaaagctgctctcggagatcacatctacactagcttccttgaagccaaacgaatcgaatgggcaagttatgcaaccttcgtttcacaatgggaaattgataattatttagacctttactaa

SEQ ID NO: 9281 - DNA, 1824 bp, Streptococcus pneumoniae
  CDS (1)...(1824)
atgtctaaaattatcggtattgacttaggtacaacaaactcagcagttgcagttcttgaaggaactgaaagcaaaatcatcgcaaacccagaagggaaccgcacaactccatctgtagtctcattcaaaaacggagaaatcatcgttggtgatgctgcaaaacgtcaagcagtcacaaacccagatacagttatctctatcaaatctaagatgggaacttctgaaaaagtttctgcaaatggaaaagaatacactccacaagaaatctcagctatgatccttcaatacttgaaaggctacgctgaagactaccttggtgagaaagtaaccaaagctgttatcacagttccagcttacttcaacgacgctcaacgtcaagcaacaaaagacgctggtaaaattgctggtcttgaagtagaacgtattgttaacgaaccaactgcagcagctcttgcttatggtttggacaagactgacaaagaagaaaaaatcttggtatttgaccttggtggtggtacattcgacgtctctatccttgaattgggtgacggtgtcttcgacgtattgtcaactgcaggggacaacaaacttggtggtgacgactttgaccaaaaaatcattgaccacttggtagcagaattcaagaaagaaaacggtatcgacttgtctactgacaagatggcaatgcaacgtttgaaagatgcggctgaaaaagcgaagaaagacctttctggtgtaacttcaacacaaatcagcttgccatttatcactgcaggtgaggctggacctcttcacttggaaatgactttgactcgtgcgaaatttgacgatttgactcgtgaccttgttgaacgtacaaaagttccagttcgtcaagccctttcggatgcaggtttgagcttgtcagaaatcgacgaagttatccttgttggtggttcaactcgtatccctgccgttgttgaagctgttaaagctgaaactggtaaagaaccaaacaaatcagtaaaccctgatgaagtagttgctatgggtgcggctatccaaggtggtgtgattactggtgatgtcaaggacgttgtccttcttgatgtaacgccattgtcacttggtatcgaaacaatgggtggagtatttacaaaacttatcgatcgcaacactacaatcccaacatctaaatcacaagtcttctcaacagcagcagacaaccaaccagccgttgatatccacgttcttcaaggtgaacgcccaatggcagcagataacaagactcttggacgcttccaattgactgatatcccagctgcacctcgtggaattcctcaaatcgaagtaacatttgacatcgacaagaacggtatcgtgtctgttaaggccaaagaccttggaactcaaaaagaacaaactattgtcatccaatcgaactcaggtttgactgacgaagaaatcgaccgcatgatgaaagatgcagaagcaaacgctgaagccgataagaaacgtaaagaagaagtagaccttcgtaatgaagtagaccaagcaatctttgcgactgaaaagacaatcaaggaaactgaaggtaaaggcttcgacgcagaacgtgacgctgcccaagctgcccttgatgaccttaagaaagctcaagaagacaacaacttggacgacatgaaagcaaaacttgaagcattgaacgaaaaagctcaaggacttgctgttaaactctacgaacaagccgcagcagcgcaacaagctcaagaaggagcagaaggcgcacaagcaacaggaaacgcaggcgatgacgtcgtagacggagagtttacggaaaagtaa

SEQ ID NO: 9282 - DNA, 684 bp, Streptococcus pneumoniae
  CDS (1)...(684)
atggatttgggtgataatgagctaacactgactcccatacctgggaaaagtggcaaggcttatatgggtagctatcctgatgggaagcgcatctttgtaaaaatgaacacctctccaatcctacctggtctagctagagaacaaattgctccacaattattatggagtcgtcgtttggcagatgggcgtgatatgtgtgctcaagaatggttgacaggcaagatattgaccccctatgatatgaatcgtaagcaaatcgtcaatattttaacccgtcttcatcgctcacgtccgttgatgacacaattgagtcgtttgggctatgccatggaaacacctgtagatttactacagtcttggcaagaaacggctccagatgctttgcgtaaaaatcattttatcagtgaagtgatggctgatttgcgtcagactattccaggatttagagaggaccatgcgaccattgtccatggagatgtacgacatagtaattggattgagacagatagtggcttgatttatttagtagattgggattcggttcgcttgaccgatcgcatgtttgatgtggcccatatgctctgccattatatttcagaacatcagtggaaggaatggttgacctactacggttacaagtacaatcaaacggtattaagtaaattgtattggtatggtcaatag

SEQ ID NO: 9283 - DNA, 2703 bp, Streptococcus pneumoniae
  CDS (1)...(2703)
gtgaaaagccactcatcaagtgtggaagaagctgtcgctgcaaaaattgctgccagctttaagcctgcagctgctccgaaagtagaagcaaaacctgcagcaccaaaagtaagtgcagaaaagaaaaccgaaaaatctgagccagctaaaccagctgtagctaaggaagaggcaaaaccggctgagccagttgctccgaaaacagaaaaagtagcagcgaaaccgcaaagccgtaatttcaaggctgagcgtgaagcccgtgctaaagagcaggcagaacgacgcaagcaaaataagggcaataaccgtgaccaacaacaaaacggaaaccgtcagaaaaacgatggccgtaatggtggaaaacaaggtcaaagcaaccgcgacaatcgtcgctttaatgaccaagctaagaagcagcaaggtcagcaaaaacgtagaaatgagcgccgtcagcaagaggacaaacgttcaaatcaagcggctccacgtattgactttaaagcccgtgcagcagccctaaaagcagagcaaaatgcagagtacgctcgttcaagtgaggaacgcttcaagcagtatcaggctgctaaagaagccttggctcaagctaacaaacgcaaggaaccagaggaaatctttgaagaagcggctaagttagctgaacaagcacagcaagttcaagcagtggttgaagtcgtccctgagaaaaaagaacctgcagtggatacacgtcgtaaaaaacaagctcgaccagacaaaaatcgtgacgattatgatcatgaagaagatggtcctagaaaacaacaaaagaatcgaagtagtcaaaatcaagtgagaaatcaaaagaatagtaactggaataacaacaaaaagaacaaaaaaggcaataacaagaacaaccgtaatcagactccaaaacctgttacggagcgtaaattccatgaattgccaacagaatttgaatatacagatggtatgaccgttgcggaaatcgcaaaacgtatcaaacgtgaaccagctgaaatcgttaagaaacttttcatgatgggtgtcatggccacacaaaaccaatccttagatggggaaacaattgaactcctcatggtggattacggtatcgaagccaaacaaaaggttgaagtggataatgctgacatcgaacgtttctttgtcgaagatggttatctcaatgaagatgaattggttgagcgtccaccagttgttactatcatgggacatgttgaccacggtaaaacaacccttttggatactcttcgtaactcacgtgttgcgacaggtgaagcaggtggtattactcagcatatcggtgcctaccaaatcgtggaaaatggtaagaagattaccttccttgatacaccaggacacgcggcctttacatcaatgcgtgcgcgtggtgcttctgttaccgatattacgatcttggtcgtagcggcagatgacggggttatgcctcagactattgaagccatcaaccactcaaaagcagctaacgttccaatcatcgtagccattaacaagattgataaaccaggtgctaacccagaacgcgttatcggtgaattggcagagcatggtgtgatgtcaaccgcttggggtggagattctgaatttgttgaaatctcagctaaattcaaccaaaatatcgaagaattgttggaaacagtccttcttgtagctgaaatccaagaactcaaggcagacccaacagtgcgtgcaatcggtacggttatcgaagcgcgcttggataaaggaaaaggtgcggtcgcaacccttcttgtacaacaaggtaccttgaatgttcaagacccaatcgttgtcggaaataccttcggtcgtgtccgtgctatgaccaacgaccttggtcgtcgtgttaaagttgctggaccatcaacaccagtctctatcacaggtttgaacgaagcaccgatggcgggtgaccactttgccgtttacgaggatgaaaaatctgcgcgtgcagcaggtgaagagcgtgccaaacgtgccctcatgaaacaacgtcaagctacccaacgtgttagccttgaaaacctctttgatacccttaaagctggggaactcaaatctgttaatgttatcatcaaggctgatgtacaaggttctgttgaagccctttctgcctcacttcaaaagattgacgtggaaggtgtcaaagtgactatcgtccactcagcggtcggtgctatcaacgaatcagacgtgacccttgccgaagcttcaaatgcctttatcgttggtttcaacgtacgccctacaccacaagctcgtcaacaagcagaagctgacgatgtggaaatccgtcttcacagcattatctacaaggttatcgaagagatggaagaagctatgaaagggatgcttgatccagaatttgaagaaaaagttattggtgaagcggttatccgtgaaaccttcaaggtgtctaaagtgggaactatcggtggatttatggttatcaacggtaaggttgcccgtgactctaaagtccgtgttatccgtgatggtgtcgttatctatgatggtgaactcgcaagcttgaaacactataaagacgacgttaaggaagttacaaacggccgtgaaggtggattgatgatcgacggctacaatgatattaagatggatgatgtgattgaggcgtatgtcatggaagaaatcaagagataa

SEQ ID NO: 9284 - DNA, 2652 bp, Streptococcus pneumoniae
  CDS (1)...(2652)
atgtctaaagaactttcatctaaatacaatccagccgaggttgaggctggtcgttaccaaaaatggcttgatgctgatgttttcaagccttcaggcgatcaaaaggctaagccttattcaatcgttattccaccaccaaacgttacaggtaaacttcaccttggtcacgcttgggatacaactttgcaagatattatcatccgtcaaaaacgcatgcaaggttttgataccctttggcttcctgggatggaccacgcagggattgccactcaggctaaggttgaggagcgcttgcgtggtgagggcatttcccgctatgaccttggtcgtgagtctttcttgacgaaagtctgggaatggaaagacgaatatgccactaccatcaaggaacaatggggcaagatggggctctctgtagactattctcgtgagcgtttcactcttgacgaaggtttgtcaaaagctgttcgtaaggtctttgtggacctttacaagaaaggctggatctaccgtggtgagtttatcatcaactgggacccagcagctcgcacagccctttctgatattgaggtgattcacaaggatgtggaaggtgccttctaccacatgaattacatgctggaagatggttcacgcgcccttgaagttgctacaactcgtcctgagactatgtttggggacgttgcgattgcggttaatccagaagacccgcgctacaaggacttgattggtaaaaacgtcatccttccaatcgctaataaactcatcccaatcgttggagatgagcacgcagatcctgagtttggtactggtgtcgtgaaaatcacacctgcccacgatccaaatgacttcttggttggccaacgtcataacttgccacaagtcaacatcatgaacgacgacggaactatgaacgagcttgtctttgaattttcaggcatggatcgttttgaagctcgtaaggcagtcgttgctaagttggaagaaatcggtgcccttgtcaaaatcgaaaaacgtgtccacagtgttggtcactcagaacgtacaggtgtcgtagttgagccacgcttgtctactcaatggttcgtcaagatggaccaattggctaagaacgccattgccaaccaagacacagaggacaaggtcgaattctacccacctcgtttcaacgataccttccttcaatggatggaaaatgtccacgactgggttatctctcgtcagctctggtggggtcaccaaatccctgcttggtacaatgctgatggtgaaatgtatgtcggcgaagaagctccagaaggtgacggatggactcaggacgaagacgtcttggatacttggttcagttctgccctctggccattttcaaccatgggctggcctgaagtcgactcagaagactttaaacgttatttcccaacttcaaccttggtaacaggttacgacatcatcttcttctgggtgtctcgtatgatcttccagtcattggaattcacaggccgtcaaccattccaaaacgtccttatccacggtctcattcgtgacgagcaaggacgcaagatgtctaagtctctcggtaacgggattgacccaatggatgttatcgagaaatacggtgccgatgcccttcgatggttcctttcaaacggttctgcgccaggacaagacgtgcgtttctcttatgagaaaatggatgcttcatggaactttattaacaagatttggaacatttctcgctatatcctcatgaacaatggaggtttgacgctggatgtggcgcatgacaatgtcacaaaagttgcaacaggtgaggctggtaatgtgacggaccgctggattctccacaatctcaacgaaaccattgcaaaagttactgaaaactttgataagttcgagtttggtgtggctggtcatatcctttacaacttcatttgggaagaatttgccaactggtatgttgagttgaccaaggaagttctttacagcgacaatgaagacgataaggtaattactcgatctgttctcctctatacgctggataaaatccttcgtctccttcactcaataatgccgttcgtgacagaagaaatctttggtcagtacgctgaaggctctatcgtgacagcagcatacccaactgtcaacccagcctttgaggaccttgctgcccacactggtgtggaaagtctcaaagacttgatccgtgccgttcgtaatgcgcgtgcggaagtaaatgtagcaccaagcaaacctatcaccatccttgttaagactagcgatagtgacttggaagccttctttaacagcaatgtcaactacatcaaacgctttacaaatccagaacacttggaaatcgcatcaaccatccctgcacctgaactggctatgtcaagcgttattacaggagccgaaatcttcttgccactggtagacctcttgaatgtcgaagaagaattggcacgtctggaaaaagaacttgccaaatggcagaaagaactcgacatggttggcaaaaaactcagcaacgaacgcttcgtcgccaacgctaaaccagaagttgtccaaaaagaaaaagacaaacaagccgactaccaagccaagtatgatgtgaccgtagcacgtattgatgagatgaagaagttggtgaaataa

SEQ ID NO: 9285 - DNA, 1128 bp, Streptococcus pneumoniae
  CDS (1)...(1128)
atggtaccgcgtgtcaacgctccgagtggagtttttggcatgtggttttctttttatctacgagagactgatggaggaaatatgtcaactattgaagaacaattaaaagcgcttcgcgaagaaacgctgactagcttgaagcagattactgctggaaatgaaaaagagatgcaagatttgcgtgtctctgtccttggtaaaaagggttcgctcactgaaatcctcaaagggatgaaagatgtttctgctgagatgcgtccaatcatcgggaaacacgtcaatgaagctcgtgatgtcttgacagctgcttttgaagaaacagctaagctcttggaagaaaagaaagtcgcggctcaactggctagcgagagtatcgatgtgacgcttccaggtcgtccagttgcgactggtcaccgtcacgttttgacacaaaccagtgaagaaatcgaagatatcttcatcggtatgggttatcaagtcgtggatggttttgaagtggagcaagactactataactttgaacgtatgaaccttccaaaagaccacccagctcgtgatatgcaggatactttctatatcactgaagaaatcttgctccgtacccacacgtctccagttcaggcgcgtgctatggatgcccatgatttttctaaaggtcctttgaagatgatctcgccagggcgtgtcttccgtcgcgatacggacgatgcgacccacagtcaccaattccaccaaatcgaaggcttggtagttgggaaaaatatctctatggctgatcttcaaggaacgcttcagttgattgtccaaaaaatgtttggtgaagagcgtcaaattcgtttgcgtccatcttacttcccattcacagagccatctgttgaggtggatgtttcttgcttcaagtgtggtggagaaggctgtaacgtatgtaagaaaacaggttggatcgaaattatgggagccggtatggttcacccacgtgtccttgaaatgagtggtatcgatgcgactgtatactctggttttgcctttggtcttggacaagagcgtgtagctatgctccgttatggaatcaacgatatccgtggattctaccaaggagatgtccgcttctcagaacagtttaaataa

SEQ ID NO: 9286 - DNA, 510 bp, Streptococcus pneumoniae
  CDS (1)...(510)
atgattagaaaagtagaaatggcagatgttgaggtgttggctaaaattgccaaacaagcctttcgtgaaacctttgcatatgataatacggaagagcagttacaggaatactttgaagaggcttatagtctgaaaactttgtcaactgagttgggaaatcctgactctgaaacctatttcattatgcatgaggaggagatagctggttttctcaaagtcaactggggaagtgctcaaactgagagagaattagaggacgcttttgaaattcaacgcctctatgtgctacaaaaattccaaggatttggactaggtaagcaactgtttgaattcgcacttgaacttgctacaaaaaatagtttttcttgggcttggctaggtgtttgggagcataatacaaaagctcaagcgttttataatcgatatggttttgaaaaatttagccaacatcattttatggttggtcaaaaagtagatacggattggttactgagaaagaaattaaggtaa

SEQ ID NO: 9287 - DNA, 2403 bp, Streptococcus pneumoniae
  CDS (1)...(2403)
atgcttatatcttataaatggttaaaagaattggtggacattgatgtgccatcacaagagttggctgaaaaaatgtcaactacaggaatcgaggtagagggtgtcgaatcaccagctgctggtctctcaaaaattgtcgtcggtgaggtcttgtcttgcgaagatgtgccagagactcacctccatgtttgtcaggttaacgttggcgaagaagagcgtcagatcgtttgtggtgccccaaatgtgcgtgctgggatcaaggtcatggtggctcttccaggagctcgtatcgctgataactacaaaatcaaaaaaggaaaaatccgtggtttggagtcacttggaatgatctgttcacttggtgaattgggaatttctgactcagttgtgcctaaggaattcgcagatggcatccaaatcttgcctgaagatgccgtgccaggtgaggaagtcttttcttacctagacttggatgatgaaatcatcgaactttccatcacaccaaaccgtgcagatgccctttctatgtgtggagtggctcacgaagtggcagccatctatgacaaggcagtcaactttaaagaatttactctaacagaaactaatgaagctgcggcagatgccctttctgtcagcattgagacagacaaggcgccttactatgcagctcgtatcttggacaatgtgaccatcgcaccaagtccacaatggttgcaaaaccttctcatgaacgaaggaatccgtcccatcaataacgtagtggacgtgaccaactacatcctgctctattttggtcaaccaatgcatgcctttgacttggataactttgaagggactgacatccgtgtgcgtgaagcgcgtgctggtgaaaaattggtgaccttggacggtgaagaacgtgacttggacgtgaatgacctagtcatcactgtcgcagacaagccagtagcccttgcaggtgtcatgggtggtcaagcaacagaaatctctgaaaaatctagtcgtgttgtccttgaagctgctgttttcaatggcaaatctatccgtaagacaagtggtcgcctgaaccttcgttctgagtcatcttctcgctttgaaaaaggaattaatgtggcaacagttaatgaagcccttgatgcggcagctagcctgattgcggaacttgcaggtgcgacggtgcgtaagggcatcgtttcagcgggtgagcttgatacttcagatgtagaagtttcttcaacccttgctgatgttaaccgtgtcctcggaactgagctgtcttatgctgatgtagaagacgtcttccgtcgtcttggctttggtctttctggaaatgcagacagctttacagtcagagtcccacgtcgtcgttgggatatcacaatcgaagctgacctctttgaagaaattgctcgtatctatggttatgaccgcttgccaactagtctaccaaaagacgatggtacagcaggtgaattgacagccacacaaaaactccgccgtcaagttcgtactattgctgaaggagcaggtttgacagaaatcatcacctatactctaacaactcctgaaaaagcagttgagtttacggctcaaccaagtaaccttacggaactcatgtggccaatgactgtggatcgttcagtcctccgtcaaaatatgatttcaggtatccttgataccgttgcctacaacgtggctcgtaagaataaaaacttggccctttacgagattggaaaagtctttgaacaaacaggtaatccaaaagaagaacttccaaatgaaatcaacagttttgcctttgccttgacaggcttggttgctgaaaaagatttccaaacagcagcagttccagttgatttcttctatgctaagggaatccttgaagccctatttactcgtttgggactccaagtaacctatacagcaacatctgaaatcgctagccttcatccaggtcgtacagccgtgatttcactcggtgaccaagttcttggtttccttggccaagtgcatccagtcactgccaaggcttacgatattccagaaacgtatgtggctgagcttaacctttcagctatcgaagctgcgcttcagccagcgactccatttgtagaaatcaccaaattcccggcagtcagccgtgacgttgcccttctcctcaaggcagaagtgactcatcaagaagttgtagatgctatccaagctgccggcgtgaaacgtttgacagatatcaaactctttgacgtcttctcaggtgagaaattgggacttggtatgaagtcaatggcttatagcttgaccttccaaaatccagaagatagcttaacggacgaagaagtcgcacgctatatggaaaaaatccaagcatcgctcgaagaaaaagtcaatgcagaagtgcgttaa

SEQ ID NO: 9288 - DNA, 618 bp, Streptococcus pneumoniae
  CDS (1)...(618)
atggggtggtggcgcgaaaccattgatattgtaaaagaaaatgatccagcggcccgcaccactttggaggttttgctgacttatccaggtgtcaaggccttggcggcccaccgtctctcgcattttctctggaagcacggcttcaaactattagctcgtatgtacagtcagttttggcgcttttggactcagattgagattcatccaggagcccagattgattcaggtgtttttattgaccatggttctggtctggtgattggagagacagcgattgttgaaaaaggcgttcttctctatcacggagtgactctcgggggaacagggaaagactgtggcaaacgccatccgactgtacgaaagggagctctcatatcagcccatgcccaagttatcgggcctgtggaaattggtgaaaatgccaaggtcggtgctgcagcagttgtcgtagcagatgtacctagtgacgtgacggttgtcggtattccggccaagattgtccgtcttcatggtaagaaagatgagcctgtcattcacgaagtcgaagaaaaacgagagtattatgtcaataaactcgagcaggctaaagatgccagtcacagatcgtctggtttgtag

SEQ ID NO: 9289 - DNA, 816 bp, Streptococcus pneumoniae
  CDS (1)...(816)
atgacaaatacatcattctcaattgagcagttttctttaaaaggaaaaattgctctcatcaccggcgcttcttatggaattggatttgctattgccaaatcctacgctgaagccggcgctactattgtctttaacgatatcaatcaagatctggtcaataaagggattgaagcttatcgtgaagttggcatcgaagcccatggatatgtctgtgacgtgacagacgaggacggtatccaagccatggtcaagcaaatcgaacaagaggttggtgtcattgacatcctcgttaataacgctggtattatccgccgagttccaatgtgcgaaatgagcgccgctgatttccgtaaggtcatcgatattgacttaaacgcaccatttatcgtttcaaaggcagttattccttctatgataaagaaagggcatggaaagattatcaatatttgttcgatgatgagcgaactgggacgtgaaacagttagcgcttatgctgctgctaaagggggcttgaaaatgttgacccgcaacattgcgtctgaatacggtggagccaatatccaatgtaacggaattggaccaggttatattgccactcctcaaacagcacctcttcgtgagttgcaagaagatggttctcgccacccatttgaccagttcatcattgcaaaaacacctgctgcacgttggggaaatcctgaagatttgatgggccctgctgtctttctcgctagtgatgccagcaattttgtcaatggccacatcctatatgtagatggcggtatcttagcctacatcggaaaacaacctgagtaa

SEQ ID NO: 9290 - DNA, 882 bp, Streptococcus pneumoniae
  CDS (1)...(882)
atggcaatcgtttcagcagaaaaatttgtccaagcagcccgtgacaacggttatgcagttggtggatttaacacaaacaaccttgagtggactcaagctatcttgcgcgcagcagaagctaaaaaagctccagttttgatccaaacttcaatgggtgctgctaaatacatgggtggttacaaagttgctcgcaacttgatcgctaaccttgttgaatcaatgggtatcactgtaccagtagctatccaccttgaccacggtcactacgaagatgcacttgagtgtatcgaagttggttatacttcaatcatgtttgacggttcacaccttccagttgaagaaaaccttaaattggctaaagaagttgttgaaaaagcacacgctaaaggtatctcagtagaagctgaagttggtactatcggtggtgaagaagacggaatcatcggtaaaggtgaattggctccaatcgaagacgctaaagcaatggttgaaactggtatcgacttcttggcagctggtatcggtaacatccacggcccttacccagtaaactgggaaggtcttgaccttgaccacttgcaaaaattgacagaagctcttccaggattcccaatcgtattgcacggtggatcaggtattcctgatgagcaaatccaagcagctatcaaacttggtgttgccaaagttaacgttaacacagaatgccaaatcgcattcgctaacgcaactcgtaaatttgctcgtgactacgaagcaaacgaagcagaatacgacaagaaaaaactcttcgacccacgtaaattcttggctgacggtgtaaaagctatccaagcatcggttgaagaacgtatcgacgtattcggttcagaaggtaaagcataa

SEQ ID NO: 9291 - DNA, 678 bp, Streptococcus pneumoniae
  CDS (1)...(678)
atgacagatttatcatcttggacagcctattttcaggattttggacaatttttcaatggtttcctcttcacccttgccctagcggttggttcctttatcctcgctatggttttgggcatcttctttggtgccatgtcaaccagtaaacgtccaattttacgcattttagctcgcatctttgttgaattttaccaaaatactcccctcttggtgcagtttgttattgttttttatggcctacctcttatcagtgaccatatcatcatgattccaatttattggacagccgttctctgcgtgggactctatcacggcgcttatatcgctgaggttattcgttcagggattcagtctattcctagtggtcagatggaggccgccttgtcgcaaggttttacctatatcagtgccatgcgcttgattatcttgcctcaggccttccgcatcattctccctccattgaccaaccaaattgttaacctcatcaagaacacctctactgtagctatcatctctggagtagacttgatgtttgtgactaagtcttggtcggctctaaacggaaactatatcccagcctttttaggtgctgctcttctctactttgccctatgcttccctgttgcccagtttggtcgcaagatggagcaagccaacaaaaaagcctattcactttag

SEQ ID NO: 9292 - DNA, 2235 bp, Streptococcus pneumoniae
  CDS (1)...(2235)
gtggatgtctttttgataacacctacttatgaatggcagtttgccctgcaggtagaagatgcggattttacaaagatagccaagaaggctggactgggtcctgaggtggctcggttattgtttgagagagggattcaggaccaagaaagtctgaagaagtttttagaaccttccttggaggacttacatgatgcttatctgctccatgatatggacaaggcagtggagcggattcgtcaggctattgaagaaggggaaaatattctcgtttatggagactatgatgcggatggcatgacttcggcttctattgtgaaggaaagtttggaacaacttggtgctgagtgccgagtttacctgccaaatcgttttaccgatggctatggccctaatgctagtgtttataaatactttatcgagcaagaaggaatttccttgattgtgacggtggacaatggggttgctggtcatgaggctattgcattggctcagtctatgggagtagatgtcattgtgacagaccatcattccatgcctgaaaccctgccagatgcttatgctattgtccatcctgaacatccagatgcggattatccttttaaatatttggctggttgtggagttgctttcaagttggcttgtgccctgttagaagaagtgcaagtggaattgcttgatttggtcgctattggaactattgcagatatggtgagtctgacggatgaaaatcgtatcttagttcaatatggtctggaaatgttgggtcatacccagcgcattggtctgcaagaaatgctggacatggctgggattgctgccaacgaagtaacagaagaaacggttggtttccagattgctcctcgtttgaatgccttgggtcgcttggatgatcccaatcctgccattgatttgttgactggatttgatgatgaggaagcgcatgagattgcccttatgattcaccagaaaaacgaagagcgcaaggaaatcgttcagtctatctatgaagaagccaagaccatggtggatcctgagaagaaggttcaggtcttggccaaggaaggctggaatcctggggttctaggaatcgtggctggtcgtttattggaagaattgggacagacagtcattgttcttaatatagaagacggtcgtgccaagggcagtgctcgtagtgtggaagcggtcgatatttttgaagctctggatccccatcgagacctcttcatcgcctttggaggtcatgcaggtgcagcgggtatgacgctggaagttgagcaactctcagatttatctcaggttttggaagattatgttcgtgaaaaaggtgcagatgctggtggcaagaataagttaaacctagatgaagagttggatttggaggcacttagcttggaaacggtcaaaagttttgaacgtttagctccttttggaatggataatcagaaacctattttttatatcaagaattttcaggtcgaaagtgctcgtactatgggggcaggtaatgcccatctaaagctgaaaatttccaagggtgaggcgagttttgaagtggtagcctttggtcaaggcagatgggcgacagagttttctcaaaccaagaatctagagttagcggttaaattgtctgtcaaccaatggaatggccaaactgctctccagttgatgatggtggatgcgcgagtggaaggtgttcaactttttaacattcgtggaaaaaatgcagtcttgccagaaggtgttccagtcttggattttcctggagaactgccaaatcttgcggctagtgaagctgttgtcgtaaaaaacattccagaggatattactcagctgaagaccatttttcaggaacagcatttctctgctgtctatttcaaaaatgatattgacaaggcttattatctgacaggttatgggactagagatcagtttgccaaattgtacaagactatttaccagttcccagagtttgatattcgctacaagctgaaagatttggctgcatatcttaatattcaacaaatcttgctggtcaagatgattcaagtatttgaagaactaggctttgtgacgataaaagatggtgtgatgacagtcaataaagaggcgccaaagcgggagataggagaaagtcaaatttaccaaaatctcaaacaaaccgttaaagaccaagaaatgatggcgctgggtacggtgcaagaaatttatgattttttgatggaaaaagagtag

SEQ ID NO: 9293 - DNA, 1662 bp, Streptococcus pneumoniae
  CDS (1)...(1662)
atgagtaatatcagtttaacaacacttggtggtgtgcgtgagaatggaaaaaatatgtacattgctgaaattggagagtccatttttgttttgaatgtagggttaaaatatcctgaaaatgaacaattaggggtcgatgtggtgattccaaacatggattacctttttgaaaatagcgaccgtattgctggggttttcttgacccacgggcatgcggatgccattggtgctctaccttatctcttggcagaggctaaagttcctgtatttgggtctgagttgaccattgagttggcaaagctctttgtcaaaggaaatgatgccgttaagaaatttaatgatttccatgtcattgatgagaatacggagattgattttggtgggacagtggtttccttcttccctacgacttactccgttccagagagtctgggaattgtcttgaagacatcggaaggaagcatcgtttatacaggtgacttcaaatttgaccaaacggctagtgaatcttatgcaactgattttgctcgtttggcagagattggtcgtgacggcgtcctggctctcctcagtgattcggccaatgcagacagcaatattcaggtggctagtgaaagtgaagttagggatgaaattacccaaactattgctgactgggaaggtcgtatcatcgttgcagctgtttccagtaatctttctcgtattcagcagatttttgacgctgcggataaaacaggtcgacgtatcgtcttgacaggatttgatattgaaaatatcgtccgcacagcgattcgtcttaagaagttgtctttagccaacgaaattctcttgattaagcctaaagatatgtctcgctttgaagaccatgagttgattattcttgagacaggtcgtatgggtgaacctatcaatggacttcgtaagatgtcgattggtcgccatcgttatgtagaaatcaaggatggggacctggtctatattgctacggctccgtctattgctaaagaagcctttgttgcgcgtgtggaaaatatgatttatcaggcaggtggggttgtcaaattgattacccaaagtttacatgtatcagggcacggaaatgtgcgtgatttgcagctgatgatcaatcttttgcaacctaagtacctcttccctgtccaaggggagtatcgtgagttggatgctcacgctaaggctgccatggcagttgggatgttgccagaacgcatcttcattcctaaaaaggggacgaccatggcttacgagaatggagactttgttccagctggatcggtttcagcaggagatatcttgattgatgggaatgccattggtgatgttggaaatgttgttcttcgtgaccgtaaggtcttgtcagaggatggaattttcatcgtggctattacagtcaaccgtcgtgagaagaaaattgtggctagagctcgtgttcacacgcgtggatttgtttatctcaagaagagtcgcgatattctccgtgaaagttcagaattgattaaccaaacggtagaagagtatcttcaaggagatgactttgactgggcagatctcaaaggtaaggttcgtgacaatctgaccaagtacctctttgatcaaaccaagcgtcgcccagccattttaccagtagtcatggaagcaaaataa

SEQ ID NO: 9294 - DNA, 1221 bp, Streptococcus pneumoniae
  CDS (1)...(1221)
atgtaccgttatcaaattggcattcccacattagaatatgatcagtttgtcaaagaacatgaattagccaatgtattacaaagtagtgcttgggaggaagttaagtctaattggcaacatgagaagtttggtgtttacagggaagaaaaattactggcgacagctagtattttgattagaactcttccgctaggctataaaatgttttacatcccaagaggacctatattggattatggggataaagaactcttgaattttgccattcagtctattaagtcctatgctcgcagtaagagagtggtttttgtgacttttgacccaagtatttgcctatctcaaagtttaatcaatcaggaaaagacagaatttcctgaaaatctggctattattgatagtttgcaacaaatgggagtaaggtggtcaggaaaaacggaggaaatgggagacaccattcaacctcgtattcaggcgaaaatatacaaggaaaattttgaagaagataaactttccaagtcaacaaaacaggctattcgaacagcacgaaacaaagggcttgagattcaatatggtggactggaactattagattcattttcggagttgatgaaaaaaactgagaagcgaaaagagattcatttgaggaatgaagcctattataaaaaattgttagataattttaaggacaaggcctatatcaccttggccaccttggatgtttctaaacgttcgcaagaattagaagaacagttagcgaaaaatagagccttggaagagacctttactgagtcgactcgaacttcaaaagtagaagcgcagaagaaggaaaaagaacgtttgttagaggaattgaccttcttgcaggaatatatagatgtaggtcaagcgagagttcctttagcggctactttgagtttggaatttggtactacctctgtcaatatatatgctggtatggatgatgattttaaacgttacaatgcaccaattttaacatggtatgaaacggctcgctatgcctttgagcgaggtatggtctggcaaaatttaggtggtgttgaaaactctctcaatggtggactttatcattttaaggaaaaatttaatccaacgattgaagaatacttgggtgaatttacaatgcccactcatcctctctatcctctgttaagacttgctcttgatttccgtaaaacattaagaaaaaaacatagaaagtaa

SEQ ID NO: 9295 - DNA, 1233 bp, Streptococcus pneumoniae
  CDS (1)...(1233)
atggcactaacaacactcacgaaagaagagtttcagacttattctgatcaggtttcttctcgttcctttatgcaatctgtccagatgggggatttgctagaaaaaagaggggctcgaattgtttatcttgctttgaaacaagaaggagaaattcaagttgcagctctggtttatagcttgcccatgctgggtggtctgcatatggaactcaattcggggccgatttatacccaacaagatgctcttccagttttttatgcagagttaaaagaatatgccaagcaaaatggtgtattagagttgcttgtaaaaccttatgaaacttatcaaacttttgatagccaaggtaatccaatagatgctgagaaaaaaagtattattcaaggtttgactgatttaggttatcaatttgatggcttaacaacaggttacccaggtggagaaccagattggttatactataaagatttaactgaattaactgaaaagagtttgcttaaaagttttagcaaaaagggtaaacccttggtgaaaaaggctgaaacctttggcattcggttgaaaaagttaaaacgtgaagaactatcgatttttaagaatataacaaaagaaacctctgaacgtagagaatatagtgataaaagtttagaatattatgagcatttttatgatacttttggagaacaagcggagtttctcatagcaagcttaaatttttcggactatatgagcaaattgcaaggtgaacaaagtaaactagaagaaaacttggacaagttgcgacttgatttgagtaaaaatcctcattctgagaaaaaacaaaatcaactgagagaatattctagtcaatttgaaacgtttgaagttcgaaaagcagaagcgcgagacttgattgaaaaatatggagaagaagatattgttttagctgggagtttatttgtttatatgcctcaggaaacgacttatctctttagtggttcctacactgagtttaataagttctatgcccctgccctgcttcaaaaatatgttatgttggaaagcataaaacgtggaatacctaaatacaacttcctaggcattcaagggatttttgatggaagtgatggtgttttgcgttttaaacagaattttaatggctatattgtacgcaaagcaggtactttccgttaccatccatctcctttaaaatacaaagctatccagttactcaaaaaaatagtaggacgttaa

SEQ ID NO: 9296 - DNA, 1401 bp, Streptococcus pneumoniae
  CDS (1)...(1401)
atgatagcaattgattttacagcagaagtagaaaaacgcaaagaagacctcttggctgacttgtttagtcttttggaaatcaactcagaacgtgatgatagcaaggctgatgcccaacatccatttggacctggtccagtaaaagccttggaaaaattccttgaaatcgcagaccgtgatggttatccaactaaaaatgttgataactatgcaggacattttgagtttggtgatggagaagaagttctcggaatctttgcccatatggacgtggttccagctggtagcggttgggatacagatccttacacaccaactatcaaagatggtcgcctttatgcgcgcggggcttcggacgataagggtcctacaacagcttgttactatggtttgaaaatcatcaaagaattgggtcttccaacttctaagaaagttcgcttcatcgttggaacagacgaagaatcaggctgggcagacatggactactactttgagcacgtaggacttgccaaaccagatttcggtttctcaccagatgctgaatttccaatcatcaatggtgaaaaaggaaatatcacggaatacctccactttgcaggagaaaatacaggtgctgcccgtcttcacagctttacaggtggtttacgtgaaaatatggtaccagaatcagcaacagcagtcgtttcaggtgatttggctgacttgcaagctaaactagatgcctttgttgcagaacacaaacttagaggagaactccaagaagaagctggcaaatacaaggtgacgatcattggtaaatcagcccacggtgctatgcctgcttcaggtgtcaatggcgcaacttaccttgccctcttcctcagccagtttggctttgctggtccagccaaagactaccttgacatcgcaggtaaaattctcttgaacgatcatgagggtgaaaatctcaagattgctcatgtggatgaaaagatgggtgctctttctatgaatgccggcgtcttccgcttcgatgaaacaagtgctgataataccattgcccttaacatccgctatccaaaaggaacaagtccagaacaaatcaagtcaatcctagaaaacttgccagttgcttctgtcagtctatcagaacatggtcatacccctcactatgtgccaatggaagatccacttgtgcaaaccttgttgaatgtctatgaaaaacaaacaggcctacaaggtcatgaacaagtcatcggtggtggaacctttggtcgcttgttagagcgcggagttgcctatggtgctatgttcccagactcaattgataccatgcaccaagccaatgaatttattgccttggacgatctcttccgagcagcagcaatttatgccgaagctatttacgaattgatcaaataa

SEQ ID NO: 9297 - DNA, 1341 bp, Streptococcus pneumoniae
  CDS (1)...(1341)
atgaaggagatttttacggctaaaaaaggtaccctaacaggtttgctcctgtttggaatattttttggtgcggggaacttgatttttccgccttctctaggtgctctatctggagaacattttcttcctgccatcgcaggttttgtcttttcaggcgttggtatcgccgtcttgacccttattattggaacgctaaatcctaaaggatatatctacgagatttcaacgaagatagcgccttggtttgcgactctttacctctcagttctttacttgtcaatcggtccattctttgctaccccacgtactgctacaacagcttacgaagtagggattagcccccttttgtcggatgcaaataaaggacttggcttgattgtatttacggttctgtattttgcggcagcctatttgatttcgcttaatccatcaaaaatcttagaccgcattggacgtattttaacgccagtctttgcaattttgattgttatcttggtcgttctgggagctatcaaatatggtggaacaagtcctcaagctgcttcagctgcttatcaagcttctgcctttggtacaggtttcctagaaggttataataccttggacgcccttgcctcagtggcctttagcgtaatcgcagttcaaaccttgaaacaacttggattttcaagtaagacagaatacatttcaactatttgggttgttggtatcgttgttgcccttgccttcagcgctctttacatcggtttaggttttcttggaaatcatttcccagtaccagctgaagcgatgaagggtggaacaccaggtgtttacatcttgtcacaagccactcaagaaatctttggctcaacagctcaactcttccttgcagctatggttaccgtaacctgcttcacaacgactgttggtttgattgtgtcaacagctgagttctttaatgagcgcttcccacaaatcagctacaaggtttatgcgacagcctttaccttgattggatttgctattgccaatttgggtcttgatgcgattatcaagtactcaattccagtactggttatcttgtacccaatcacgattgctatcgttatgattgtcattgtcaacaaatttgttgccctttcaaaaccaggtatgcagttgacaattgctgtggttacagttattgccattgcaaacgtactaggaagctcgtttaaggttgagtttcttgcaaatcttgttagcgttcttccttttgccaaggcatctctcccatggttggtgccagccattgttggaatcttgctctcattggttctaccaaacaagcaagaaagtgatgtttttgaaatggaataa

SEQ ID NO: 9298 - DNA, 1038 bp, Streptococcus pneumoniae
  CDS (1)...(1038)
atgaatcaaacagtagaatatatcaaagaactgacagccattgcgtcgccaacaggctttactcgtgagattgcggactatttagtcaagactctagaaggttttggttaccagccggttcgcacatccaagggcggtgtcaatgtaactattaaaggtcaaaatgatgagcaacatcgctatgtgactgcccatgtagatacgcttggtgctattgtccgtgctgtcaaaccagacggccgtctcaaaatggaccgtatcggtggctttccttggaacatgattgaaggagaaaactgtaccattcatgtggctagcacaggtgaaaaagtatcaggaaccatcctcatccaccaaacttcttgccatgtctataaggatgcaggaactgcagaacgcacgcaagacaatatggaagtgcgtttggacgccaaagtaactagtgaaaaagaaactcgtgctcttggcattgaggtcggtgattttatcagttttgacccacgaactgtcgtgacagagacaggttttatcaagtctcgccatttggatgacaaggtcagtgcggcgattttgctcaatctccttcgcatttataaggaagagaagattgaattgcccgtaacaactcattttgctttttcagtctttgaagaagtgggacacggtgcaaactctaacattcctgctcaggtagtagaatatctggctgtggatatgggagccatgggagatgaccagcaaacagacgaatatacagtgtctatctgtgtcaaggatgcttctggaccttatcactatgacttccgtcaacatttggtggctttggcgaaagagcaagatattccatttaagctggatatctatccattttatggttcggacgcttcagcggctatgtctgcaggggcagaagtcaaacacgcccttctcggtgctggtatagagtctagccattcctatgagcgtacccatattgactcggtgatcgcaacagaacgaatggtcgatgcttatcttaagagcacgttggtggactaa

SEQ ID NO: 9299 - DNA, 690 bp, Streptococcus pneumoniae
  CDS (1)...(690)
atggctaaaaaaagcaaacaacttcgtgctgctcttgagaaaatcgacagcacaaaagcatacagtgtagaagaagctgtagcacttgcaaaagaaactaactttgcaaaatttgatgcaactgtagaagttgcttacaacttgaacatcgacgttaaaaaagctgaccaacaaatccgtggagcaatggtattgccaaacggtactggtaaaacttcacgtgttcttgttttcgcacgtggtgcaaaagctgaagaagcaaaagctgctggtgcagactttgttggtgaagatgaccttgttgctaaaatcaacgacggttggttggacttcgacgtagttatcgctacacctgatatgatggctcttgttggacgtcttggacgtgtccttggaccacgtaacttgatgccaaaccctaaaactggtactgtaacaatggatgttgctaaagcagttgaagagtctaaaggtggtaaaatcacttaccgtgctgaccgtgcaggtaacgttcaagcaatcatcggtaaagtatcatttgaagctgaaaaattggttgaaaactttaaagctttcaacgaaacaatccaaaaagcaaaaccagctacagctaaaggaacttacgtaacaaacttgactatcacaactactcaaggtgttggtatcaaagttgacgtaaactcactttaa

SEQ ID NO: 9300 - DNA, 1353 bp, Streptococcus pneumoniae
  CDS (1)...(1353)
atgaaagtaatagatcaatttaaaaataagaaagttcttgttttaggtttggccaagtctggtgaatctgcagctcgtttgttggacaagctaggtgccattgtgacagtaaatgatgggaaacctttcgaggacaatccagctgcccaaagtttgctggaagaagggatcaaggtcattacaggtggccatcctttggaactcttggatgaagagtttgcccttatggtgaaaaatccaggtatcccctacaacaatcccatgattgaaaaggctttggccaagagaattccagtcttgactgaggtggaattggcttatttgatttcagaagcaccgattattggtatcacaggatcgaacggtaagacaaccacaacgactatgattggggaagttttgactgctgctgggcaacatggtcttttatcagggaatatcggctatcctgccagtcaggttgctcaaatagcatcagataaggacacgcttgttatggaactttcttctttccaactcatgggtgttcaagaattccatccagagattgcggttattaccaacctcatgccaactcatatcgactaccatgggtcattttctgaatatgtagcagccaagtggaatatccagaacaagatgacagcagctgatttccttgtcttgaactttaatcaagacttggcaaaagacttgacttccaagacagaagccactgttgtaccattttcaacacttgaaaaggttgatggagcttatctggaagatggtcaactctacttccgtggtgaagtagtcatggcagcgaatgaaatcggtgttccaggtagccacaatgtggaaaatgcccttgcgactattgctgtagccaagcttcgtgatgtggacaatcaaaccatcaaggaaactctttcagccttcggtggtgtcaaacaccgtctccagtttgtggatgacatcaagggtgttaaattctataacgacagtaaatcaactaatatcttggctactcaaaaagccttatcaggatttgacaacagcaaggtcgtcttgattgcaggtggtttggaccgtggcaatgagtttgacgaattggtgccagacattactggactcaagaagatggtcatcctgggtcaatctgcagaacgtgtcaaacgggcagcagacaaggctggtgtcgcttatgtggaggcgacagatattgcagatgcgacccgcaaggcctatgagcttgcgactcaaggagatgtggttcttcttagtcctgccaatgccagctgggatatgtatgctaactttgaagtacgtggcgacctctttatcgacacagtagcggagttaaaagaataa

SEQ ID NO: 9301 - DNA, 1059 bp, Streptococcus pneumoniae
  CDS (1)...(1059)
atgaaaaaaattgtctttacaggtggggggacggttggacacgttaccctcaatcttttgttaatgcccaagttcatcgaagatggttgggaagtccactatatcggggacaagcgtggtatcgaacaccaagaaatccttaagtcaggtttggatgtcactttccactccattgcgactgggaaattgcgtcgctatttctcttggcaaaatatgctggacgtcttcaaagttggctggggaatcgtccaatcgctctttatcatgttgcgacttcgtccacagacccttttttcaaaggggggctttgtctcagtaccgcctgttatcgcagcgcgtgtgtcaggagtgcctgtctttattcacgaatctgacctgtctatgggcttggccaataaaatcgcctataaatttgcgactaagatgtattcaacctttgagcaagcttcgagtttgtctaaggttgagcatgtgggagcagtgaccaaggtttcagatcaaaaaaatccagaaccagatgaattggtggatattcaaacccactttaatcataaattgccgactgtattgtttgttggcggttctgcaggtgctcgtgtctttaaccaattggtgacagaccataagaaagaactaacagagcgctacaatattatcaatctaactggagattctagtctgaacgagttgagccaaaatctttttcgtgttgactatgtgaccgatctctatcaacccttgatggaattggctgatattgttgtgacacgaggtggtgccaatacgatttttgagctcttggcgatagcaaaattgcatgtcattgtgccgcttggtcgtgaagctagtcgtggtgaccagattgaaaatgcagcttactttgtaaaaaaaggctatgcagaagaccttcaagaaagcgatttgaccttggatagtttggaagagaagctttctcacttactaagtcacaaggaagattaccaagctaagatgaaagcttctaaggaattgaaatctctagcagatttttatcaattgttgaaaaaagatttatcataa

SEQ ID NO: 9302 - DNA, 633 bp, Streptococcus pneumoniae
  CDS (1)...(633)
atgacacttgctaaagatatcgctagccacctcttgaaaatccaagccgtttacctcaaaccaaaggaacccttcacttgggcatctggtatcaagtcaccgatttacactgataatcgtgtgacactagcctatccagaaactcgtaccctaattgaaaatggttttgtggaagctatcaaagaagcctttcctgaagtagaagtgattgcaggaactgcaacagcagggattccacacggagccattattgctgataagatggacttgccttttgcctacatccgtagcaaaccaaaagaccacggagctggtaatcaaatcgaaggtcgcgtagctcaaggtcaaaaaatggtagtggttgaagaccttatttcaacgggtggttcagttcttgaagctgtagcagcagccaagcgagaaggagcagatgtgcttggagttgtagcgattttcagctaccaattgccaaaagcagataagaactttgcagatgctggtgttaaacttgtgacgctttcaaactatagcgatcttatccatctagcccaagaagaaggttacatcacgccagagggcctttatcttctaaaacgctttaaagaagaccaagaaaattggcaagaaggttag

SEQ ID NO: 9303 - DNA, 1491 bp, Streptococcus pneumoniae
  CDS (1)...(1491)
atgtctacagaacatatggaagaactaaatgaccagcagatcgttcgccgtgaaaaaatggctgcgctccgcgaacaaggaatcgatcctttcggaaaacgttttgaacgtactgcaaattcacaagaattaaaagataaatatgccaacctcgataaagaacaattacacgataaaaacgaaacagctactatcgcaggacgcttggtaaccaaacgtggtaaaggaaaagttggttttgcccaccttcaagaccgcgaaggccagattcagatctatgttcgtaaggatgctgtcggtgaagaaaactacgaaatcttcaaaaaagcagaccttggtgacttccttggtgtcgaaggtgaagtgatgcgtacggatatgggagaactctctatcaaggcaacccacatcacacacttgtctaaggctcttcgtcctcttcctgagaaattccatggtttgacagacgttgaaacaatttaccgtaaacgttaccttgacttgatttctaatcgtgaaagctttgaacgctttgtcactcgttcaaaaatcatctctgaaatccgtcgttaccttgaccaaaaaggattccttgaagtggaaacacctgttcttcataatgaagccggtggagctgctgcccgtccatttatcacccaccacaatgcccaaaacattgacatggtgcttcgtatcgcgactgagcttcacttaaaacgccttatcgtgggtggtatggaacgtgtctatgaaattggccgtatcttccgtaacgaaggaatggatgctactcataaccctgagttcacttctatcgaagtttaccaagcctatgcagacttccaagatatcatggacttgacggaaggcattatccaacatgctgctaaatcagtcaaaggtgatggcccagtcaactaccaaggtactgaaatcaagattaacgaaccatttaagcgtgttcatatggtggatgctatcagagaaattactggtgtcgatttctggcaagacatgactttggaagaagctaaagctatcgctgctgagaagaaagttccagttgagaaacactacactgaggttggtcacatcatcaatgccttctttgaagagtttgttgaagaaactttaatccaaccaacctttgtctatggacatccagtagctgtatctccactcgctaagaaaaatcctgaagaccaacgctttactgaccgtttcgagctctttatcatgactaaggagtacggtaatgcctttactgagctcaacgacccaatcgaccaacttagccgttttgaagcccaagctaaagccaaagaacttggtgatgatgaagcgacaggaatcgactatgactacattgaagcccttgaatacggtatgccaccaacaggtggtttgggaatcggtatcgaccgtctctgcatgctcctcactgatacaacaactatccgtgatgtattgctcttcccaacaatgaaataa

SEQ ID NO: 9304 - DNA, 1137 bp, Streptococcus pneumoniae
  CDS (1)...(1137)
atgtcatacaaaacaagcaatgcagaaggccatgtagatttcatcaatacctatgatttggagccaatggcgcaacaagttattcctaaagcagcatttggctatatcgctagtggggcggaagatactttcactttaagagagaatatccgcgcctttaaccacaaactcatcgttcctcatacactttgcgatgttgaaaatccaagtacagagattgaatttgcaggtgaaaaactatcttcaccaatcattatggcgcctgttgcggcccataaattagcgaatgaacagggggaagtggcgactgcgcgtggtgtgcatgagtttggttctctttatacaaccagttcttactctactgttgaccttccagagatttctgaagcccttcaagggacacctcattggtttcaattttactttagtaaggatgacggtatcaaccgccacatcatggaccgtgtgaaggctgaaggttataaagcgattgtcttgacggcagatgctactgtaggggggaatcgtgaagtggataagcgtaatggttttgtcttcccagttggcatgccgattgttgaagaatacctgccagaaggtgctggtaaatcaatggactttgtttataaatcagctaaacaacgcttgtctccacgcgatgtagaatttatcgctgaatactctggtcttcctgtgtatgtcaagggaccacaatgccgtgaggacgttgaacgttcgcttgctgcaggagcttctggtatctgggtaaccaaccacggtggtcgtcaaatcgacggtggaccagctgcctttgactcgcttcaagaagtggcagaagcagttgatagacgtgtgccgattgtctttgactctggtgttcgtcgtggtcaacacgtctttaaagccttggcttcaggagcagacttggtagctattggtcgccctgttatctatggcttggctctcggtggtagtgtcggtgtgcgtcaagtctttgaacacttgaatgcggaattgaagacagttatgcaattgtctggagctcagaccattgaagatgtcaaacactttaagctccgtcacaatccatacaacccaaccttcccagttgaccctcgtgacttaaaattgtattga

SEQ ID NO: 9305 - DNA, 630 bp, Streptococcus pneumoniae
  CDS (1)...(630)
atgtttcataaagaattactaaaactatattttatttgtggaacgactacttgccaaggaaaaaatctatatacagtcgttgaggaagccttaaaaggtggtataaccttatttcaatttcgagaaaaaggtgagagtgctttagaaggcttagaaaaacttgagctagctatccaaattaaagaactttgtaaaaaatacaatgttccatttatcgttaatgacgatatagatttagcaatggaaattgacgccgatggcgtacatgtaggtcaagatgatattggtgttgatgaaattagaaaattgatgccagataaaataattggtctttctataagaaacgaagaagaatttcaacaatcaaaagttgaatatgtagattatgtaggtgttgggcctgtatttgatacccagtcaaaagatgatgctggtggtgctataggttatgaaggtcttgaattgatgagaaaactattgccacaaatgcctttagttgcaattggtgggatacagacgaaacatattaaagacattataaagaccaatatggatggcgtttcaatcatttcggcaatatcgtatgcaaaaaatatagaaaaaactgttcgggaaatgagtgaacaatag

SEQ ID NO: 9306 - DNA, 693 bp, Streptococcus pneumoniae
  CDS (1)...(693)
atggaatttacagatattgcgatggaattatccaagaaagcttggcaggcttcctttcatcatccctttattttacaattacaagaggggaatttagaacctgccattttccgctattacctgattcaggatgcctactatctgaaggccttctcagaaatctatcatcttttggctgataagacttcaaaccaagagatgaaaagactcttgaaacaaaatgctcagggtttagtggagggtgagttatttattcgccaacaatttttcaaggaattggaaatcagcgaccaggaaatggagcaacatccaatcgctccaacctgttatcattacatttctcatatttataggcaatttgcagaaccgaacttagccatcgcttttgcaagcttgcttccttgtccttggttataccatgatataggcaaatcacttaatcttaaaccatcaccaaatcctctctatcaacaatggattgaaacttatattacggatgagttagagcaacagatcagagaggagggagcactggtcaatcagctctatcgagaaagtgacgagacagacaagcaaaaaatgctagataccttccacatcagtgttcatatggaagccaagttttgggaaatggcctaccaacaccagacatggaagagcgatttacagtctttagaaaaaggagaagaatag

SEQ ID NO: 9307 - DNA, 2253 bp, Streptococcus pneumoniae
  CDS (1)...(2253)
gtggagactatgacagaaattgtgaaagcaagcttagaaaatggcattcaaaaaatccgtatccaagctgaaaaaggctatcatccagcccatatccagcttcaaaagggaattccagctgagattacctttcatcgtgctactccttcaaactgttataaggaaattctgtttgaagaagaaggtatcttggaaccaatcggcgtagatgaggagaaagtcattcgttttacacctcaagaattagggcgacatgaattttcttgtggcatgaagatgcaaaagggaagctatacagtcgttgagaagactcgaaaatctctatctctcctgcaacgtttttggattactagtatctttactgtgcctcttgtgattctcatgattgggatgttgacaggtagcattagtcatcaagtcatgcattggggaacctttctagcaacaacgcctattatgttagttgcaggtaagccatatatccagagtgcttgggccagttttaaaaagcacaatgccaacatggataccttggttgcgctgggaactctagtggcttatttctatagcctagttgctctctttgctggtctccctgtttacttcgaaagtgctggatttatcctctttttcgttcttttgggagcagtttttgaggaaaaaatgagaaaaaatacgtcccaagctgtggagaaattactggacttgcaagctaaaaccgcagaagtcttgagtgatgatagttatgtccaagttcctttggaacaagtcaaggtaggcgacctgattcgagtgcgtcccggtgaaaagattgctgttgatggtgtcgtagtagaaggtgtctctagtattgacgaatccatggtgacaggtgagagtctgcctgtggacaagacagttggagatactgtcattggctcaaccatcaatcatagtggaacgcttgtctttagagcagaaaaagttggctcagagactgttttggctcagattgtggattttgtgaagaaagctcagacaagtcgtgcgccgattcaggacttgacggataagatttcagggatttttgtcccagtagttgtcattttaggaatcatgaccttttgggtttggttcgtcttgctcagggatagtgtggtcgtgcttggagctagctttgtgtcctctcttctctacggagtggcggttttgattatcgcctgtccttgtgccttgggacttgcaacaccgacagcccttatggtggggacaggacgtagtgccaagatgggggttctcctcaaaaatggaactgtcttacaggaaatccagaaagttcaaactcttgtctttgataagaccgggactttgacggaagggaaacctgtggtaacagatatcatcggcgacgaagtagaagtgtttggattggcagcctccttggaagatgcttctcaacacccactggctgaggctatcgttaagcgagcgagtgaagctggacttgagtttcaaactgttgaaaattttcaggccttgcacgggaaaggtgtttcagggcgaatcaatggaaaacaagttttacttggaaatgctaaaatgctggatggcatggatatttctaatacttatcaagataaactagaagaactagaaaaagaagctaagacagttgtgtttttagctgttgacaatgaaatcaaaggcttgcttgctttgcaagatattcctaaggaaaatgctaagctagccatcagtcagctaaaaaaacgtggtctccgaacagtcatgctgacaggagacaatgctggtgtggcgcgtgctattgcagatcaaatcggaattgaagaggtcattgcaggcgtcttgccagaagaaaaagcccatgaaatccataaactgcaagcggctggcaaagtagcctttgttggggacggtatcaatgacgctcctgcccttagtgtagcagatgtgggaattgctatgggtgctggaacagatatcgccatcgagtcagcagatttggtgttgacaaccaataatcttttaggagtggttcgtgcctttgatatgagtaagaaaacctttcatcgaattctactcaatcttttctgggcttttatctacaatgttgtcggaattccgattgcagcaggagtcttttcaggtgttggactggctctcaacccagaattggcaggtctagccatggcctttagttctgtatctgttctgaccagttcccttctgttaaattttagtaaaatagactaa

SEQ ID NO: 9308 - DNA, 2253 bp, Streptococcus pneumoniae
  CDS (1)...(2253)
atgaagtggacaaaaagagtaatccgttatgcgaccaaaaatcggaaatcgccggctgaaaacagacgcagagttggaaaaagtctgagtttattatctgtctttgtttttgccatttttttagtcaattttgcggtcattattgggacaggcactcgctttggaacagatttagcgaaggaagctaagaaggttcatcaaaccacccgtacagttcctgccaaacgtgggactatttatgaccgaaatggagtcccgattgctgaggatgcaacctcttataatgtctatgcggtcattgatgagaactataagtcagcaacgggtaagattctttacgtagaaaaaacacaatttaacaaggttgcagaggtctttcataagtatctggacatggaagaatcctatgtaagagagcaactctcgcaacctaatctcaagcaagtttcctttggagcaaagggaaatgggattacctatgccaatatgatgtctatcaaaaaagaattggaagctgcagaggtcaaggggattgattttacaaccagtcccaatcgtagttacccaaacggacaatttgcttctagttttatcggcctagctcagctccatgaaaatgaagatggaagcaagagcttgctgggaacctctggaatggagagttccttgaacagtattcttgcagggacagacggcattattacctatgaaaaggatcgtctgggtaatattgtacccggaacagaacaagtttcccaacgaacgatggacggtaaggatgtttatacaaccatttccagccccctccagtcctttatggaaacccagatggatgcttttcaagagaaggtaaaaggaaagtacatgacagcgactttggtcagtgctaaaacaggggaaattctggcaacaacgcaacgaccgacctttgatgcagatacaaaagaaggcattacagaggactttgtttggcgtgatatcctttaccaaagtaactatgagccaggttccactatgaaagtgatgatgttggctgctgctattgataataatacctttccaggaggagaagtctttaatagtagtgagttaaaaattgcagatgccacgattcgagattgggacgttaatgaaggattgactggtggcagaatgatgactttttctcaaggttttgcacactcaagtaacgttgggatgaccctccttgagcaaaagatgggagatgctacctggcttgattatcttaatcgttttaaatttggtgttccgacccgtttcggtttgacggatgagtatgctggtcagcttcctgcggataatattgtcaacattgcgcaaagctcatttggacaagggatttcagtgacccagacgcaaatgattcgtgcctttacagctattgctaatgacggtgtcatgctggagcctaaatttattagtgccatttatgatccaaatgatcaaactgctcggaaatctcaaaaagaaattgtgggaaatcctgtttctaaagatgcagctagtctaactcggactaacatggttttggtagggacggatccggtttatggaaccatgtataaccacagcacaggcaagccaactgtaactgttcctgggcaaaatgtagccctcaagtctggtacggctcagattgctgacgagaaaaatggtggttatctagtcgggttaaccgactatattttctcggctgtatcgatgagtccggctgaaaatcctgattttatcttgtatgtgacggtccaacaacctgaacattattcaggtattcagttgggagaatttgccaatcctatcttggagcgggcttcagctatgaaagactctctcaatcttcaaacaacagctaaggctttggagcaagtaagtcaacaaagtccttatcctatgcccagtgtcaaggatatttcacctggtgatttagcagaagaattgcgtcgcaatcttgtacaacccatcgttgtgggaacaggaacgaagattaaaaacagttctgctgaagaagggaagaatcttgccccgaaccagcaagtccttatcttatctgataaagcagaggaggttccagatatgtatggttggacaaaggagactgctgagacccttgctaagtggctcaatatagaacttgaatttcaaggctcgggctctactgtgcagaagcaagatgttcgtgctaacacagctatcaaggacattaaaaaaattacattaactttaggagactaa

SEQ ID NO: 9309 - DNA, 1176 bp, Streptococcus pneumoniae
  CDS (1)...(1176)
atgaaacattttgatactattgtcatcggtgggggacctgctggtatgatggctacgatttccagtagcttttatggacagaaaaccctcctcatcgaaaaaaatcggaaacttggaaaaaaattagctgggactggtgggggacgttgcaatgtgaccaacaatggtagcttagacaacctgctagctggaattcctggaaacggacgctttctttacagtgttttctcccagttcgataatcatgacatcatcaacttttttacagaaaatggtgttaaacttaaggtcgaagaccacggacgcgtctttccagccagtgacaagtctcggactattatcgaagctttggaaaagaaaatcactgaactaggtggtcaagttgctactcaaatagaaatcgtttctgttaaaaaagtagatgaccagtttgtccttaagtcagcggatcaaaccttcacttgtgagaaactcattgtcacaacaggtggtaagtcttatccttcgactggttcgactggctttggtcacgagattgctcgccattttaagcataccatcaccgatcttgaggctgctgaaagtcctttattaacagattttccacataaagccttacaagggatttctctggacgatgtgaccctaagttatggtaagcatgtcatcactcatgatttactctttacccactttggtttgtcaggtcctgctgccctacgcatgtctagctttgtcaaaggtggggaggttctctcactcgatgttttgcctcaactttctgagaaggacttggttacatttctagaagaaaatcgggaaaaatccttgaaaaacgctttaaaaaccttgttaccagaacgcttggccgaattttttgtacaaggatatcctgaaaaagtcaaacagctgactgaaaaggaacgagaacaacttgtccagtccattaaagaacttaaaattcctgtaactggaaaaatgtcccttgcaaagtcctttgttaccaagggtggagtcagtctcaaggaaatcaatcctaaaacccttgaaagtaagctggtacctggcctccactttgcaggcgaagttatggatatcaatgcccacacgggtggctttaacatcacttctgccctctgtaccggctgggtggcgggaagtctgcattatgattaa

SEQ ID NO: 9310 - DNA, 630 bp, Streptococcus pneumoniae
  CDS (1)...(630)
atgggaaaaattgaagttattaatcacccactgattcaacacaaattgtcaatcttgcgtcgtacagatacttctacaaaagcttttcgtgagctagtagatgagattgcaatgttgatggggtatgaagtacttcgtgatcttccactagaagatgtggaaatcgaaacaccaattacaaaaacagttcaaaaacaattggcaggtaagaaattggccatcgtcccaatcttgcgtgcaggtatcgggatggttgatggtctcttgagcttggttccagctgctaaagttggccacatcggtatgtaccgtgatgaagaaacacttcaaccagttgaatacttggtgaaattgcctgaggacattgaccaacgtcaaatttttgtagtagacccaatgttggcaacaggtggctcagcaatcttggctgttgattctcttaaaaaacgtggcgcatcaaatatcaaatttgtctgccttgtatctgctccagagggtgtaaaagcccttcaagaagctcatccagatgtagaaatctttacagcagccttggatgaacgtttgaacgaacacggttatatcgttccaggtcttggagatgctggagaccgcttgttcggtacaaaataa

SEQ ID NO: 9311 - DNA, 981 bp, Streptococcus pneumoniae
  CDS (1)...(981)
atgtttatttccatcagtgctggaattgtgacatttttactaactttagtaggaattccggcctttatccaattttatagaaaggcgcaaattacaggccagcagatgcatgaggatgtcaaacagcatcaggcaaaagctgggactcctacaatgggaggtttggttttcttgattacttctgttttggttgctttctttttcgccctatttagtagccaattcagcaataatgtgggaatgattttgttcatcttggtcttgtatggcttggtcggatttttagatgactttctcaaggtctttcgtaaaatcaatgaggggcttaatcctaagcaaaaattagctcttcagcttctaggtggagttatcttctatcttttctatgagcgcggtggcgatatcctgtctgtctttggttatccagttcatttgggatttttctatattttcttcgctcttttctggctagtcggtttttcaaacgcagtaaacttgacagacggtgttgacggtttagctagtatttccgttgtgattagtttgtttgcctatggagttattgcctatgtgcaaggtcagatggatattcttctagtgattcttgccatgattggtggtttgctcggtttcttcatctttaaccataagcctgccaaggtctttatgggtgatgtgggaagtttggccctaggtgggatgctggcagctatctctatggctctccaccaggaatggactctcttgattatcggaattgtgtatgtttttgaaacaacttctgttatgatgcaagtcagttatttcaaactgacaggtggtaaacgtattttccgtatgacgcctgtacatcaccattttgagcttgggggattgtctggtaaaggaaatccttggagcgagtggaaggttgacttcttcttttggggagttgggcttctagcaagtctcctgaccctcgcaattttgtatttgatgtaa

SEQ ID NO: 9312 - DNA, 957 bp, Streptococcus pneumoniae
  CDS (1)...(957)
atgaaggaaaatttaaaagttaatattctatggttactccttttgttagctggctatagcttgattagtgtactggtttcagtcggagtacttaatctattctatgtacagattttacaacaaattggaattaatattattttggctgttggtctcaacttaatcgttggtttttcaggacaattttcacttggtcatgctggtttcatggcgattggtgcctatgccgcagctattattggttctaaatcaccaacctacggtgccttctttggagctatgcttgtaggggctttgctttcaggagcagttgccttacttgtcggcattccaaccttgcgcttgaagggggactatcttgcggtagcaactctgggtgtttctgaaattatccgtatctttatcatcaatggtggaagtcttacaaatggtgcggcaggtatcttagggattcctaactttacaacttggcaaatggtttacttctttgtcgtgattacaaccattgcaaccttgaacttcttgcgtagcccaattggccgttcaaccctctctgttcgtgaagatgaaatcgctgctgagtcagttggggttaatacgactaaaattaaaatcatcgcttttgtctttggtgccattactgcaagtattgctgggtcacttcaggcaggatttatcgggtctgttgtaccgaaagattacaccttcatcaactcaatcaacgttttgattattgttgtatttggtggactcggttccattacaggtgcgattgtttcggctattgttctgggaattttgaatatgcttctccaagatgttgctagtgtgcgtatgattatttacgctttggccttggtattggtaatgattttcagaccaggtggactccttggaacgtgggaactgagcctatcacgtttctttaaaaaatctaagaaggaggaacaaaactaa

SEQ ID NO: 9313 - DNA, 2106 bp, Streptococcus pneumoniae
  CDS (1)...(2106)
atgaacaacaattttaataattttaacaacatggatgatttatttaaccaattgatgggtggtatgcgaggatacagttctgaaaatcgacgttacttgattaatggacgtgaagtgacacctgaggaatttgcttactatcgtgcaactggtcaattgccaggaaatgcagaatctgatgtgcaaatgcaacaacaggcttcaggtatgaaacaagatggtgtccttgctaaactgggtcgaaacttgacagcagaagcgcgtgagggcaagctggatcctgttatcggacgaaacaaggaaattcaagaagcatctgaaatcctctcacgccgtaccaagaacaatcctgttttagtcggagacgcaggtgttggtaagacagccgttgtcgaaggcctagcgcaagcgattgtgaacggcgatgtcccagctgctattaagaacaaggaaattgtttccattgatatctcaggtcttgaggctggtactcaataccgtggtagctttgaagaaaatgtccaaaacttagtcaatgaagtgaaagaagcagggaatattatcctcttctttgatgaaattcaccaaattcttggtgctggtagcactggtggagacagtggttctaaaggacttgcggatattctcaagccagctctctctcgtggagaattgacagtgattggggcaacaactcaagacgaataccgtaacaccatcttgaagaatgctgctcttgctcgtcgtttcaacgaagtgaaggtcaatgctccttcggcagagaatacttttaaaattcttcaaggaattcgtgacctctatcaacaacaccacaatgtcatcttgccagacgaagtcttgaaagcagcggtggattattctgttcaatacattcctcaacgtagcttgccagataaggctattgaccttgtcgatgtaacggctgctcacttggcggctcaacatccagtaacagatgtgcatgctgttgaacgagaaatcgaaacggaaaaagacaagcaagaaaaagcagttgaagcagaagattttgaagcagctctaaactataaaacacgcattgcagaattggaaaggaaaatcgaaaaccacacagaagatatgaaagtgactgcaagtgtcaacgatgtggctgaatctgtggaacgaatgacaggtatcccagtatcgcaaatgggagcttcagatatcgaacgtttgaaagatatggctcatcgcttgcaagacaaggtgattggtcaagataaggccgtagaagttgtagctcgtgctatctgtcgtaaccgtgctggttttgatgaaggaaatcgcccaatcggcaacttcctctttgtagggtctactggggttggtaagacggagcttgctaagcaattggcactcgatatgtttggaacccaggatgcgattatccgtttggatatgtctgaatacagtgaccgcacagctgtttctaagttaattggtacaacagcaggctatgtgggttatgatgacaatagcaataccttaacagaacgtgttcgtcgcaatccatactctatcattctcttggatgaaattgaaaaggctgaccctcaagttattacccttctcctccaagttctagatgatggtcgtttgacagatggtcaaggaaatacagtaaacttcaagaacactgtcattattgcgacctcaaatgctggatttggctatgaagccaacttgacagaagatgcggataaaccagaattgatggaccgtttgaaacccttcttccgtccagaattcctcaaccgctttaatgcagtcatcgagttctcacacttgactaaggaagacctttctaagattgtagatttgatgttggctgaagttaaccaaaccttggctaagaaagacattgacttggtagtcagtcaagcggctaaagattatatcacagaagaaggttacgacgaagtcatgggggttcgtcctctccgtcgcgtggttgaacaagaaattcgtgataaggtgacagacttccacttggatcatttagatgctaaacatctggaagcagatatggaagatggcgttttggttattcgtgagaaagtctaa

SEQ ID NO: 9314 - DNA, 1344 bp, Streptococcus pneumoniae
  CDS (1)...(1344)
atgtcatttacgaaatttcaatttaaaaactatattagagaagccttgaaggagttaaaatttacaactccaacagaggtgcaagacaagttgattcctattgttttggcaggtcgtgacctagtaggagaatcaaaaacaggttcaggtaagactcacactttcttgttaccgattttccagcaattagatgaagctagcgatagtgtacaagcagtgattactgcaccgagtcgtgagttggctactcaaatttaccaagtagcgcgtcagatttcagctcactcagatgtcgaagttcgtgtggttaattatgtgggtggtacggataaggctcgccagattgagaaattggaaagcaatcagcctcatattgttattggaacaccaggccgtatctacgacttggttaaatctggtgatttagctattcataaagccaagacatttgttgttgatgaagcagatatgaccttggatatgggattcttggaaactgttgataagattgctggcagtcttccaaaagacttgcaattcatggtcttctcagcgactatcccacaaaaactgcaaccattcttgaaaaaatacttatcaaatcctgttatggagaaaattaagactaaaacggttatttctgacaccattgataattggttgatttcgaccaagggacatgataagaatgctcaaatttaccagttgactcagttgatgcagccgtatttggcaatgatttttgttaacactaaaacgcgtgctgatgaattgcattcatatctgactgctcaaggcttgaaggttgcaaaaatccatggcgatattgcccctcgtgaacgcaagcgaatcatgaatcaggtgcaaaatctggattttgagtatattgtcgcaacagatttagcagcgcgtgggattgacattgaaggtgtcagccatgtcatcaatgatgccattccgcaagacttatctttttttgttcaccgtgttggtcgtactggacgaaatggcctaccaggtacagctattaccctttatcagccaagtgatgactcggatatccgtgagttggagaaattgggaatcaagtttagtcctaagatggtcaaagatggggaatttcaagatacctatgaccgtgatcgtcgtgccaaccgtgagaaaaaacaagataaacttgatatcgaaatgattggtttggttaaaaagaaaaagaaaaaagtcaaaccgggttataagaagaaaattcaatgggcggttgatgaaaagcgccgtaaaactaagcgtgctgaaaatcgcgctcgcggtcgtgcagagcgtaaagctaaacgccaaacattttaa

SEQ ID NO: 9315 - DNA, 1191 bp, Streptococcus pneumoniae
  CDS (1)...(1191)
atgtcagaacgtaaattattcacgtctgaatctgtatctgaggggcatccggataagattgcagaccaaatttcagatgcgattttggatgctattttagcaaaggatccagaggcgcacgttgctgctgaaacagctgtatatactggttctgtccacgtttttggtgaaatttctacaaatgcctatgtggatattaaccgtgtggttcgtgataccattgcagagattggttataccaatacagaatatggattttctgctgagacggtgggagtacacccatctttggtggaacaatctcctgacatcgctcaaggtgttaacgaagccttggaggttcgcggaaatgctgatcaagatccactggacttgattggagcaggtgaccaagggctcatgtttggatttgcagtagatgaaacagaagagcttatgccattgccaattgcactcagtcataaattggttcgtcgtctggcagaacttcgtaagtctggagaaattagctatctccgtccagatgcaaaatcacaagttacagttgagtacgatgaaaatgaccgtccggtacgtgtagatacagtcgttatttctactcagcatgatccagaggccactaatgaacaaatccatcaagatgtgattgacaaggtcatcaaagaagttattccatcttcttatcttgatgataagacaaaattctttatcaatccgacaggtcgttttgtaatcggtggtcctcaaggggactcaggtttgactggtcgtaagattattgtagatacttatggtggctactctcgtcatggtggtggtgccttctctggtaaagatgcgactaaggtggatcgttcagcctcttatgcggctcgctatattgccaagaatatcgttgcagcaggccttgctaagaaggcagaagtgcagttggcctatgctatcggtgttgcgcaacctgtttctgttcgtatcgatactttcggtacaggaacagtagctgaaagtcaacttgaaaaagcggctcgtcaaatctttgaccttcgccctgcagggattatccaaatgctggacctcaagcgtccaatttaccgtcaaacatcggcttacggtcacatgggacgtacagatattgatcttccatgggaacgtttggataaggtagatgctttgaaagaagcagtaaaataa

SEQ ID NO: 9316 - DNA, 531 bp, Streptococcus pneumoniae
  CDS (1)...(531)
atgcgaaaagaaattgcacctgaattatacaactataacaagtttcctggtccggagttccatttacacggggacaaggtcgaaacggaagggatagctttttccttggttgaaaatatcaaggatgcctttgatgtgacgacttttaatcagcgtttttcagaagtattaaccaagtttgattatatcgtgggggactggagcaacgaacagcttcgcctacgaggtttttacaaggatgaccgaacagaagaaaaacttgaaaaaatcagtcgtttacaagactaccttttagagtattgtagttatggttgtgcctattttgtcttagaaaatgaagcccctaagcgagcatcatttgacaagaaaatgcgtaagacggaagaagaaacaccttctagaaaaggaaagaaaccgactcaaactaaacgaaagtcgaatgcagataagaaaaatagacgtcgtcagaaagaccagcattctcagaaagaggacaaggaacaacgtcattttgtcattcgtcagaagtga

SEQ ID NO: 9317 - DNA, 273 bp, Streptococcus pneumoniae
  CDS (1)...(273)
atggcagttaaaatccgtttgactcgtatgggttctaagaaaaaacctttctaccgtatcaacgtagcagattcacgttcaccacgtgacggacgtttcatcgaaacagttggaacttacaacccacttgttgctgaaaaccaagtaactttgaaagaagaccgcgttcttgcatggttggctaatggagctcaaccttcagacacagtacgtaacatcctttcaaaagaaggcgtattgaaaaaattccacgattctaaattttcaaaataa

SEQ ID NO: 9318 - DNA, 240 bp, Streptococcus pneumoniae
  CDS (1)...(240)
atggatacgattgaaaatctcattattgcgattgtgaaacccttaatttcacaaccagatgccttaactatcaagattgaggatacaccagaatttttggaatatcatttgaatcttgatcaaagcgatgtgggtcgtgtaatcggtcgtaagggtcgcactatttctgcgataagaacgattgtctactctgtcccaactgaatacaaaaaagtaagaatcgttattgacgaaaaataa

SEQ ID NO: 9319 - DNA, 720 bp, Streptococcus pneumoniae
  CDS (1)...(720)
atgaagattgatattttaaccctctttccagagatgttttctccactggagcactcaatcgttggaaaggctcgagaaaaagggctcttggatatccagtatcataattttcgagaaaatgctgaaaaggcccgtcatgtagatgatgagccctacggaggcggtcagggcatgttgctcagagtacaacctattttcgattcctttgatgctattgaaaagaaaaatccgcgcgttattctcctcgatcctgctggaaagcagtttgatcaggcttatgctgaagatttggctcaagaggaagagctaatctttatctgtgggcactatgagggttatgatgagcgcattaagaccttggtaacagatgagatttccctaggcgactatgttctcactggtggagaattggcagctatgaccatgattgatgctacagttcgcctgattccagaagtgattggcaaggagtctagccaccaagatgatagtttttcttcaggtcttttagaatatcctcagtacacacgtccctatgattatcgaggcatggtcgtgccagatgtattgatgagtggccaccatgaaaagattcgtcagtggcgattgtacgagagtttaaagaaaacctacgagcgcagaccggatttacttgaacattatcaactgacagtagaagaagaaaaaatgctggcagaaatcaaagaaaacaaagaataa

SEQ ID NO: 9320 - DNA, 2040 bp, Streptococcus pneumoniae
  CDS (1)...(2040)
gtgttagaaaaacaggtttcatttgcctggaaaggaaaaattatgtctgaaaaaaatttttatattacaacgccgatttactatccatctgggaaacttcatatcggttctgcctacacaactatcgcatgtgatgtcctagcacgttacaaacgcctgatgggctacgatgtattttatctgacaggtcttgatgaacatggtcagaaaatccagcagaaagcggaagaagctggtattacacctcaagcctatgttgatggaatggcggttggagttaaagaactctggcaattactagatatctcatacgataaatttatccgtacaactgatgactaccatgaaaaagttgtcgcacaagtctttgaacgcttacttgctcaagatgatatctacttgggtgaatactctggttggtattcagtatcagacgaagaattctttacagaaagccagctggcagaagttttccgtgatgaagctggaaatgtgactggtggtattgctccatcaggtcatgaggttgaatgggtttctgaagaatcatacttccttcgccttagcaaataccaagaccgtttggtcgaatttttcaaagctcatcctgaatttatcacgccagatggtcgccttaatgaaatgctacgcaacttcatcgagccaggcttggaagatttggcggtatctcgtacaacctttacatggggagtgcctgtcccatcaaatccaaaacacgttgtctacgtttggattgatgcccttcttaactatgcgacagctcttggctacgctcaagacgaacatggtaactttgacaagttctggaatggaacagtcttccatatggtaggaaaagatatccttcgcttccactctatctactggccaatccttcttatgatgttggatgttaaattacctgatcgtttgattgcccatggttggtttgtcatgaaagacggaaaaatgtctaagtcaaaagggaatgtcgtttaccctgaaatgttggtagagcgttatggactagatccacttcgttactacctcatgcgtaaccttccagttggttcagacggaacctttactcctgaagactatgtcggccgtatcaactatgaattggctaatgaccttgggaacctccttaaccgtacggtttccatgattaataagtactttgatggacaaatccctgcctatgtagaaggtgtgactgaatttgatcatgttcttgctgaggttgcagaacaatcaatcgcagacttccatacacacatggaagcagttgactatccacgtgcgcttgaagcagtctggactctgatctctcgtaccaataaatacatcgatgagaccgcaccatgggtcttggccaaggatgaagctcttcgtgaccaattggcaagtgtcatgagccacttggcagccagcattcgtgtagttgctcacttgattgaaccatttatgatggaaactagtcgtgcagttttgactcaacttggtttggaagaagtttctagtcttgaaaacttgagtttggctgacttcccagcagatgtgactgtagttgccaaaggaacacctatctttccacgtctaaatatggaagaagaaatcgcctatatcaaggaacaaatggaaggcaataaaccagcagtcgaaaaagaatggaatccggacgaagttgagctcaaactaaacaaggatgaaatcaagtttgaagactttgacaaggttgaaatccgtgtcgcagaagtcaaagaagtgtctaaagtagaaggttcagataagttgcttcaattccgcttggatgctggtgatggagaagatcgtcagattctttcaggaattgcaaaatactatccaaatgaacaagaattggtcggcaagaaagttcaaatcgttgctaacctcaaaccacgtaaaatgatgaaaaaatatgtcagccagggtatgattctctcagctgaacatgatggcaaattaacccttctcacagttgatccagctgtaccaaatggaagtgtgattgggtaa

SEQ ID NO: 9321 - DNA, 1608 bp, Streptococcus pneumoniae
  CDS (1)...(1608)
atgcaagaaaaaaaaaaaaaaaatgccgtagtctatcaagtctatccaaagagttttatggatagtaatgaagatggagttggtgatttgccaggaattaccagtaagttggactatctagccaagctaggaatcacagcaatttggctttctcccgtttatgacagccctatggatgataatggctatgatattgctgattatcaagcgattgcggctatttttggaaccatggaggacatggatcagctgattgcagaagctaagaagcgtgatatccgtatcatcatggacttggtggtcaatcatacctcggatgagcatgcctggtttgtagaggcctgtgaaaatcctaatagccctgagcgagactactatatctggcgggatgagcctaacgatttagattctatttttagtggatctgcttgggaatacgatgaaaaatctggtcaatactatctccactttttcagcaagaaacagccggatctcaattgggaaaatgaaaaacttcgccagaaaatttatgagatgatggacttctggattgataaaggtattggtggtttccgtatggatgttattgacatgattggcaaaattcctgacgagaaggtagtcaataatggtcctatgctccatccctatctcaaggaaatgaatcaggcgacctttggagataaggatctcttgacagtaggggagacttggggagcaacgccagagattgccaagctctactctgatccaaaggggcaagaattgtctatggtcttccagtttgaacatatcggtcttcagtatcaggaaggtcagcctaaatggcactatcaaaaagagctgaatatcgctaagttaaaagaaatcttcaacaaatggcagacagagttaggagttgaggacggttggaattccctcttctggaacaatcatgacctccctcgtattgtctcaatctggggaaatgaccaagaataccgcgaaaaatctgccaaagcctttgcaatcttgcttcatcttatgagaggaactccttatatctaccaaggtgaggagattgggatgaccaactatccgtttgaaacactggatcaagtagaagatattgaatctctcaactatgcgcgtgaggctcttgaaaaaggtgttccgattgaagaaatcatggacagtatccgtgttattggacgtgacaatgcccgtacccctatgcaatgggacgagagcaaaaacgctggtttctcaacaggtcaaccttggttggcggttaatccaaattacgagatgatcaacgtccaagaagcgctggcaaatccagattctattttctatacctatcagaaactggtccaaattcgcaaggagaatagctggctaattcgagctgactttgaattgcttgatacggctgataaggtctttgcttatatacgtaaggatggcgaccgtcgcttcctagttgtggctaacttgtccaatgaagagcaagacttgacagtagaaggaaacgtcaaatctgtcttgattgaaaacaccctagctcaagaagtctttgaaaaacaaatcttagttccatgggatgctttctgtgtggaattactataa

SEQ ID NO: 9322 - DNA, 1947 bp, Streptococcus pneumoniae
  CDS (1)...(1947)
atgacagaagaaatcaaaaatctgcaggcacaggattatgatgccagtcaaattcaagttttagagggcttagaggctgttcgtatgcgtccagggatgtacattggatcaacctcaaaagaaggtcttcaccatctagtctgggaaattgttgataactcaattgacgaggccttggcaggatttgccagccatattcaagtttttattgagccagatgattcgattactgttgtggatgatgggcgtggtatcccagtcgatattcaggaaaaaacaggtcgtcctgctgttgagaccgtctttacagtccttcacgctggaggaaagttcggcggtggtggatacaaggtttcaggtggtcttcacggggtggggtcgtcagttgttaatgccctttccactcaattagacgttcatgtccataaaaacggtaagattcattaccaagaataccgtcgtggtcatgttgtcgcagatcttgaaatagttggagatacggataaaacaggaacaactgttcacttcacaccggacccaaaaatcttcactgaaacaacaatctttgattttgataaattaaataaacggattcaagagttggcctttctaaatcgcggtcttcaaatttctatcactgataagcgccaaggtttggaacaaaccaagcattatcattatgaaggtgggattgctagttacgttgaatatatcaacgagaacaaggatgtaatctttgatacaccaatctatacagacggtgagatggatgatatcacagttgaggtagccatgcagtacacaacgggttaccatgaaaatgtcatgagtttcgccaataatattcatacacatgaaggtggaacgcatgaacaaggtttccgtacagccttgacacgtgttatcaacgattatgctcgtaagaataagttactgaaagacaatgaagacaatctaacaggggaagatgttcgcgaaggcttaactgcagttatctcagttaaacacccaaatccacagtttgaaggacaaacgaagaccaaattgggaaatagcgaagtggtcaagattaccaatcgcctcttcagtgaagccttctccgatttcctcatggaaaatccacagattgccaaacgtatcgtagaaaaaggaattttggctgccaaggctcgtgtggctgccaagcgtgcgcgtgaagtcacacgtaaaaaatctggtttggaaatttccaaccttccagggaaactagcagactgttcttctaataaccctgctgaaacagaactcttcatcgtcgaaggagactcagctggtggatcagccaaatctggtcgtaaccgtgagtttcaggctatccttccaattcgcggtaagattttgaacgttgaaaaagcaagtatggataagattctagctaacgaagaaattcgtagtcttttcacagccatgggaacaggatttggcgcagaatttgatgtttcgaaagcccgttaccaaaaactcgttttgatgaccgatgccgatgtcgatggagcccacattcgtacccttcttttaaccttgatttatcgttatatgaaaccaatcctagaagctggctatgtttatattgcccaaccaccaatctatggtgtcaaggttggaagcgagattaaagaatatatccagccgggtgcagatcaagaaatcaaactccaagaagctttagcccgttatagtgaaggtcgtaccaaaccgactattcagcgttataaggggctaggtgaaatggacgatcatcagctgtgggaaacaaccatggatcccgaacatcgcttgatggctagagtttctgtagatgatgctgcagaagcagataaaatctttgatatgttgatgggggatcgagtagagcctcgtcgtgagtttatcgaagaaaatgctgtctatagtacacttgatgtctaa

SEQ ID NO: 9323 - DNA, 2259 bp, Streptococcus pneumoniae
  CDS (1)...(2259)
atgctttgtcaaaactgtaaaattaacgactcaacaattcatctttacaccaatctcaatggaaaacaaaaacaaattgacctctgtcaaaactgctataagattatcaaaacagatcctaacaatagcctcttcaaaggtatgacggatctgaacaatcgtgacttcgatccctttggtgatttcttcaatgatctaaacaatttcagaccttctagcaatactcctcctattcccccaacccaatcaggtggaggttacggtggaaacggcggttatggttcccaaaatcgtggatctgctcaaactccgccacctagccaagaaaaaggcctgctggaagaatttggtattaatgtaactgaaattgcccgtcgtggagacattgaccccgttattgggcgcgacgatgagattatccgtgtcatcgagattctcaatcgtagaaccaagaataatcctgtccttatcggtgaacctggtgtcggaaaaacggccgttgtcgaaggtctagctcagaaaattgtcgatggcgatgtgccacataaactccaaggtaaacaagtcatccgtctggatgtggttagcttagttcaaggaacggggattcgaggacaatttgaagaacgcatgcaaaaactcatggaagaaattcgcaaacgtgaagacatcatcctctttatcgatgaaatccatgaaattgttggtgctggttctgcgagtgatggtaatatggacgcaggaaatatcctcaagccagcccttgctcgtggagaactgcaactagtcggtgctactaccctcaatgaataccgtatcattgaaaaggatgctgccctcgagcgtcgtatgcagcctgttaaagtcgatgaaccaacggtggacgaaacaatcactattctcaaagggattcaaaagaaatacgaagattaccaccacgttcaatatacagatgctgcgattgaagcagctgcaactctttccaatcgctacatccaagatcgcttcttgcctgacaaggccattgacctcctagatgaagctggttctaagatgaacttgaccttgaattttgtggatcctaaagtaattgatcagcgcttgattgaggctgaaaatctcaagtctcaagctacacgagaagaagattttgagaaggcggcctacttccgcgaccagattgccaagtataaggaaatgcaaaagaaaaagatcacagaccaggatactcctatcatcagcgagaaaactattgagcacattatcgagcagaaaaccaatatccctgttggtgatttgaaagagaaagaacaatctcaactcatccatctagccgaagatctcaagtctcatgttattggccaagatgatgcagtcgataagattgccaaggctattcgccgtaatcgtgtcggacttggtacccctaaccgcccaatcggaagcttcctcttcgttgggccaactggtgtcggtaagacagaactttccaaacaactggctatcgaactttttggttctgctgatagtatgattcgctttgatatgagtgaatacatggaaaaacatagtgtggctaagttggtcggcgcccctccaggttatgttggctatgatgaggctggtcaattaactgaaaaagttcgccacaatccatattctctcatccttctcgatgaagtggaaaaagctcacccagatgttatgcacatgtttcttcaagtcttggacgatggtcgtttgacagacgggcaaggacgcaccgttagcttcaaggatgccatcattatcatgacctcaaatgcaggtacaggaaagaccgaagctagcgttggatttggtgctgctagagaaggacgtaccaattctgtcctcggtgaactcggtaacttctttagcccagagtttatgaaccgttttgatggcattatcgaatttaaggctctcagcaaggataacctccttcagattgtcgagctcatgctagcagatgttaacaagcgcctctctagtaacaacattcgtttggatgtaactgataaggtcaaggaaaagttggttgacctaggttatgatccaaaaatgggagcacgcccacttcgtcggactattcaagactatattgaggacacaatcactgactactaccttgaaaatccaagcgaaaaagatctcaaagcagttatgactagcaagggaaacattcagattaaatctgccaaaaaagctgaagttaaaagttctgaaaaagaaaaataa

SEQ ID NO: 9324 - DNA, 975 bp, Streptococcus pneumoniae
  CDS (1)...(975)
atgatgaaaatccttgagggagtgaccgatatgtcaagtaaagccaatcatgcaaagacagttatttgcggaattatcaatgtaaccccagactccttttcggacggtggtcaattttttgctcttgagcaggcactccagcaggctcgtaaattgatagcagaaggagccagtatgctcgatatcggcggagaatcgactcggccgggcagtagctatgttgagatagaagaggaaatccagcgtgttgttccagtgatcaaagcgattcgcaaggaaagtgatgtcctcatctctattgatacttggaagagccaagtagcagaggctgctttggctgctggtgccgatctagtcaatgatatcactggtcttatgggtgatgagaaaatgcctcatgtggtagctgaagcgagagcgcaagtggtcatcatgtttaatccagttatggcgcgacctcagcaccctagctcgctcatcttccctcattttggttttggtcaagcttttacagaggaagagttagctgactttgaaacattgccaatcgaagaattgatggaggctttctttgaacgagcactagcgagagcggcagaagctggtattgcaccagaaaatatcctgttggatccaggaattggctttggtctgaccaagaaagaaaatctgcttcttttacgggacctggataaactacatcagaagggctatccaatctttctcggagtgtcgcgcaagcgatttgtcatcaatatcctagaggagaatggttttgaagtcaatcctgagacagagcttggtttccgcaatcgggacacggcttcggctcatgtaaccagtatcgctgcaagacagggtgtagaagtggtgcgcgtgcatgacgtagctagtcacaggatggcagttgaaattgcctctgccattcgtctggctgatgaagcggaaaatttagatttaaaacaatataaataa

SEQ ID NO: 9325 - DNA, 2160 bp, Streptococcus pneumoniae
  CDS (1)...(2160)
atgaacaaaccaacgattctgcgcctaatcaagtatctgagcattagcttcttaagcttggttatcgcagccattgtcttaggcggaggagtttttttctactacgttagcaaggctcctagcctatccgagagtaaactagttgcaacaacttctagtaaaatctacgacaataaaaatcaactcattgctgacttgggttctgaacgccgcgtcaatgcccaagctaatgatattcccacagatttggttaaggcaatcgtttctatcgaagaccatcgcttcttcgaccacagggggattgataccatccgtatcctgggagctttcttgcgcaatctgcaaagcaattccctccaaggtggatcagctctcactcaacagttgattaagttgacttacttttcaacttcgacttccgaccagactatttctcgtaaggctcaggaagcttggttagcgattcagttagaacaaaaagcaaccaagcaagaaatcttgacctactatataaataaggtctacatgtctaatgggaactatggaatgcagacagcagctcaaaactactatggtaaagacctcaataatttaagtttacctcagttagccttgctggctggaatgcctcaggcaccaaaccaatatgacccctattcacatccagaagcagcccaagaccgccgaaacttggtcttatctgaaatgaaaaatcaaggctacatctctgctgaacagtatgagaaagcagtcaatacaccaattactgatgggctacaaagtctcaaatcagcaagtaattaccctgcttacatggataattacctcaaggaagtcatcaatcaagttgaagaagaaacaggctataacctactcacaactgggatggatgtctacacaaatgtagaccaagaagctcaaaaacatctgtgggatatttacaatacagacgaatacgttgcctatccagacgatgaattgcaagtcgcttctaccattgttgatgtttctaacggtaaagtcattgcccagctaggagcacgccatcagtcaagtaatgtttccttcggaattaaccaagcagtagaaacaaaccgcgactggggatcaactatgaaaccgatcacagactatgctcctgccttggagtacggtgtctacgagtcaactgccactatcgttcacgatgagccctataactaccctgggacaaatacccctgtttataactgggataggggctactttggcaacatcaccttgcaatacgccctgcaacaatcgcgaaacgtcccagccgtggaaactctaaacaaggtcggactcaaccgcgccaagactttcctaaatggtctcggaatcgactacccaagtattcactactcaaatgccatttcaagtaacacaaccgaatcagacaaaaaatatggagcaagtagtgaaaagatggctgctgcttacgctgcctttgcaaatggtggaacttactataaaccaatgtatatccataaagtcgtctttagtgatgggagtgaaaaagagttctctaatgtcggaactcgtgccatgaaagaaacgacagcctatatgatgaccgacatgatgaaaacagtcttgagttatggaactggacgaaatgcctatcttgcttggctccctcaggctggtaaaacaggaacctctaactatacagacgaggaaattgaaaaccacatcaagacctctcaatttgtagcacctgatgaactatttgctggctatacgcgtaaatattcaatggctgtatggacaggctattctaaccgtctgacaccacttgtaggcaatggccttacggtcgctgccaaagtttaccgctctatgatgacctacctgtctgaaggaagcaatccagaggattggaatataccagaggggctctacagaaatggagaattcgtatttaaaaatggtgctcgttctacgtggagctcacctgctccacaacaacccccatcaactgaaagttcaagctcatcatcagatagttcaacttcacagtctagctcaaccactccaagcacaaataatagtacgactaccaatcctaacaataatacgcaacaatcaaatacaacccctgatcaacaaaatcagaatcctcaaccagcacaaccataa

SEQ ID NO: 9326 - DNA, 342 bp, Streptococcus pneumoniae
  CDS (1)...(342)
atggagagagacatggcaagtattattttttcagcgaaagatatttttgaacaagagtttggacgtgaagtccgtggctataataaagtagaagttgacgagtttttagacgatgtcatcaaggactatgaaacctatgctgccttggtcaagtcacttcgtcaggaaattgcggatttgaaggaagaattaactcgtaaaccgaaaccttcaccagttcaagcagaaccccttgaagcggcaattacaagttctatgacgaattttgatattttgaaacgcctgaatagattggaaaaagaagtttttggtaaacaaattttagataactcagatttttaa

SEQ ID NO: 9327 - DNA, 1446 bp, Streptococcus pneumoniae
  CDS (1)...(1446)
atgaaacaagaggagtgtcaaatgacaaaagctaactttggtgtcgtaggtatggccgtaatgggtcgtaaccttgcccttaatattgaatcacgtggttacacagttgctatctacaaccgtagtaaagaaaaaacggaagatgtgattgcttgccatcctgaaaagaattttgtaccaagctatgacgttgaaagttttgtaaactcaatcgaaaaacctcgtcgtatcatgctgatggttcaagctggacctggtacagatgctactattcaagcccttcttccgcaccttgacaagggtgatatcttgattgacggtggaaatactttctacaaagataccatccgtcgtaatgaagaattggcaaactctggtatcaactttatcggtactggggtttctggtggtgaaaaaggtgcccttgaaggtccttctatcatgcctggtggacaaaaagaagcctacgaattggttgcggatgttcttgaagaaatctcagctaaagcaccagaagatggcaaaccatgtgtgacttacatcggtcctgatggagctggtcactatgtgaaaatggttcacaatggtattgagtacggtgatatgcaattgatcgcagaaagctatgacttgatgcaacacttgctaggcctttctgcagaagatatggctgaaatctttactgagtggaacaagggtgaattagacagctacttgattgaaatcacagctgatatcttgagccgtaaagacgatgaaggccaagatggaccaatcgtagactacatccttgatgctgcaggtaacaagggaactggtaaatggactagccaatcatctcttgaccttggtgtaccattgtcactgattactgagtcagtgtttgcacgctacatttcaacttacaaagaagaacgtgtacatgctagcaaggtgcttccaaaaccagctgccttcaactttgaaggagacaaggctgaattgattgaaaagatccgtcaagccctttacttctcaaaaatcatttcatacgcacaaggatttgctcaattgcgtgtagcctctaaagaaaacaactggaacttgccatttgcagatatcgcatctatctggcgtgatggctgtatcatccgttctcgtttcttgcaaaagattacagatgcttacaaccgcgatgcagatcttgccaaccttcttttggacgagtacttcttggatgttactgctaagtaccaacaagcagtacgtgatatcgtagctcttgcggttcaagcaggtgtgccagtgccaactttctcagcagctattacttactttgatagctaccgttcagctgaccttccagctaacttgatccaagcacaacgtgactactttggtgctcacacttaccaacgtaaagacaaagaaggaaccttccactactcttggtatgacgaaaaataa

SEQ ID NO: 9328 - DNA, 954 bp, Streptococcus pneumoniae
  CDS (1)...(954)
atggatagagagcctgtgacagtacgttcctacgcaaatattgctattatcaaatattggggaaagaaaaaagaaaaagagatggtgcctgctactagcagtatttctctaactttggaaaatatgtatacagagacgaccttgtcgcctttaccagccaatgtaacagctgacgaattttacatcaatggtcagctacaaaatgaggtcgagcatgccaagatgagtaagattattgaccgttatcgtccagctggtgagggctttgtccgtatcgatactcaaaacaatatgcctacggcagcgggcctgtcctcaagttctagtggtttgtccgccctggtcaaggcttgtaatgcttatttcaagcttggattggatagaagtcagttagcgcaggaagccaagtttgcctcaggctcttcttctcggagtttttatggaccactaggagcctgggataaggatagtggagaaatttaccctgtagagacagacttgaaactagctatgattatgttggtgctagaggacaagaaaaaaccaatctctagccgtgacgggatgaaactttgtgtggaaacctcgacgactttcgacgactgggttcgtcagtctgagaaggactatcaggatatgctgatttatctcaaggaaaatgattttgccaagattggagaattaacggagaaaaatgccctggctatgcatgctacgacaaagactgctagtccagccttttcttatctgacggatgcctcttatgaggctatggactttgttcgtcagcttcgtgagaaaggagaggcctgctactttaccatggatgctggtcccaatgttaaggtcttctgtcaggagaaagacttggagcatttgtcagaaattttcggtcagcgttatcgcttgattgtgtcaaaaacaaaggatttgagtcaagatgattgctgttaa

SEQ ID NO: 9329 - DNA, 438 bp, Streptococcus pneumoniae
  CDS (1)...(438)
atgaaacttgaaaaacatttgattaagcttaataaacaattttctaacaaggaggaagctatttgttattgtgggcaagttctttatgagggtggatatgttaatgaagactatattgaagccatgattgagcgagataaagagctatctgtttacatgggtaactttatcgccataccgcatggaacagatgcagcaaaaaatgatgtccttaagtctggtattacagtcgttcaagtccctagaggggttgattttgggaatgtatctaaccctcaagtggcaacggttctttttggtattgctggtattggtaatgaacacttagaaattattcagaaaatttctatcttctgtgcagatgtggataatgttcttaaactagcagatgctcagtcaaaagaggaagtattgcgcttatttgatgctgttgaataa

SEQ ID NO: 9330 - DNA, 615 bp, Streptococcus pneumoniae
  CDS (1)...(615)
atgaatttatttaaaaatttcttaaaagagtggggattattcctcctgattctgtcattactagctttgagccgtatctttttttggagcaatgttcgcgtagaaggacattccatggatccgaccctagcggatggtgaaatcctctttgttgttaagcacctccctattgaccgttttgatatcgtggtggcccatgaggaagatggcaataaggacatcgtcaagcgcgtgattggaatgcctggcgacaccattcgttacgaaaatgataaactctacatcaatgacaaagaaacggacgagccttatctagcagactatatcaaacgcttcaaggatgacaaactccaaagcacttactcaggcaagggctttgaaggaaataaaggaactttctttagaagtatcgctcaaaaagcccaagccttcacagttgatgtcaactacaacaccaactttagctttactgttccagaaggagaataccttctcctcggagatgaccgcttggtttcgagcgacagccgccacgtaggtaccttcaaagcaaaagatatcacaggggaagctaaattccgcttctggccaatcacccgtatcggaacattttaa

SEQ ID NO: 9331 - DNA, 1323 bp, Streptococcus pneumoniae
  CDS (1)...(1323)
atgttagaattgcttaaatcaatcgatgcttttacttggggaccgcccctcttgattttattggtcggaacaggggtttacctaaccatgcggctaggactcttgcaggttttgcgtctgcccaaggcctttcagcttatttttatccaggataagggacatggtgatgtatccagttttgcagctctgtgtacagccttggcatcaactgttggaacaggaaatatcataggagttgcgacggcgatcaaggttggtggaccaggagctctattttggatgtggatggcggctttctttggaatggctaccaagtatgcggaaggactcttggccatcaaataccgcaccaaggacgaccatggtgcagtagcgggaggtcccatgcactatatccttctagggatgggagaaaagtggcgaccacttgctgatttgtttgcagtagcaggagtattggttgctctcttgggaatcggaaccttcacccaagtcaactcgattacagaatctatccaaaatacaacgacgatttcgccagccatcacagctctcgtcttgactgtctttgtagcgattgcagtctttggtggactcaagtctatttctaaggtttcaactactgttgttccttttatggccatcatttatatcttaggaactcttacagttattttctttaatatcggaaaaatccctggcacaatcgctttaggctttacctcagcttttagtccccttgctgcggtaggtggatttgctggtgctagcgttcggatggctattcaaaatggtgtggcgcgtggtgtgttctcaaacgaatctggtctgggttctgctcctattgcagctgcagctgccaagacaaatgaaccagtagagcaaggtttgatttccatgacaggaacctttattgataccctcatcatttgtactctaactggtttgaccatcttggtaactggagtttggagtggtgacttgaatggggttgccttgactcagtcagctttctcaacagtcttttcacactttgggcctgccctcttgaccatcttccttgtactttttgcctttacaacgattctaggttggaggtattacggagaacgctgttttgagttcctctttggggttcgctttatctggctctaccgtgtggtttttgtgctcatggtcttgttaggaggatttatcgagttgaatatggtctggattatcgcagatatcgttaacgccttgatggctctgccaaacttgattgccctcttggtcatgtcgccagtcgttattgctgaaactaaaaagtattttgacaaataa

SEQ ID NO: 9332 - DNA, 1692 bp, Streptococcus pneumoniae
  CDS (1)...(1692)
atgaatacaaaagaattgattgctagcgaattatctagcatcattgatagcctggaccaagaggctattttaaagttactggaaacccctaaaaactcagaaatgggagacattgctttccctgctttttctcttgcaaaagtcgaacgtaaagcaccacaaatgattgcggctgaactggctgaaaaaatgaacagccaagcctttgaaaaagttgtcgcaacaggaccttacgttaactttttccttgataaatctgccatttctgctcaagtattgcaagctgttaccactgaaaaagaacactatgctgaccaaaatattggcaaacaagaaaatgttgttatcgacatgtctagtccgaatatcgctaaaccattttctattggccacctgcgttcaactgttatcggagatagcttgtcacatattttccaaaaaatcggttatcaaacggtcaaggtcaaccatttgggagactggggtaaacaatttgggatgttgattgttgcctacaaaaaatggggcgacgaagaagctgtaaaagctcatccaatcgatgaactccttaaactctatgtccgcatcaacgctgaagctgaaaatgaccctagcttggatgaagaagcgcgcgaatggttccgtaaacttgaaaatggagatgaggaagctctcgctctttggcaatggttccgcgatgaaagtttagtggaatttaaccgcctttacaatgaattgaaggttgaatttgacagctataacggagaagccttctacaatgataagatggatgcagttgtagacattctttctgaaaaaggactacttcttgaatcagaaggtgcccaagttgtgaatcttgagaaatatggaattgaacatccagccctcatcaagaagtctgatggtgcaactctctatatcacacgtgacttggctgcagccctctaccgtaaaaatgaataccaatttgctaaatctatctacgtcgttggtcaagagcaatctgcccactttaaacaactcaaagctgtcttgcaagagatgggctacgattggagtgacgacattacccacgttccttttggtctggttacaaaagaagggaagaagctctctactcgtaaagggaatgtcatcttgctagagcctactgttgcagaggctgttagccgtgccaaggtccaaatcgaggctaaaaatcctgaactagaaaacaaagaccaagtagcacatgctgttggggttggagccattaaattctatgacctcaaaactgaccgtacaaatggatacgacttcgacctagaagctatggtatccttcgagggtgaaactggaccttacgttcaatatgcctacgctcgtatccaatctatcttacgcaaagccgatttcaaaccagaaacagctggcaactatagcttgaatgatactgaaagctgggaaatcattaaactcattcaagacttcccacgtattatcaaccgtgcggcagataactttgaaccttctatcattgctaaatttgcaattagcctggctcaatcctttaacaaatactatgcacatacacgtatcttggatgaaagcccagaacgcgacagccgtctagccctcagctacgcaaccgcagtcgttctcaaagaagcccttcgcttgcttggagtagaagcgccagagaagatgtaa

SEQ ID NO: 9333 - DNA, 1509 bp, Streptococcus pneumoniae
  CDS (1)...(1509)
atgtcacaagaaaaatacatcatggctattgaccagggaactacaagttctcgtgccatcattttcaacaaaaaaggggaaaaggttagctcgagtcaaaaagagtttacccagattttccctcaggcaggttgggttgagcacaatgccaatgaaatttggaactctgttcagtcagttattgcgggtgctttcattgaaagtggtgtcaagccaaatcaaatcgaggcaatcgggattaccaaccaacgtgaaacaacggttgtctgggataagaaaacaggacttcctatctacaatgctatcgtttggcagtcacgccagacagcacctttggctgagcaactaaaaagccaaggttatgtggaaaaattccatgaaaagactggtttgattattgatgcttacttctctgctaccaaggttcgttggattttggatcatgtagaaggtgctcaagagcgagcagaaaaaggggaattgctctttggtactatcgatacttggttggtttggaaattgactgacggtgcggctcacgtgactgactactcaaatgcagctcgtaccatgctttataacattaaagaactcaaatgggatgatgagattttggaaatccttaacattccgaaggctatacttccagaagttcgttctaactccgaaatctacggcaagacagctccattccatttctacggtggagaggtgccaatctcaggtatggctggggaccaacaagcagccctctttggacagttggcttttgagccaggtatggttaagaatacttatggaacaggctctttcatcatcatgaatactggggaagagatgcagttgtctgaaaacaacctcttgacaaccattggttacggaatcaacggtaaggtttattatgccttggaaggttctatcttcatcgcaggaagtgctattcagtggcttcgtgacggtcttcgcatggttgaaaattcaccagaatctgaaaaatacgctcgtgattctcacaacaacgatgaagtttatgtcgttccagcctttacaggtctaggcgctccatactggaaccaaaatgctcgtggttccgtctttggtttgactcgtggaacaagcaaagaagactttatcaaggcgactttgcaatctattgcttatcaagtgcgtgacatcatcgacactatgcaagtggatactcagactgccattcaagtactgaaggtggatggtggtgcagccatgaacaacttcctcatgcagttccaggcggatattttaggcattgacattgcacgtgctaaaaacttggaaacaacagctctaggagcggccttcctagcaggtttatcagtaggatactggaaagacttggacgagttgaaactcttgaacgagacaggagaactctttgagccatctatgaacgaatctcgcaaggaacaactctacaagggctggaagaaggctgtgaaagcaactcaagtctttgcggaagtagacgactaa

SEQ ID NO: 9334 - DNA, 873 bp, Streptococcus pneumoniae
  CDS (1)...(873)
atggataaaattattaaaactatatcagaaagcggagcctttcgtgcttttgtccttgatagcactgaaaccgtccgcactgctcaagaaaaacatcaaacccaagctagctcaactgtagcgcttggtcgaactcttatcgccagccagattctcgcagccaatgaaaaaggaaataccaaacttacagttaaggtgttgggatctagctctctaggtgctattatcaccgtcgctgataccaaggggaacgtcaaaggctatgttcaaaatcctggtgttgacatcaaaaagactgcgactggtgaagtcctagtcggaccttttgttggaaatggtcaattcctcgttatcacagactacggtactggaaatccttacaactctataactcccctcatctctggagaaatcggtgaagaccttgccttttaccttactgaaagccaacaaacgccttcagcggtcggcctcaatgtccttttggacgaggaagacaaggtcaaggttgcaggtggtttcctagttcaagtcttgccaggagccaagaaagaagagattgctcgctttgaaaaacgcatccaagaaatgccagctatctctactcttctcgaaagcgacgaccatatcgaagccctcctcaaggctatctacggggacgaagcctacaagcgtctttctgaagaagaaatccgtttccaatgtgactgtagccatgaacgctttatgaacgctcttgccagccttccaagctcagacttacaggaaatgaaagaggaagaccacggggcagaaatcacttgtcaattctgccaaactacttacaactttgatgaaaaggacctggaggaactcattcgtgacaaatcttaa

SEQ ID NO: 9335 - DNA, 1008 bp, Streptococcus pneumoniae
  CDS (1)...(1008)
atgaaaaggacctggaggaactcattcgtgacaaatcttaatacaccttttatgattggcaatattgagattcccaatcgtaccgttttagcgcctatggctggcgtgaccaactcagcctttcgtaccatcgcaaaagagctcggagctggactcgttgtaatggaaatggtctctgacaagggaatccaatacaacaacgaaaaaaccctgcatatgcttcatatcgatgagggcgaaaaccctgtctctatccaactttttggtagcgatgaagacagcctagcacgcgcagcagaattcatccaagaaaacaccaagaccgatatcgtcgatatcaacatgggctgccctgtcaacaaaatcgtgaagaacgaagctggagctatgtggctcaaggatcctgacaagatctactctatcatcaacaaggtccagtctgtccttgatatcccacttactgtcaaaatgcgtaccggctgggcggacccatctctggcagtagaaaatgccctcgctgctgaggctgcaggtgtttctgccctcgccatgcatggccgtacccgtgaacaaatgtatactggccacgcagaccttgagaccctttacaaggttgcccaagctctaaccaagattccattcatcgccaacggtgatatccgtactgtccaagaagccaagcaacgcatcgaagaagttggtgctgacgcagtcatgattggccgagctgccatgggaaatccttacctcttcaaccaaatcaaccattactttgaaacaggagaaatcctacctgatttgacctttgaagacaagatgaagatcgcctacgaacacttgaaacgattgattaacctcaaaggagaaaacgtcgcagttcgtgaattccgcggcctcgctcctcactatctccgtggaacatctggcgctgccaaactccgtggagccatttcgcaagctagcaccctagcagagattgaagccctcttgcaattggagaaggcttaa

SEQ ID NO: 9336 - DNA, 1353 bp, Streptococcus pneumoniae
  CDS (1)...(1353)
atggcagaagtagaagagttacgagtacaacctcaagatatcttagctgagcaatccgttttaggggctatctttattgatgagagtaaacttgtttttgtgcgagaatacattgagtctcgggacttttttaagtatgcccatcgtttgattttccaagccatggtcgatttatccgatcgtggtgatgccatagatgcaacaacggttcgtactatccttgataatcaaggtgatttacagaatattggtggcttgtcttacttggttgagattgttaattctgtgccaacttctgctaatgcggagtattatgctaagattgttgcagaaaaagcaatgctacgtcgtttaattgccaagttgacagagtctgtcaaccaagcttacgaagcgtcacaaccagctgatgaaattattgctcaggcagaaaaagggttgattgatgtcagtgaaaatgcaaatcgaagcgggtttaagaacattcgagatgtgttgaatctcaactttggaaatctggaagctcgctcgcaacaaacgaccgatattacaggtattgcgacaggttatcgtgatttggatcatatgacaacaggacttcatgaggaggagttgattatcttagcagctcgtccagcagttggtaagacagcatttgccttgaatatcgctcagaatattgggactaagttggacaaaacggttgctattttttcactcgaaatgggtgcggaaagcttggtagaccgtatgttagctgcagaaggcttggtggagtcacattctatccgtacagggcaattgacagatgaggagtggcaaaaatatactattgctcagggtaatctagctaacgccagtatctatatcgatgatacgccaggtattcggattacagagattcgttctcgttctcgtaaattggctcaagaaactggaaatcttggtttgattttgatagactatttgcaacttatcacgggaactggtcgagaaaatcgtcaacaagaagtttctgaaatttctcgtcagttgaaaatactagccaaggaattgaaggttccagtaatcgctctgagtcagctttctcgtggtgtagaacaacgtcaggacaagagaccggtcttgtctgatattcgtgaatctgggtctattgagcaggacgctgatatcgtagcttttctctatcgcgatgactactatgaacgtggtggtgaagaagaggagggtatcccaaataataaggtggaagttattatcgagaaaaaccgtagtggagctcgtggaacagtggaattgattttccaaaaagaatacaataaattttcaagtatctcaaagagggaggcataa

SEQ ID NO: 9337 - DNA, 453 bp, Streptococcus pneumoniae
  CDS (1)...(453)
atgaaagtaatctttttagcagatgttaaaggaaaaggtaaaaaaggcgaaattaaggaagtaccaacagggtatgcgcaaaactttcttatcaaaaagaatctagccaaagaagcgactgctcaagctgtaggtgaacttcgtggtaaacaaaaatcggaagaaaaagctcacgctgagatgattgcagaaggaaaagcaattaaagcacaacttgaagcagaagaaactgttgtagaatttgttgaaaaagttggtccagatggtcgtacctttggttctattaccaataagaagattgcagaagaattgcaaaagcaatttggaattaagattgataaacgtcatattcaagtacaagctccgattcgagcggttggtttgattgatgtgccagtgaaaatctatcaagatatcacaagtgtaatcaatcttcgtgtgaaagaaggataa

SEQ ID NO: 9338 - DNA, 1974 bp, Streptococcus pneumoniae
  CDS (1)...(1974)
atgaaaaaattttatgtaagtccaatttttcctattctagtaggattgattgcgtttggagtcttatccactttcattatttttgttaataataatctgttgacggttttaattttgtttctttttgtaggaggctatgtttttttatttaagaaactgagagtgcattatacaaggagtgatgtagaacagatacagtatgtaaaccaccaagcggaagaaagtttgacagctctattggaacagatgcctgtaggtgttatgaaattgaatttatcttctggagaggttgagtggtttaatccctatgctgaattgattttgaccaaggaagatggtgattttgatttagaagctgttcaaacgattatcaaggcttcagtaggaaatccgtctacttatgccaagcttggtgagaagcgttatgctgttcatatggatgcttcttccggtgttttgtattttgtagatgtatccagggaacaagccataacagatgaattggtaacaagtcgaccagtgattgggattgtctctgtggataattatgatgatttggaggatgcaacttctgagtcagatattagtcaaatcaatagttttgtagctaattttatatcagagttttcagaaaaatacatgatgttttctcgtcgggtaagtatggatcgattttatctatttactgactacacggtgcttgagggcttgatgaatgataaattttctgttattgatgctttcagagaagagtcgaaacagagacagttgcccttgactttaagtatgggattttcttatggcgatggaaatcatgatgagatagggaaagttgctttgctcaatttgaacttggctgaagtacgtggtggcgaccaggtggttgttaaggaaaacgacgaaacgaaaaatccagtttattttggtggtgggtctgctgcttcaatcaagcgtacacggactcgtacgcgcgctatgatgacagctatttcagataagattcggagtgtagatcaggtttttgtagtcggtcacaaaaatttagacatggatgctttgggctctgctgtaggtatgcagttgttcgccagcaatgtgattgaaaatagctatgctctttatgatgaagaacaaatgtctccagatattgaacgagctgtttcattcatagaaaaagaaggagttacgaagttgttgtctgttaaggatgcaatggggatggtgaccaatcgttctttgttgattcttgtagaccattcaaagacagccttaacattatcaaaagaattttatgatttatttacccaaaccattgttattgaccaccatagaagggatcaggattttccagataatgcagtcattacttatatcgaaagtggtgcaagtagtgccagtgagttggtaacggaattgattcagttccagaattctaagaaaaatcgtttgagtcgtatgcaagcaagtgttttgatggctggtatgatgttggatactaaaaatttcacctcgcgagtaactagtcggacatttgatgttgctagctatctcagaacgcgcggaagtgatagtattgctatccaggaaattgctgcgacagattttgaagaatatcgtgaggttaatgaacttattttacaggggtgtaaattaggttcagatgtactaatagcagaggctaaggacacgaaatgctatgatacagttgttattagtaaggcagcagatgccatgttagccatgtcaggtattgaagcgagttttgttcttgcgaagaatacacaaggatttatctctatctcagctcgaagtcgtagtaaactgaatgtacaacggattatggaagagttaggcggtggaggccactttaatttggcagcagctcaaattaaagatgtaaccttgtcagaagcaggtgaaaaactgacagaaattgtattaaatgaaataaaggaaaaggagaaagaagaatga

SEQ ID NO: 9339 - DNA, 1041 bp, Streptococcus pneumoniae
  CDS (1)...(1041)
atggcagaaattacagctaaacttgtaaaagagttgcgtgaaaaatctggtgccggtgttatggacgctaaaaaagcgcttgtagaaacagacggtgacatcgaaaaagcgattgaattgcttcgtgaaaaaggtatggctaaggcagctaagaaagctgaccgtgttgctgcagaaggtttgactggtgtttatgttaacggtaatgttgcagcagttattgaagtaaacgctgaaactgacttcgttgcaaaaaacgctcaattcgttgaattggtaaatactacagctaaagtcattgctgaaggaaaacctgctaataatgaagaagctcttgctttgataatgccttcaggtgaaactcttgaagctgcatacgtatctgcaacagcaactatcggagagaaaatctcattccgtcgctttgcattgattgaaaaaacagacgcacaacactttggagcataccaacataacggtggacgtatcggtgttatttcagttgttgaaggtggagacgaagcacttgctaaacaattgtcaatgcacatcgcagcgatgaaaccaacagttctttcttacaaagaattggatgagcaattcgttaaagatgagttggcacaattgaatcacgttatcgaccaagacaacgaaagccgtgcaatggttaataaaccagctcttccacacttgaagtatggatcaaaagctcaattaactgatgatgttattgctcaagctgaagctgacatcaaagctgaattggctgcagaaggcaaaccagaaaaaatctgggacaaaattatcccaggtaaaatggaccgcttcatgcttgataatactaaagttgaccaagcttacacacttcttgcacaagtttacatcatggatgacagcaagacagttgaagcataccttgaatcagttaacgcttcggtagttgagtttgctcgctttgaagttggtgaaggtatcgagaaagctgcaaacgacttcgaagctgaagttgcagctacaatggcagcagccttgaataactaa

SEQ ID NO: 9340 - DNA, 861 bp, Streptococcus pneumoniae
  CDS (1)...(861)
atgaattgtgaagcagttgcccttgggtcgttttgcgagttgaagtcaagaagaggaaaaaaacaaaaaggagaaatactcatggcagtaatttcaatgaaacaacttcttgaggctggtgtacactttggtcaccaaactcgtcgctggaatcctaagatggctaagtacatctttactgaacgtaacggaatccacgttatcgacttgcaacaaactgtaaaatacgctgaccaagcatacgacttcatgcgtgatgcagcagctaacgatgcagttgtattgttcgttggtactaagaaacaagcagctgatgcagttgctgaagaagcagtacgttcaggtcaatacttcatcaaccaccgttggttgggtggaactcttacaaactggggaacaatccaaaaacgtatcgctcgtttgaaagaaattaaacgtatggaagaagatggaactttcgaagttcttcctaagaaagaagttgcacttcttaacaaacaacgtgcgcgtcttgaaaaattcttgggtggtatcgaagatatgcctcgtatcccagatgtgatgtacgtagttgacccacataaagagcaaatcgctgttaaagaagctaaaaaattgggaatcccagttgtagcgatggttgacaccaatactgatccagatgatatcgatgtaatcatcccagctaacgatgacgctatccgtgctgttaaattgatcacagctaaattggctgacgctattatcgaaggacgtcaaggtgaggatgcagtagcagttgaagcagaatttgcagcttcagaaactcaagcagattcaattgaagaaatcgttgaagttgtagaaggtgacaacaaatag

SEQ ID NO: 9341 - DNA, 795 bp, Streptococcus pneumoniae
  CDS (1)...(795)
atggatagtatgattttggggcgttatatcccaggggattcgattgttcaccgattggatccacgtagcaaattgcttgctatgatgctactgattttgattgtgttttgggctaataaccccttgacgaatctgattctttttatagcgacagggatatttattgccttgtcaggagtatctctttcattttttattcagggcttgaagtctatgtttttcttgattgccttcacaactatttttcaactatttttcatttctaatgggaatgttttatttgagttttcgtttgtgagaatcacggattatgctttgcaacaagctgggattattttttgtcgctttgtattgattattttcttttcaactttgttaaccttaacaaccatgcctttaagtttggcatcagctgtcgaagctttattagcacctttaaagcgtgtgaaagttccagttcatgaaattggattgatgctgtctatgagtttgcgttttgtcccaaccttgatggatgatacgactcggattatgaatgcacagaaagctcgtggagtggattttggagaaggaagcatcgttcaaaaagtaaaggcgatgattcccattttgattcctctttttgcgacaagtttaaaacgtgcagattccttggctatcgctatggaagcgcgtggctatcagggtggaaaaggcagaagtcaataccgacaattgaaatggactctaaaggatacgctgaccattcttgttattctcgtacttggttgttgtttatttttcttaaaatcttag

SEQ ID NO: 9342 - DNA, 840 bp, Streptococcus pneumoniae
  CDS (1)...(840)
atgggaattgctctagaaaatgtgaattttatatatcaagaaggtactcccttagcttcagcagctttgtcggatgtttctttgacgattgaagatggctcttatacagctttaattgggcacacaggtagtggtaaatcaactattttacaactcttaaatggtttattggtgccaagtcaagggagtgtgagggtttttgataccttaatcacctcgacttctaaaaataaagatattcgtcaaattagaaaacaggttggcttggtatttcagtttgctgaaaatcagatttttgaagaaacggttttgaaggacgttgcttttggaccgcaaaattttggagtttctgaagaagatgctgtgaagactgcgcgtgagaaactggctctggttggaattgatgaatcactttttgatcgtagtccgtttgagctgtcagggggacaaatgagacgtgttgccattgcaggcatacttgccatggagccatctatattagtcttagatgagccaacagctggtctagatcctctagggagaaaagagttgatgaccctgttcaaaaaactccaccagtcagggatgaccatcgtcttggtaacgcatttgatggatgatgttgctgaatatgctaatcaagtctatgtaatggaaaagggacgtttagtaaaggggggcaaaccaagtgatgtctttcaagacgttgtttttatggaagaagttcagttgggagtacctaaaattacggccttttgtaaacgattggctgatagaggcgtgtcatttaaacgattaccgattaagatagaggagttcaaggagtcgctaaatggatag

SEQ ID NO: 9343 - DNA, 828 bp, Streptococcus pneumoniae
  CDS (1)...(828)
atgaaatcaataattgatgtaaaaaatctttcttttcgctataaagaaaatcagaactactacgatgtgaaggatattacgtttcacgtgaaacgtggagaatggctttcgattgtagggcataatggtagtggtaaatcaacgacggttcgattaattgatggcttactggaagcagaatccggagagattgtaattgatggccaacgtttgactgaggaaaatgtttggaatatacgtcgtcaaatcggtatggtttttcaaaatccagacaatcaatttgttggagcgactgttgaagatgatgttgcttttggtttggaaaatcagggactttctcgtcaagaaatgaaaaagagagtggaagaagctctggctttagttggcatgttggactttaaaaagagagagccagcgcgtctatcaggtggccaaaagcaacgtgtggccattgcaggtgttgtagccctaagaccagctattttaatcttagatgaaacaacgagtatgttggatcctgaggggcgtaaagaacttattgggacagtaaaaggaattcgaaaagactatgatatgacggacatttctattacccatgatttggaagaagtcgccatgagtgatcgcgtattggtcatgaaaaaaggggaaattgaatcaactagtagtccaagggagcttttctctcgaaatgatttagatcaaattggattagacgatccttttgctaatcaattaaaaaaatctttgagccagaatggctatgatttacctgaaaattatttgacagaaagtgagctagaggataagctatgggaattgctctag

SEQ ID NO: 9344 - DNA, 546 bp, Streptococcus pneumoniae
  CDS (1)...(546)
atgaaaaaagaacaaattcccaatctcttaacaataggtcgaattctctttatacctatttttatctttattttaacgataggaaattcgatagagagtcatatagttgcagctattatctttgctgttgccagtattaccgactatttagatggatatttagctcgtaaatggaatgtggtcagtaattttggtaaatttgcagatcctatggcggataagttactagttatgtcggcttttattatgttgattgagttaggtatggctccggcttggattgttgcagtgattatctgtcgtgagttagctgtgacaggtttaaggcttttattggttgaaactggtggaacaattttagcagcagcaatgcctggaaaaattaaaacttttagtcagatgtttgctattattttcttgctattacattggactttgcttggtcaagttctactttatgtagccttatttttcactatctactctggctatgactatttcaagggtagtgcctatgtatttaaagggacatttggttcgaaatga

SEQ ID NO: 9345 - DNA, 1284 bp, Streptococcus pneumoniae
  CDS (1)...(1284)
atgacaaaggttgtttttgaagaaaaatactatccagctgtaaaagaaaaggtttatcgaactcgtttggccaacggattgacagttgctcttttgcctaaaaaggaatttaaagaggtttacgggagtgtcactgtacagtttggttcggtagatacgtttgtcacagaagttgacggatatgtaaaacaatatcctggaggaattgctcattttcttgaacataaattatttgagagagaagattctagtgatttgatgtcggcttttacgagtctaggtgcagatagtaatgcctttacaagctttacaaaaacaaactatcttttttcagcaacggattattttttagaaaatttagatttacttgatgaattggtaacatcagcacactttactgaagcttccattctgacagagcaggatattattcagcaagaacgagaaatgtaccaagatgatccagattcgtgtttattcttttcaactttagcgaatttgtatcctggtacacctttagcaactgatatagttggaagtgaggagtccatttcccaaatcaatctaactaatttgcaagaaaattttacaaagttttacaaacctgtaaacatgtctctgtttttagttggtaattttgatgtggagcgagtacaggactattttgaaagcaaagaactgaaagattcagattttcaggaagtagcaagagaaaagttgtttttacagcctgtaaagccaacagatagtatgagaatggaagtatcttctcccaaactagcgattggagttagaggtaagcgagaagtttctgaagcggattgctatcgacatcatattttattaaaattattgtttgcaatgatgtttggttggacttcggatcgttttcaaaaatgttatgaatcaggtaaaattgatgcgtccttatctctggaagttgaaataacaagtcgctttcattttgtcatgttgacaatagatacgaaagagccagttgctttgtctcatcaatttaggaaggctattcgtaattttacaaaggatttagatattacagaggaacatttagatattatcaaaagagagatgtttggcgaatttttcagtagcatgaactctcttgaatttattgcaacgcaatatgatgcttttgaaaatggtgagacaatttttgatttgccgaaaattttacaggaaattactttagaggatgtccttgatgctggacatcatttaatagatgatggtgacatagttgattttacaatattcccatcgtag

SEQ ID NO: 9346 - DNA, 1026 bp, Streptococcus pneumoniae
  CDS (1)...(1026)
atgactaaacccattattttaacaggagaccgtccaacaggaaaattgcatattggacattatgttggaagtctcaaaaatcgagtattattacaggaagaggataagtatgatatgtttgtgttcttggctgaccaacaagccttgacagatcatgccaaagatcctcaaaccattgtagagtctatcggaaatgtggctttggattatcttgcagttggattggatccaaataagtcaactatttttattcaaagccagattccagagttggctgagttgtctatgtattatatgaatctagtttcgttagcacgtttggagcgaaatccaacagtcaagacagagatttctcagaaaggatttggagaaagcattccgacaggattcttggtctatccaatcgctcaagcagctgatatcacagctttcaaggctaattatgttcctgttgggacagatcagaaaccaatgattgagcaaactcgtgaaattgttcgttcttttaacaatgcatataactgtgatgtcttggtagagccggaaggtatttatccagaaaatgagagagcagggcgtttgcctggtttagatggaaatgctaaaatgtctaaatcactaaataatggtatttatttagctgatgatgcggatactttgcgtaaaaaagtaatgagtatgtatacagatccagatcatatccgcgttgaggatccaggtaagattgagggaaatatggttttccattatctagatgtttttggtcgtccagaagatgctcaagaaattgctgatatgaaagaacgttatcaacgaggtggtcttggtgatgtgaagaccaagcgttatctacttgaaatattagaacgtgaactgggtcctattcgtgagcgccgtattgaatttgctaaggatatgggagaagtttataatatgattcaaaaaggtagtgaaagagcgcgtgaagttgcgggtcaaaccctatctgaggtaaaaggggcaatgggacttcattactttaactaa

SEQ ID NO: 9347 - DNA, 1365 bp, Streptococcus pneumoniae
  CDS (1)...(1365)
atgggaaatgaaaaactttatagcatcatgaaagagaaagatgctatctacatgaaggaagatttctcagacgaggacggggttcgtgctgccgaactcgaaggagagtttgccgaacttggaggttgggaagcagagagtgaagcctctcaactacttcaaaacctaaacattccagaagaattacactaccaaaacatgagcgaattggccaacggtgaaaaagtaaaggttctcctcgccaaagcactttttggtaaaccagatgttcttctcttggacgagcctactaacggtttggatatccaatcgattacttggttagaagacttcttgattgactttgataacacagttatcgtagtatcccacgaccgtcacttcttaaacaaagtttgtactcacatggccgaccttgactttggaaaaatcaaactctatgtcggaaactacgacttctggaaggaatcttctgagcttgctgctaaattgctagcagaccgtaatgctaaagcagaagaaaaaattaaacaattgcaagaattcgttgctcgtttctctgccaatgcttctaagtcaaggcaggcaacatcacgtaagaaaatgcttgataagattgagctagaagagattgtaccatctagtcgtaaatatccatttatcaactttaaagcggaacgtgagattggtaatgatctcttgacagtagaaaatctaactgtaaagattgatggtgaaactatcttggataatattagtttcatcttgcgtccagatgataagacagcacttattggacaaaatgatattcaaacgactgcattaattcgtgcaatcatgggagatattgactatgaaggaactgtcaagtggggagttacaactagtcaatcttacctaccaaaagataactcagctgattttgcaggaggagaatcaattcttgactggttgcgtcaattcgcaagtaaagaagaagatgacaatactttcctacgtggcttcctcggccgtatgctcttctctggagatgaagttaacaaacctgtaaatgtcttgtcagggggagaaaaagttcgtgtcatgctttcaaaactcatgctcttaaaatcaaatgtccttgtacttgatgatccaacaaatcacttggacttggaatctatctcaagcttgaatgatggattgaaaaactttaaagaatcaatcatctttgctagccatgaccacgaatttattcaaactttggctaaccatatcattgtcttatctaaaaatggcgtcattgaccgtatcgatgaaacctacgatgaattcctagaaaatgcagaagtacaagcaaaagttaaagaactttggaaagactaa

SEQ ID NO: 9348 - DNA, 1137 bp, Streptococcus pneumoniae
  CDS (1)...(1137)
atgattcatttttcaattaataaaaatttatttctacaagcattaaatattactaagagagctattagttctaaaaatgccattcctattttatcaactgtcaaaattgacgtgaccaacgaaggtgttactttaattggttcaaatggtcaaatttcaattgaaaattttatttctcaaaaaaatgaagatgctggtttgttaattacttctttaggttcgatccttcttgaagcttctttctttatcaatgtagtatctagtttacctgatgtaactcttgattttaaagaaattgaacaaaatcaaattgttttaaccagtggcaaatcagaaattaccctaaaaggaaaagatagcgaacaatatccacgaatccaagaaatttcagcaagcactcctttaatacttgaaacaaaattactcaagaaaattattaatgaaacagcctttgctgcaagtacacaagagagtcgtccgattttaacaggtgtccacttcgtattgagtcaacacaaagagttaaaaacagttgcaacagactctcatcgcctaagccagaaaaaattaactcttgaaaaaaatagtgatgattttgatgtcgtaattcctagccgttctctacgcgaattttcagcggtatttacagatgatatcgaaactgtagagattttctttgccaataaccaaatcctctttagaagcgaaaatattagcttctatactcgtctcctagaaggaaactatcctgatacagatcgcttgattccaacagactttaacactactattacttttaatgtggtaaacttacgccagtcaatggagcgtgcccgtcttttatcaagtgcgactcaaaatggtactgtgaaacttgaaattaaggatggggttgttagcgcccatgttcactctccagaagttggtaaagtaaacgaagaaatcgatactgatcaggttactggtgaagatttgaccattagtttcaacccaacttacttgattgattctcttaaagctttaaatagcgaaaaggtgaccattagctttatctcagctgttcgtccatttactcttgtgccagcagatactgacgaagacttcatgcagctcattacaccagttcgtacaaattaa

SEQ ID NO: 9349 - DNA, 1125 bp, Streptococcus pneumoniae
  CDS (1)...(1125)
atgagaaatatggctttgacagcaggtatcgttggtttgccaaacgttggtaaatcaacactatttaatgcaattacaaaagcaggagcagaggcagcaaactacccatttgcgactattgatccaaatgttggaatggtggaagttccagatgaacgcctacaaaaactaactgaaatgataactcctaaaaagacagttcccacaacatttgaatttacagatattgcagggattgtaaaaggagcttcaaaaggagaagggctagggaataaattcttggccaatattcgtgaagtagatgcgattgttcacgtagttcgtgcttttgatgatgaaaatgtaatgcgcgagcaaggacgtgaagacgcctttgtagatccacttgcagatattgatacaattaatctggaattaattcttgctgacttagaatcagtgaacaaacgatatgcgcgtgtagaaaagatggcacgtacgcaaaaagataaagaatcagtagcagaattcaatgttcttcaaaagattaaaccagtcctagaagacgggaaatcagctcgtaccattgaatttacagatgaggaacaaaaggttgtcaaaggtcttttccttttgacgactaaaccagttctttatgtagctaatgtggacgaggatgtggtttcagaacctgactctatcgactatgtcaaacaaattcgtgaatttgcagcgacagaaaatgctgaagtagtcgttatttctgcgcgtgctgaggaagaaatttctgaattggatgatgaagataaaaaagagtttcttgaagccattggtttgacagaatcaggtgtagataagttgacgcgtgcagcttaccacttgcttggattgggaacttacttcacagctggtgaaaaagaagttcgcgcttggactttcaaacgtggtatgaaggctcctcaagcagctggtattatccactcagactttgaaaaaggctttattcgtgcagtaaccatgtcatatgaagatctagtgaaatacggatctgaaaaggccgtaaaagaagctggacgcttgcgtgaagaaggaaaagaatatatcgttcaagatggcgatatcatggaattccgctttaatgtctaa

SEQ ID NO: 9350 - DNA, 3510 bp, Streptococcus pneumoniae
  CDS (1)...(3510)
atggtgaccttattagatttattctcagaaaatgatcagattaaaaaatggcatcaaaatttaacagataagaaaagacaactaatacttggtttatcaacatctactaaggctcttgcaattgcaagcagtttagaaaaagaagataggattgtgttattgacgtcaacttatggagaagcagaaggacttgttagtgatcttatctctatcttgggtgaggaactcgtctatccatttttggtagatgatgctcctatggtggagtttttgatgtcttcacaggaaaaaattatttcacgggttgaagccttgcgttttttgactgattcatctaagaaagggattttagtttgtaatatcgcagcaagtcgattgattttaccgtctcccaatgcattcaaagatagtattgtaaaaatctcagttggtgaagaatatgatcaacacgcgtttatccatcagttaaaggaaaatggctatcgaaaagttactcaagtacaaactcagggcgaatttagtcttcgaggagatattttagatatttttgaaatatcccagttagaaccttgtcgaattgagttttttggtgatgaaattgatggtatcaggtcatttgaagtagaaacacaattatcgaaagaaaataagacagaactcactatctttccagctagtgatatgcttttgagagaaaaggattatcaacgaggacagtcagctttagaaaaacaaatttcaaaaactttatcacctattttgaaatcatacctagaagaaattctttcaagttttcaccaaaaacaaagtcatgcagactctcggaagtttttatctttgtgctatgataagacatggactgtctttgattatattgaaaaagatactccaatattctttgatgattatcaaaaattgatgaatcagtatgaagtctttgaaagagaattagcgcagtactttacagaagaattacagaatagtaaagcattttctgatatgcagtatttttctgatattgaacaaatctataaaaaacaaagtccagtgacctttttctctaatcttcaaaagggtttaggaaatctcaaatttgacaaaatttatcaattcaatcaatatcctatgcaggaatttttcaatcagttttcttttctaaaagaagaaattgaacgatataaaaaaatggattacaccattattctgcagtctagcaattcaatgggaagtaaaacattggaggatatgttagaggaatatcagattaaattggattctagagataagacaagtatctgtaaagaatctgtaaatttaatagagggtaatctcagacatggttttcattttgtagatgaaaagattttattgataactgaacatgagatttttcaaaagaaattaaagcgtcgttttcgaagacaacatgtttcaaatgcagagagattaaaagattacaatgaacttgaaaaaggggactatgttgtccatcatatccatgggattggtcaatatctaggaattgaaaccattgaaatcaaggaaattcatcgtgattatgtcagtgtccagtaccaaaatggtgatcaaatttctattcccgtggaacagattcatctactgtccaaatatatttcaagtgatggtaaagctccaaaactcaataaattaaatgacggtcattttaaaaaggccaagcaaaaggttaagaaccaggtagaggatatagctgatgatttaatcaaactctactctgaacgtagtcagttgaagggttttgctttctcagctgatgatgatgatcaagatgcctttgatgatgctttcccttatgttgaaacggatgatcaacttcgtagtattgaggaaatcaagagggatatgcaggcttctcagccaatggatcgacttttagttggggatgttggttttggaaagactgaagttgctatgcgtgcagcctttaaagcagtcaatgatcacaaacaggttgtcattctagttccgacgacggttttagcgcaacagcactatacgaattttaaggaacgattccaaaattttgcagttaatgttgatgtgttgagtcgctttagaagtaaaaaagagcagactgcaacacttgaaaaattgaaaaacggtcaagtcgatattttgattggaacacatcgtgttttgtcaaaagatgttgtgtttgctgatttgggcttgatgattattgatgaggaacagcgatttggtgtcaagcataaggaaactttgaaagaactgaagaaacaagtggatgtcctaaccttgaccgctacgccaatccctcgtaccctccatatgtctatgctgggaatcagagatttgtctgttattgaaactccgccgactaatcgctaccctgttcagacctatgttttggaaaagaatgatagtgtcattcgtgatgctgtcttgcgtgaaatggagcgtggaggtcaaggttactatctttacaacaaagttgacacaattgttcagaaggtttcagaattacaggagttgattccagaggcttcgattggatatgttcatggtcgaatgagtgaagtccagttggaaaatactctattagactttattgagggacaatacgatatcttggtgactactactattattgagacaggggtggacattccaaatgctaatactttatttattgaaaatgcggaccatatgggcttgtcaaccttatatcagttaagaggaagagtcggtcgtagtaatcgtattgcttatgcttatctcatgtatcgtccagaaaaatcaatcagtgaagtctctgaaaagagattagaagcgattaaaggatttacagaattgggctctggctttaagattgcaatgcgagatctttcgattcgtggagcaggaaatcttttaggaaaatcccagtctggtttcattgattctgttggttttgaattgtattcgcagttattagaggaagctattgctaaacgaaacggtaatgctaacgctaacacaagaaccaaagggaatgctgagttgattttgcaaattgatgcctatcttcctgatacttatatttctgatcaacgacataagattgaaatttacaagaaaattcgtcaaattgacaaccgtgtcaattatgaagagttacaagaggagttgatagaccgttttggagaatacccagatgtagtagcctatcttttagagattggtttggtcaaatcatacttggacaaggtctttgttcaacgtgtggaaagaaaagataataaaattacaattcaatttgaaaaagtcactcaacgactgtttttagctcaagattattttaaagctttatccgtaacgaacttaaaagcaggcatcgctgagaataagggattaatggagcttgtatttgatgtccaaaataagaaagattatgaaattttagaaggtctgctgatttttggagaaagtttattagagataaaagagtctaaggaaaaaaattccatttga

SEQ ID NO: 9351 - DNA, 267 bp, Streptococcus pneumoniae
  CDS (1)...(267)
atgagattagataaatatttaaaagtatcgcgaattatcaagcgtcgtacagtcgcaaaggaagtagcagataaaggtagaatcaaggttaatggaatcttggccaaaagttcaacggacttgaaagttaatgaccaagttgaaattcgctttggcaataagttgctgcttgtaaaagtactagagatgaaagatagtacaaaaaaagaagatgcagcaggaatgtatgaaattatcagtgaaacacgggtagaagaaaatgtctaa

SEQ ID NO: 9352 - DNA, 711 bp, Streptococcus pneumoniae
  CDS (1)...(711)
atgaagaaataccaacaattatttaagcaaatccaagaaaccattcaaaacgagacttacgctgtcggagattttcttcctagcgagcacgaccttatggagcaatatcaagtgagtcgtgataccgtccgaaaggccctgtctctcctccaagaggaaggattgatcaaaaagataagagggcaaggttctcaagtcgtcaaagaagaaaccgtcaatttccctgtatccaacctaaccagctaccaagaactagttaaagaacttggactgcgctctaaaaccaacgtggtcagtctggacaagattattattgataaaaaatcctcactgataaccggtttcccagagtttcggatggtttggaaggtggtccgccagcgtgtggtggatgatctggtatccgttctggatacggactatctggatatggaactaatcccaaatctcactcgccaaatcgctgagcagtctatctattcttatatagaaaatggcctcaaactccttattgattatgctcagaaggaaatcaccattgaccactcaagcgaccgagacaagattctcatggacattggcaaagacccttatgtcgtttcgattaaatcaaaagtctatctccaagacggacgccaatttcagtttaccgaaagtcgccataagttagaaaaatttagatttgtagattttgcaaaacgcaagaaataa

SEQ ID NO: 9353 - DNA, 795 bp, Streptococcus pneumoniae
  CDS (1)...(795)
atggataatcgaccaattggttttttggattcgggtgtcgggggcttgaccgttgtgcgcgagctcatgcgccagcttccccatgaagaaatcgtctatattggagattcggcgcgggcgccctatggcccccgtcctgctgagcaaattcgtgaatatacttggcagctggtcaactttctcttgaccaaggatgtcaaaatgattgtcattgcttgtaacactgcgactgcggttgtctgggaagaaatcaaggctcaactagatattcctgtcttgggtgtaattttgccaggagcttcggcagccatcaagtccagtcaaggtgggaaaatcggagtgattggaacgcccatgacggtacaatcagacatataccgtcagaaaatccatgatctggatcccgacttacaggtggagagcttggcctgtcccaagtttgctcccttggttgagtcaggtgccctgtcaaccagtgttaccaagaaggtggtctatgaaaccctgcgtcccttggttggaaaggtggatagcctgattttgggctgtactcattatccactccttcgccctattatccaaaatgtgatggggccaaaggttcagctcatcgatagtggggcagagtgcgtacgggatatttcagtcttactcaattattttgaaatcaatcgtggtcgcgatgctggaccactccatcaccgtttttacacaacagccagtagccaaagttttgcacaaattggtgaagaatggctggaaaaagagattcatgtggagcatgtagaattatga

SEQ ID NO: 9354 - DNA, 1011 bp, Streptococcus pneumoniae
  CDS (1)...(1011)
atggctggaaaaagagattcatgtggagcatgtagaattatgacaaataaaatttatgaatataaggatgaccagaactggtatgttgggtcttatagtatttttggtggcgttaacagtttgagcgactataaggcagattttcctctgtttgaattctccaaaatatttggagatgaagagtatggtttcccgctttcagttactgttttacgctatggttctacctaccgtttgttctcctttgtggtagacatgcttaatcaagaaatgggacgaaacttggaagttattcaacgtcatggggccctgctcttggttgaaaatgggcaactcttgtatgtagaattgcctaaagaaggggtcaatgttcatgatttctttgagacaagcaaggtcagagaaaccttgttgattgcgactcgtaacgaaggtaaaaccaaggaattccgagctatctttgataagttaggctacgatgtggaaaatcttaatgactaccctgacctgcctgaagtagcagaaacaggtatgacctttgaagaaaatgcccgccttaaggcagaaaccatttctcaattaacgggcaagatggttttggcagatgattctggtctcaaagtcgatgtccttggtggcttaccaggcgtctggtcagctcgtttcgcaggtgtgggagcaactgaccgtgaaaataatgccaaactcttgcacgaattggccatggtctttgaactcaaggaccgctcggctcagttccacacaaccctagtcgtagccagcccaaataaggaaagtttagttgttgaagcagactggtcaggttatattaactttgaacctaagggtgaaaatggctttggctatgatcccctcttccttgtaggagagacaggtgagtcatcagctgaattaaccctggaagaaaaaaatagtcaatctcaccgtgccttagccgttaagaaacttttggaggtatttccatcatggcaaagcaaaccatcattgtaa

SEQ ID NO: 9355 - DNA, 723 bp, Streptococcus pneumoniae
  CDS (1)...(723)
atgagaatcaataagtatattgcccacgcaggtgtggccagtaggagaaaagcagaagagctgatcaagcaaggtttggtgacagttaacggacaagtggtgcgtgaactagcaaccactatcaagtcaggcgacaaggtcgaagttgaaggtcaacctatctacaacgaagaaaaggtctattatctgcttaacaaaccacgcggtgtcatttccagtgtaacagatgacaagggtcgcaagacggttgtcgacctcttgcccaatgtcaaagagcgcatttaccctgtgggtcgtttggactgggatacatcaggagtcttgattttgaccaatgatggggactttacagacgagatgattcaccctcgtaatgagattgacaaggtttatgtcgcgcgtgttaaaggtgtggccaataaggacaatcttcgccccttgacccgtggtcttgagattgatggtaagaaaaccaagccagctgtttatgaaattctcaaagtggacccagtcaaaaatcgctctgtggtgcagttgaccatccatgaagggcgtaaccatcaggttaaaaagatgtttgaagctgttggtctccaagtagataagttgtctcggactcgtttcggacacctagacttgacaggactccgtccaggagaatcccgtcgtcttaataaaaaagaaatcagccaactacacaccatggctgtaactaagaaataa

SEQ ID NO: 9356 - DNA, 966 bp, Streptococcus pneumoniae
  CDS (1)...(966)
atgaaaacatcccttaaactttatttcactgccctagtggccagcttcttgctcctacttggtgcatgtagtacaaactcaagcactagtcagacagagaccagtagctctgctccaacagagataaccattaaaagttcactggacgaggtcaaactttccaaagttcctgaaaagattgtgacctttgacctcggcgctgcggatactattcgcgctttaggatttgaaaaaaatatcgtcggaatgcctacaaaaactgttccgacttatctaaaagacctagtgggaactgtcaaaaatgttggttctatgaaagaacctgatttagaagctatcgccgcccttgagcctgatttgattatcgcttcaccacgtacacaaaaattcgtagacaaattcaaagaaatcgccccaaccgttctcttccaagcaagcaaggatgactactggacttctaccaaggctaatatcgaatccttagcaagtgccttcggcgaaactagtacacaaaaagccaaggaagaattggccaagctagacaagagcatccaagaagtcgctactaaaaatgaaagctctgacaaaaaagcccttgcgatcctccttaatgaaggaaaaatggcagcctttggtgccaaatctcgtttctctttcttgtaccaaaccttgaaattcaaaccaactgatacaaaatttgaagactcacgccacggacaagaagtcagctttgaaagtgtcaaagaaatcaaccctgacatcctctttgtcatcaaccgtacccttgccatcggtggggacaactctagcaacgacggtgtcctagaaaatgcccttatcgctgaaacacctgctgctaaaaatggtaagattatccaactaacaccagacctctggtatctaagcggaggcggacttgaatcaacaaaactcatgattgaagacatacaaaaagctttgaaataa

SEQ ID NO: 9357 - DNA, 1461 bp, Streptococcus pneumoniae
  CDS (1)...(1461)
atgtcaaaagatatccgcgtacgttacgcaccaagtccaacaggactactacacatcggaaatgctcgtacagcattgtttaattacttgtatgcgcgccatcatggtggaacatttctcatccgtatcgaagatactgaccgtaaacgccatgtcgaggatggtgaacgttcacaacttgaaaaccttcgctggttaggcatggattgggatgaaagtccagaatcacatgagaattatcgccagtctgagcgtttggacttgtatcaaaaatacattgaccaactattagctgaaggaaaagcctataaatcttacgttacagaagaagagttggcagctgaacgcgaacgccaagaagtagctggcgaaacaccacgctacatcaatgaataccttggtatgagtgaagaagaaaaagcagcttacatcgcagaacgtgaagcagcagggatcatcccaactgttcgtttggctgtcaatgagtcaggtatctacaagtggcatgatatggtcaaaggcgatatcgaatttgaaggtggcaatatcggtggtgactggattatccaaaagaaagacggttacccaacttacaactttgccgttgccatcgatgaccatgatatgcaaatctctcatgttatccgtggagacgaccatattgctaacacaccaaaacagctcatggtttatgaagcacttggttgggaagctccagagtttggtcacatgaccttgattatcaactctgagactggtaagaagttatctaaacgtgatactaatacacttcaatttatcgaagattaccgaaagaaaggttaccttccagaagcagtctttaactttattgctcttcttggttggaacccaggtggtgaagatgagattttctctcgtgaagaactcattaaactttttgatgaaaaccgcctcagcaagtcaccagcagcctttgatcagaaaaaactagactggatgagcaatgattatatcaagaatgcagaccttgaaaccatctttgaaatggcaaaaccattcttagaggaagcaggccgtttgactgacaaggctgaaaaattagttgagctctataaaccacaaatgaaatcagtagatgagattatcccattgacagatcttttcttctcagatttcccagaattgacagaagcagagcgcgaagtcatgacgggtgaaacagttccaacagttcttgaagcattcaaagcaaaacttgaagcgatgacagatgataaatttgtgacagaaaatatcttcccacaaattaaagcagttcaaaaagaaacaggtattaaagggaaaaatcttttcatgcctattcgtatcgcagtttcaggcgaaatgcatgggccagaattaccagatacaattttcttgcttggacgtgaaaaatcaattcagcatatcgaaaacatgctaaaagaaatctctaaataa

SEQ ID NO: 9358 - DNA, 975 bp, Streptococcus pneumoniae
  CDS (1)...(975)
atgaaaggacggggtatgaaactttctcattatttaattggcttacttctactcctagtctttctctctattagcattgggaccagtgatttttcatggggaaagctatttgatttcgaccagcagacctggctcctctttcaagagtcccgtctcccaagaactatcagtattctcctgactgcctctagtatgagtatggcaggccttctcatgcagactattacccaaaatcagtttgctgcaccgagtacagttggaacgactgaagccgccaaactgggaatggtgctgagcctttttgtctttccatcggctagtctgacccaaaagatgctcttcgcttttgtttcatccatcgtattcaccctcttcttcctagcctttatgaccatttttactgtaaaggaaaggtggatgttgcctctgattgggatcatctatagcgggattatcggctcagtcacagaagttatcgcctatcgtttcaatctggttcagagtatgactgcctggacccagggctccttctccatgattcagacccatcagtatgagtggctcttcttaggcctcatcatcctgataaccgtttggaaattatcccaaaccttcaccatcatgaatctagggaaagaaaccagcgagagtttggggatttcctactccctacttgaaaaactggccctctttctggtggcgctaacgacaagcgtcaccatgattaccgtgggtggcctaccatttctcggagttatcgttcccaatcttgttcgcaagcgctatggagataatctaagtcaaaccaaactcatggtcgcactggttggtgccaatctagttctggcttgcgatatcctatcccgagttctgattaggccctatgagttgtctgtcagtctcttgctaggaatcatcggtagtctcgtctttatcctacttctctggagagggggacgaaaagatgcagactaa

SEQ ID NO: 9359 - DNA, 1017 bp, Streptococcus pneumoniae
  CDS (1)...(1017)
atggaaaaacaaaccgtcgccgtcttggggcctggttcttggggaaccgccctttcacaagtcttaaatgacaatggacacgaggtacgtatttggggaaatcttcccgagcaaatcaatgaaattaatacacaccatactaataagcactactttaaagatgtcgttctagacgaaaatatcattgcctacaccgacttagcagaaacattgaaaaatgtggatgcgattttgtttgttgtcccaacaaaagtgacacgacttgttgcccagcaagttgcacaaaccttggaccataaggttatcatcatgcacgcatcaaagggattagaacctgatagccataaacgattatcaaccattcttgaagaagaaattcctgaacatctccgtagtgatatcgtcgttgtttcagggcctagtcatgcagaagagaccattgtgcgtgacctaactttaataactgctgcttctaaagatttacaaacagctcaatacgttcaggagctatttagtaatcactacttccgactttataccaatacggatgttatcggggttgaaactgctggtgctcttaaaaatattattgctgtcggtgctggagctttacatggtcttggatttggtgataatgctaaggcagccatcatcgctcgaggtttagcagaaatcacccgcctaggggtagcactcggggccagtccattgacctatagcggcttatctggtgtgggagatttgatcgtaacgggaacttccatccactctcgtaactggagagctggagatgctctcggacgaggagaatccctagctgatatagaagctaatatgggcatggtaatcgaaggaatttcaacgactcgagcagcctatgaactagcccaagaacttggagtctatatgcccattacacaggctatttaccaagttatttatcacggaaccaatatcaaagatgccatttatgacatcatgaacaatgaatttaaagcagaaaatgagtggtcttaa

SEQ ID NO: 9360 - DNA, 1752 bp, Streptococcus pneumoniae
  CDS (1)...(1752)
atgcagaataaacaagaacaatggactgtattgaagcgcttgatgtcctatctcaagccttatggactccttacctttttggcactcagttttctcctagcgacgacggtcattaaaagtgtcattccccttgtggcttcccactttatcgaccagtatctcagcaatcttaaccaactagccgtgaccgttttgctggtctactatggtctctacatcctacaaactgtagttcagtatgtcggcaatcttctctttgcgcgcgtgtcttacagtattgttagggatattcgtcgggatgcctttgccaatatggagaaactgggcatgtcttactttgacaagacgccagcaggttctatcgtttctcgtttgaccaacgataccgagacgattagtgatatgttttctgggattttatccagctttatctcagcagtttttatctttctgacaaccctttataccatgttggtgctggattttcgtttgacagcattagtcttgctctttctccccttgattttccttttggtcaatctctatcgaaaaaagtcagtgaaaatcatcgagaaaaccagaagtctcttgtcagatatcaatagtaagctggcagagaatatcgagggaatcaggattattcaggcttttaatcaagagaagcgcctgcaggcagaatttgatgaaatcaaccaagagcacttggcctatgccaaccgttctgtagccttggatgccctctttttgagacctgccatgagtttgttgaaacttctaggttatgctgtcttgatgacctattttggctatcgtggtctttctatcgggataacggccgggaccatgtatgcttttatccagtacatcaaccgcctctttgaccctttgattgaggtgacgcaaaacttttcaacactgcaaacgtctatggtttctgcaggccgtgtctttgccttaatcgatgagaggacctatgagccccttcaagaaaatgggcaagccaaagtcaaagaaggcaatatccgttttgaacatgtgtgtttctcgtatgacggtaaacatccgattctggatgacatttctttctctgttaataagggtgaaaccattgcctttgtaggtcatacaggttcagggaaatcgtctattatcaatgtcctcatgcgcttttatgaattccagtcagggagagttctcttggatgatgtggatatcagggatttcagtcaagaagagctgagaaaaaacatcggtttggttttacaggaacccttcctctatcatggaactattaagtccaatatcgccatgtaccaagaaatcagtgatgagcaggttcaggctgcggcagcctttgtggatgcagattcctttattcaagaacttcctcaggggtacgactcccctgtttccgagcgtggttcgagcttctctactgggcagcgccagcttcttgcctttgctagaacagtcgccagccagcctaaaatcctgattttggatgaagcgacagccaatattgactctgaaacagaaagtttggttcaagcttctctggcgaagatgagacagggccgaacaactattgctatcgctcaccgcctttctactattcaagacgccaactgcatctatgtcttggataagggacgcattatcgagagtggaacccatgaggaactcttgactctgggaggaacctatcacaagatgtatagtttgcaggcaggggccatggcctatactctttga

SEQ ID NO: 9361 - DNA, 1005 bp, Streptococcus pneumoniae
  CDS (1)...(1005)
atgaaagagattattgaaaaactagcaaaatttgaaaatttatcaggtgtggaaatgacggatgtcattgagcgtatcgtaactgggcgtgtaactgaagcgcagattgcttctctcctcttagctcttaagatgaagggggaaacacctgaagaacgcacagccattgcccaagtcatgagaggacatgcccagcatattccaactgagattcatgatgccatggacaactgtggtacaggtggggacaagtctttcagttttaatatttccacaactgcagcctttgtcttggctggtggcggtattcacatggccaagcatggtaaccgctcgatttcttctaaatctggttccgcagatgtcctcgaagccttgggaatcaatcttgacctcaaaccagctgaactaggtaaggtctttgataaaactggaatcgtctttctcttcgctaaaaatatgcacccagctatgaaatacatcatgccagctcgtttggaattgggaattccaacgattatgaacttgactggtccactgattcatccaatggctttagaaacacagcttcttggaattagtcgtccagaactcctagaaagtacagctcaggttttgaaaaatatgggtcgcaaacgtgccatcgtggttgctggaccagaagggttggatgaagctggcttgaacggaacaaccaagattgcacttcttgaaaatggcgaaatcagcttgtcaagctttactccagaggatttgggaatggaaggctatgctatggaagatattcgtggtgggaatgctcaggaaaatgcagaaattttgcttagcgttctgaaaaacgaagcaagtccattcttggaaacgacagtcttgaatgctggtcttggtttctatgctaatggtaagattgatagcatcaaggaaggagttgccttggcccgtcaagtgattgctagaggcaaggcccttgaaaaactcagactgttacaggagtaccaaaaatga

SEQ ID NO: 9362 - DNA, 204 bp, Streptococcus pneumoniae
  CDS (1)...(204)
atgtcagtagaagaaaaattaaatcaagctaaaggttctattaaagaaggtgttgggaaagccatcggtgatgaaaaaatggaaaaagaaggagcagctgaaaaagttgtttctaaagtaaaagaagttgccgaagacgctaaagacgctgtagaaggtgctgtagaaggtgttaaaaacatgttgagtggcgacgataaataa

SEQ ID NO: 9363 - DNA, 744 bp, Streptococcus pneumoniae
  CDS (1)...(744)
atgcagcagtattttgtaaaaggcagtgctatctctcctgtcactatcgaggacaaggaaaccagtaagcatatgtttcaggttatgcgcttgaaagaagaggatgaggttaccttagtctttgatgatggcatcaagcgcttggcgcgcgtgctggatatggaaaatcgtcagtttgagttggtccaagaattaaatgacaatgtggaactaccagttcaagtgaccatcgcatctggatttcccaagggagacaagctggagttcatcgctcaaaaagtaaccgaactgggtgctagccaaatctgggcctttcctgcagactggtcagttgccaagtgggatggcaagaaattgggtaaaaaagttgaaaaactagaaaaaattgcccttggagcagccgagcaaagcaagcgtaatattgtaccaagtattaaacttttcgagaaaaaagcagattttctagctcagctggaccagtttgactctatcatagtagcctatgaagaatcagctaaagaaggagaagccgctgcgcttctgcaagcagtcactggtcttgaaacaggagccaaactgctctttatctttggtccagaaggcggtctctcacctgcagaaatcgaaagttttgaagctaaaggagccgttttggcaggcctaggtcctcgtattttgcgagcagaaacagcaccgctttacgctttatcagcccttagtgttttagtagaattagagaaataa

SEQ ID NO: 9364 - DNA, 1257 bp, Streptococcus pneumoniae
  CDS (1)...(1257)
atgcacatttttgatgagctaaaagagcgtggtttgatatttcaaacgactgatgaagaagctttgcgtaaagccctagaagaaggtcaagtttcttattatactggctacgatccaactgctgacagccttcacctaggccaccttgtcgcaatcttgacaagtcgtcgcttgcaactagcaggtcacaaaccttatgcgctcgttggcggtgctacaggtctcatcggagatccgtccttcaaagatgctgaacgtagtctccaaacaaaagacacagtagatggctgggtcaagtctatccaaggacaactttctcgttttcttgactttgaaaatggcgaaaacaaggctgtcatggtcaacaactacgactggtttggcagcatcagcttcattgacttcctccgtgatattggaaaatacttcacggtcaactacatgatgagtaaggaatctgttaaaaaacggatcgaaacaggaatttcttacactgagttcgcttaccaaatcatgcaagggtatgacttcttcgtccttaaccaagaccataatgtcactcttcaaatcggtggttctgaccagtggggaaatatgacagctggtaccgaattgcttcgtcgtaaggcggacaagactggtcacgttatcactgttccactaatcacagatgcaactggtaagaaatttggtaaatcagaaggaaatgccgtctggctcaatcccgaaaagacttctccatacgaaatgtaccaattctggatgaacgtgatggacgctgacgctgttcgcttcttgaaaatctttactttcttgtcacttgatgagattgaagatattcgtaaacaatttgaagcagcgccacacgaacgcttggctcaaaaagtcttggctcgtgaagttgttacacttgttcacggagaagaagcctacaaagaagcacttaacatcactgagcaactctttgcaggaaacatcaaaaacctttctgtcaaagagctcaaacaaggacttcgtggtgtgccaaactaccaagtacaggcagacgaaaacaacaatatcgtggaactgctcgtctcatctggtatagttaactcaaaacgccaagcccgtgaagacgtccaaaacggagccatctacgtaaacggcgaccgcatccaagagcttgactatgtcttgagtgacgctgataagttagagaatgaactgactgttatccgtcgtgggaagaaaaaatactttgtattgacttactaa

SEQ ID NO: 9365 - DNA, 1614 bp, Streptococcus pneumoniae
  CDS (1)...(1614)
atggaaatcatgtcgcttgcgattgctgtttttgccgtcatcattggtttagtcattggatatgtcagcatctcagctaagatgaaatcatctcaggaagctgcggagttgatgcttttaaatgctgaacaagaagcaactaatttacgtggacaagctgagcgtgaagcggatttacttgttaatgaagctaaacgtgaaagcaagtctcttaaaaaagaagcactattggaggccaaagaagaagccagaaaataccgtgaagaagtggacgctgaattcaaatcagaacgtcaagaactcaaacaaatcgaaagtcgtttgacagagagagctactagccttgaccgtaaggacgacaatttgacgagtaaagaacaaacacttgaacaaaaagaacaaagtatttctgatagagcgaaaaaccttgatgcgcgtgaagagcaattagaggaagtcgaaagacaaaaagaagcagaactagagcgtattggtgctctgtctcaggcagaagcacgagatattatcttggctcagacagaggaaaacttgaccagggagattgccagtcgcattcgcgaagctgagcaagaggtcaaggaacgttctgacaaaatggctaaggacatcttggttcaagctatgcaacgtatcgctggtgaatatgtagcggagtcaacaaactcaacagttcatctgccagacgatactatgaagggacgcattattggtcgtgaaggtcgtaacattcgtacctttgaaagtttgacaggggtcgatgtgattatcgacgatacaccagaagtggtgaccttgtcaggatttgatccgattcgtcgtgagattgcccgtatgactatggaaatgttgctcaaagatggtcgtatacatccagctcgtatcgaagagttggttgagaaaaaccgtcaagagattgacaataagattcgtgaatacggtgaggctgctgcctatgaaattggtgcgccaaaccttcatccagacttgatgaagattatgggacgtttgcagttccgtacttcatatggacaaaatgttttgcgccattcgattgaggttgctaagttggctggtatcatggcgagcgaacttggtgaaaatgcggctcttgcccgtcgtgctggattccttcacgatatcgggaaagccattgaccatgaggttgaaggtagccacgttgaaatcggtatggaattggcccgtaagtacaaggaacccccagttgtggtgaatacgattgctagtcaccacggagatgttgaagctgagagcgtgatagcagttatcgtcgctgcagcagatgccttgagcgcagcccgtccaggtgctcgtagtgagtctcttgaaagctacatcaagcgtctccatgatttggaagaaattgctaacggctttgaaggagtgcaaactagctttgcccttcaagcaggacgtgaaattcgtatcatggtcaatccaggaaaaatcaaggacgacaaagtcacaatcttggctcacaaagttcgtaagaaaattgaaaacaatctcgattatccaggaaatatcaaggtaaccgtgattcgcgagcttcgtgcagtagattatgctaaataa

SEQ ID NO: 9366 - DNA, 1383 bp, Streptococcus pneumoniae
  CDS (1)...(1383)
atgatagaaaagaagaaatattggaggaagaacatgtcacatattaaatttgattattcaaaagttttagacaaatttgttgcaccacatgaagtggaatacatgcaatcacaagtaacagcagcagatgaattgatccgtaaaggaactggtgctggtagcgacttcttgggatggttggaccttcctgaaaaatacgaccgcgaagaatttgaccgcatcttgaaagctgctgagcaaatcaagtcagacagcgatgttttggttgtgatcggtattggtggatcttaccttggtgcaaaagcagcaatcgacttcttgaatcaccattttgctaacttgcaaacaaaagaagaacgcaaagctccacaaatcctttacgcaggaaactcaatctcatctacttaccttgctgacttggtagagtatgttgcagacaaagacttctcagtaaacgtaatttctaaatcaggtacaacaactgaaccagcgattgctttccgtgtctttaaagaactcttggttaagaaatacggtcaagaagaagctaacaaacgtatctatgcaacaactgaccgccaaaagggtgctgttaaggttgaagcagacgctaacggttggggaacatttgttgttccagatgatatcggtggacgcttctcagtattgacagccgttggtttgcttccaatcgcagcatcaggagctgacatcaaagctcttatggaaggtgcgaatgcagctcgcaaagactacacttcagacaaaatctctgaaaacgaagcttaccaatacgcagctgttcgtaacatcctttatcgtaaaggctatgcaactgagatcttggtaaactatgagccatcacttcaatacttctcagaatggtggaaacaattggctggtgaatcagaaggaaaagaccaaaaaggtatctacccaacttcagccaacttctcaactgacttgcactcacttggtcaatttatccaagaaggaactcgtatcatgtttgaaacagttgtccgtgttgacaaacctcgtaaaaacgtgcttattcctactttggaagaagaccttgacggacttggttaccttcaaggaaaagacgttgactttgtaaacaaaaaagcaactgacggtgttcttcttgcccacacagatggtgatgtaccaaacatgtatgtgactcttccagagcaagacgctttcactcttggttacactatctacttcttcgaattggcaattgacctttcaggttacttgaatgctatcaacccatttgaccaaccaggtgttgaagcttataaacgtaacatgtttgcccttcttggaaaaccaggatttgaagaattgagcaaagaacttaacgcacgtctataa

SEQ ID NO: 9367 - DNA, 1980 bp, Streptococcus pneumoniae
  CDS (1)...(1980)
atgatccaaatcggcaagatttttgccggacgctatcggattgtcaaacagattggtcgaggaggcatggcggatgtctacctagccaaagacttaatcttagatggggaagaagtggcagtgaaggttctgaggaccaactaccagacggacccgatagctgtagctcgttttcagcgtgaagcgagagctatggcagatctagaccatcctcatatcgttcggataacagatattggtgaggaagacggtcaacagtatcttgcaatggagtatgttgctggactagacctcaaacgctatatcaaggaacattatcctctttctaatgaagaagcagtccgtatcatgggacaaattctcttggctatgcgcttggcccatactcgaggaattgttcacagggacttgaaacctcaaaatatccttttgacaccagatgggactgccaaggtcacagactttgggattgctgtagcctttgcagagacaagtctgacccagactaactcgatgttgggctcagttcattacttgtcaccagagcaggcgcgtggttcgaaggcgactgtgcagagtgatatctatgccatggggattattttctatgagatattgacaggccatatcccttatgacggggatagcgcggtgaccattgccctccagcatttccagaaccccctgccgtccgttattgcagaaaattcatctgtacctcaggctttagaaaatgttattatcaaggcaactgctaaaaagttgaccaatcgctatcgctcggtttcagagatgtatgtagacttgtctagtagcttgtcctacaatcgtagaaatgaaagtaagttaatctttgatgaaacgagcaaggcagataccaagaccttgccgaaggtttctcagagtaccttgacatctattcctaaggttcaagcgcagacagaacacaaatcaatcaaaaacccaagccaggctgtgacagaggaaacttaccaaccacaagcaccgaaaaaacatagatttaagatgcgttacctgattttgttggccagccttgtattggtggcagcttctcttatttggatactatccagaactcctgcaaccattgccattccagatgtggcaggtcagacagttgcagaggccaaggcaacgctcaaaaaagccaattttgagattggtgaggagaagacagaggctagtgaaaaggtggaagaagggcggattatccgtacagatcctggcgctggaactggtcgaaaagaaggaacgaaaattaatctggttgtctcatcaggcaaacaatccttccaaattagtaattatgtcggccggaaatcttctgatgttatcgcggaattaaaagagaaaaaagttccagataatttgattaaaattgaggaagaagagtcgaatgaaagtgaggctggaacggtcctgaagcaaagtctaccagaaggtacgacctatgacttgagcaaggcaactcaaattgttttgacagtagctaaaaaagctacgacgattcaattagggaactatattggacggaactctacagaagtaatctcagaactcaagcagaagaaggttcctgagaatttgattaagatagaggaagaagagtccagcgaaagcgaaccaggaacgattatgaaacaaagtccaggtgccggaacgacttatgatgtgagtaaacctactcaaattgtcttgacagtagctaaaaaagttacaagtgttgccatgccgagttacattggttccagcttggagtttactaagaacaatttgattcaaattgttgggattaaggaagctaatatagaagttgtagaagtgacgacagcgcctgcaggtagtgtagaaggcatggttgttgaacaaagtcctagagcaggtgaaaaggtagacctaaataagactagagtcaagatttcaatctacaaacctaaaacaacttcagctactccttaa

SEQ ID NO: 9368 - DNA, 1275 bp, Streptococcus pneumoniae
  CDS (1)...(1275)
atgaagataagttggaatggattttctaaaaaatcataccaagagcgcctcgagctgctaaaagctcaggcgctccttagtcctgagagacaagctagtctggagaaggatgaacagatgagtgtgactgtggcagaccagctgagtgagaatgtggtgggaactttttctctgccttattcgctggttccggaggtacttgtcaacggtcaggaatacaccgttccctatgtgacagaagaaccctctgtggttgcggcggccagctatgccagcaaaatcatcaagcgtgcaggtggttttactgcacaagtccatcagcgccagatgattgggcaggtagccctttatcaagttgctaatcctaaactagcgcaagagaagattgccagcaagaaagcggagctcttggagcttgccaatcaagcctatccttctatcgttaaacgtgggggtggggcgcgtgatctgcatgtcgagcagataaaaggcgaaccagactttctcgttgtttatattcatgtcgatacccaggaagccatgggtgccaatatgctcaacaccatgctggaagccttgaaaccagtcttagaagaactcagtcagggacagagtctcatgggaatcctgtccaactacgcgactgattctctggtgactgcaagctgtcgcatcgcctttcgctacttgagccgccaaaaggatcaaggacgagagattgcggagaaaattgcgttggctagtcagtttgcgcaggctgatccttaccgagctgctactcataataaaggaatttttaatggtattgatgcgattttgattgccactggtaatgactggcgtgccatcgaagctggggcccatgcctttgccagtcgagatggacgctatcaaggtcttagctgctggacgctggaccttgaaagagaagaattggtcggtgagatgaccctgcccatgcctgtagcgactaagggtggctctatcggcctcaacccacgtgtagctctcagtcatgatctactaggaaatccttctgccagagaattagcccagattatcgtgtccatcggtcttgctcaaaattttgcagccctcaaagccttggtaagtacgggcatccagcaaggccacatgaaactacaggccaaatccctagctctcctagctggggctagtgaatctgaagttgctcccctagtagagcgcctcatctcagataaaacctttaacctagagacagcccagcgctatctcgaaaatttaagatcataa

SEQ ID NO: 9369 - DNA, 1884 bp, Streptococcus pneumoniae
  CDS (1)...(1884)
atgaacaatcaggaaattgcaaaaaaagtcatcgatgccttgggcggacgtgaaaatgtcaatagtgttgcccactgtgcgactcgtctacgtgtcatggtcaaagatgaagagaaaatcaataaagaagtgattgagaacttggaaaaagttcaaggtgctttctttaactcagggcaataccaaattatctttggtacaggtacagttaacaaaatgtacgatgaagttgttgtacttggcttaccaacatcatctaaggatgacatgaaagcagaagttgctaaacaagggaactggttccaacgtgctatccgtactttcggtgatgttttcgttccaatcatcccagttatcgtagcgacaggtctcttcatgggtgtgcgtggtcttttcaacgctcttgaaatgccacttccaggtgactttgcaacttacacacaaatcttgacagatacagccttcatcatcttgccaggtttggttgtgtggtcaaccttccgtgtatttggtggaaatcctgccgttggtatcgttcttggtatgatgcttgtctctggctcacttccaaacgcttgggcagttgctcaaggtggtgaagtaacagcgatgaacttctttggtttcatccctgttgttggtttgcaaggttccgttcttccagccttcatcatcggggttgtcggagctaaatttgaaaaagctgtccgcaaggttgttccagatgtcattgacctcttggtaacaccattcgtgacacttttggtcatgtctatccttggactctttgtcattggaccagttttccacgttgttgaaaactacatccttattgctacaaaagcgattcttagcatgccatttggtcttggtggtttcttgattggtggggttcaccaattgatcgtcgtgtcaggtgtgcaccacatcttcaacttgcttgaagtgcaattacttgctgctgaccatgctaacccattcaacgctatcatcacagctgctatgacagctcaaggtgctgctactgttgcggttggtgttaaaacaaaaaatccaaaactgaaaacacttgctttcccggctgctctttctgccttcctaggtattacagagcctgctatcttcggggtgaacttgcgcttccgtaaaccattcttcctttcattgattgctggtgcaatcggtggtggattggcttctatccttggacttgctggtactggtaatggtatcaccatcatccctggtacaatgctttatgttggtaacggacaacttccacaataccttcttatggtagctgtatcatttgcccttggttttgctcttacttacatgtttggttacgaagatgaagtagacgcaactgcagctgcaaaacaagctgaagtggctgaagaaaaagaagaagttgcgccagcagctcttcaaaatgaaacacttgtaactcctatcgtcggtgatgttgtcgctcttgctgatgtcaatgacccagtcttctcaagtggagctatgggacaaggtatcgctgtgaaaccaagtcaaggcgtggtctatgcactagctgatgctgaagtttcaattgcctttccaacagggcacgcttttggtttgaaaacaagaaatggtgctgaagttttgattcacgttggtattgacactgtatctatgaacggtgacggttttgaagcaaaagttgctcaaggtaataaggtgaaagctggcgatgttcttggaacatttgactcaaacaaaatcgctgcagctggacttgatgatacaacaatggttatcgttacaaatacagctgactacgcttcagtagctccagtcgcaacaggttcagtttcgaagggggatgctgtgatcgaagtgaaaatctaa

SEQ ID NO: 9370 - DNA, 894 bp, Streptococcus pneumoniae
  CDS (1)...(894)
atgctagaagtaagaagtctagagaaaagttttggctccaagcaagttttgtttggtattgactttcaagcgcgaccaggtcgtattttgggactagtcggaaaaaatggtgctggaaaaacaacgattttccatagtattttgaaattcctagaatatcagggagaaatcggtctggatggtcaggatattcgtcaggagacctatgctcggattggttatctgcctgaagaacgcagtctcatgcctaaattgacagttcttgaacaagttcgctacttggcgactctaaaaggcatggatgccaaagaagtcaaagaaaaactccctcaatggatgaagaggttgaaagtgaaaggaaagctgacagataaaatcaagagtctgtcaaaaggaaatcagcagaagattcagctcattattactctgattcatgaaccagacctgattatcttggatgagccttttagtggattggacccagttaatacagaattgctcaaacaagtcatttttcaggaaaaagagcgcggagcaaccattatcttttctgaccatgtcatgaccaatgttgaggaactttgtgacgatattctgatgatccgagatggccgtgtggtcttgcacggaccagttcaggatgtccgcaatcaatacgggaaaacgcgtctctttgtttcaagtgaacgaagcaaggaagaattggaaaatcttcctcatgtcaaacaggtgagcttgaccaaacaaggcagttggaaattgattttggaggatgagagcgctggaagggaactcttcccaatcttgactcaaggtcaatatatcgcaacatttgaccaacaagcgccaactatcgatgaaatctttaaactagaatcaggagtggaagtatga

SEQ ID NO: 9371 - DNA, 723 bp, Streptococcus pneumoniae
  CDS (1)...(723)
gtgattatattaaaggagtttaagcctatgtcattactagcatttgaaaatgtatccaaatcatatggagcaacaccagcccttgaaaatgtttctcttgacattccagctggaaaaattgtcggccttcttgggccaaacggctcaggaaaaacaaccctgattaaactaattaatggcctcttacaaccagatcaaggacgtgtcctcatcaacgacatggacccaagcccagcaaccaaggccgttgtagcttatttgcctgatacgacctatctcaatgagcaaatgaaggtcaaagaagccctaacctacttcaagaccttctataaagatttcaatcttgaacgcgcccatcatctacttgcagacctgggcattgatgaaaatagtcgtctcaagaaactatcaaaaggaaacaaagaaaaggttcaactgattttggttatgagccgtgatgctcgtctctatgttttggatgaacccattggtggggtggatccagcagcccgtgcttatatcctcaataccattatcaacaactactcaccaacttctaccgttttgatttctacccacttgatttctgatatcgagccaatcttggatgaaattgtcttcctaaaagacggaaaagtcgtccgtcaaggaaatgtagatgatattcgctacgagtcaggtgaatccattgaccaactcttccgtcaggaatttaaggcctaa

SEQ ID NO: 9372 - DNA, 366 bp, Streptococcus pneumoniae
  CDS (1)...(366)
atgtcctggacatttgacaacaaaaaacccatctatttacagattatggaaaaaatcaagcttcagattgtttcccatacactggaacccaatcaacaacttccaaccgtgagggagctagctagcgaggctggtgtcaatcccaataccatccaaagagccttatcagaccttgaacgagaaggatttgtctacagcaagcgaacaactggacgatttgtgactaaggataaggagctaatcgcccagtcacgcaaacaattatcagaagaagaattggaacacttcgtttcctccatgacccattttggctatgaaaaagaagaactaccaggcgtagtcagtgattatattaaaggagtttaa

SEQ ID NO: 9373 - DNA, 2514 bp, Streptococcus pneumoniae
  CDS (1)...(2514)
atggctaatattttaaaaacaattatcgaaaatgataaaggagaaatccgtcgtctggaaaagatggctgacaaggttttcaaatacgaagaccaaatggctgctttgactgacgaccaactaaaagcaaaaacagttgaatttaaggaacgttatcaaaatggagaatcactggattcattgctttacgaagcatttgcggttgtccgtgaaggtgccaaacgtgtcctaggtctcttcccttataaggttcaggtcatgggggggattgttcttcaccatggtgacgtgccagagatgcgtacaggggaagggaaaaccttgactgcgaccatgccggtatacctcaatgccctttcaggtaaaggggttcacgtagttacggttaatgaatacctgtcagaacgtgacgcgactgagatgggtgaattgtactcttggcttggtttgtcagtagggattaacttggctaccaaatctccaatggagaaaaaagaagcctatgagtgtgatattacttactcaactaactcagaaatcggatttgactaccttcgtgacaatatggtcgttcgcgctgaaaatatggtacaacgtccgcttaactatgccttggtcgatgaggttgactctatcttgattgacgaggctcgtacacctttgattgtatcaggtgccaatgcggttgaaaccagtcagttgtatcacatggcagaccactatgtaaaatctttgaacaaagatgactacatcatcgatgtgcagtctaagactattggtttgtctgattcagggattgacagggctgaaagctacttcaaacttgaaaacctctatgacatcgaaaacgtggctttgactcactttatcgataacgcccttcgtgccaactacatcatgcttctcgatattgactatgtggtgagcgaagagcaagaaatcttgattgtcgaccaatttacaggtcgtaccatggaaggtcgtcgttattctgatggattgcaccaagctattgaagccaaagaaggtgtgccaatccaggatgaaaccaagacatctgcctcaatcacgtaccaaaaccttttccgtatgtacaaaaaattgtctggtatgacgggtacaggtaagactgaggaagaagaatttcgtgaaatctacaacattcgtgttattccaatcccaacaaaccgtcctgttcaacgtattgaccactcagaccttctttatgcaagtatcgaatctaagtttaaagcggttgtcgaagacgttaaggctcgttaccaaaagggtcaacctgtcttggttggtacagtagcggttgaaactagtgactacatttctaagaaattggttgcagctggtgttcctcacgaagtcttgaatgccaaaaaccactatagagaagcccaaatcatcatgaatgctggtcaacgtggtgccgttaccatcgcaaccaacatggcgggtcgtggtaccgacatcaagcttggtgaaggtgttcgtgaacttggaggactttgtgttattggtacagaacgtcatgaaagtcgtcgtatcgataaccagcttcgtggacgttcaggtcgtcaaggagatccaggtgagtcacaattctacctatctcttgaagatgatttgatgaaacgttttggttctgaacgcttgaagggaatctttgaacgtctcaacatgtctgaagaggccattgagtctcgcatgttgacgcgtcaggttgaagcagctcagaaacgtgtcgaaggaaataaccacgatacccgtaaacaagtccttcaatacgatgatgtcatgcgtgaacaacgtgagattatctatgctcaacgttacgatgtcatcactgcagatcgtgacttggcacctgaaattcaggctatgatcaaacgcacgattgaacgtgtcgttgatggtcatgcgcgtgccaaacaagatgaaaaactagaggcaattttgaactttgctaagtataacttgcttccagaagattctattacgatggaagacttgtcaggcttgtctgataaggccatcaaggaagagcttttccaacgtgccttgaaggtttacgatagtcaggtttcaaaactacgcgatgaagaagcagttaaagaattccaaaaagttttgattctacgagtggtggataacaagtggacagatcatatcgatgcccttgatcaattgcgtaacgcggttggacttcgtggctatgctcagaacaaccctgttgttgagtatcaggcagaaggtttccgtatgtttaatgatatgattggttcgattgagtttgatgtgacacgcttgatgatgaaagcacaaattcatgaacaagaaagaccacaggcagaacgtcatatcagtacaacagcgactcgcaatatcgctgctcaccaagcaagtatgccagaagatttggatttgaaccagattggacgcaatgaactttgcccatgtggttctggtaagaaatttaaaaactgtcacggtaaaagacaataa

SEQ ID NO: 9374 - DNA, 369 bp, Streptococcus pneumoniae
  CDS (1)...(369)
atgagaatgatagttggacacggaattgacatcgaagaattggcttcgatagaaagcgcagttacacgacatgaaggatttgctaagcgtgtactgaccgctcaggaaatggagcgcttcaccagtctcaaaggacgcaggcaaatagaatatttagctggtcgctggtcggctaaggaggccttttccaaggctatgggaacgggcattagcaagctcggttttcaggatttggaagtcttgaacaatgaacgtggggcgccttattttagtcaggcaccattttcaggaaagatttggctgtctatcagccacaccgatcagtttgtgacagccagtgtcattttggaggaaaatcatgaaagctag

SEQ ID NO: 9375 - DNA, 1125 bp, Streptococcus pneumoniae
  CDS (1)...(1125)
gtgtcattttggaggaaaatcatgaaagctagtccacatagaccaaccaaggctctgattcatctgggagctattcgacaaaatattcagcaaatgggggctcatatccctcaaggaacgctcaagttggctgtggttaaggccaatgcttatggtcatggagctgttgccgttgccaaggcaattcaagatgatgttgatggcttttgcgtttccaatatcgatgaagccattgaactcagacaagctggactcagcaagccaatcctcattttaggagtttctgaaatcgaagctgttgctctagctaaagaatatgacttcaccttgacagtggctggactggagtggattcaagcactcttagataaggaagtggacctaactggattgacagtccacctcaagattgattcagggatgggacggattggttttagagaggcaagtgaggttgagcaggctcaagatttgctccaacaacacggtgtttgtgttgaaggaatctttacccactttgctactgctgatgaggaatcagatgactattttaatgcccagttagaacggtttaaaactattttagctagtatgaaggaagttccagagctggttcatgctagcaattctgcaacgactctttggcatgtagagactattttcaatgcggttcgtatgggagatgccatgtatggtctcaatccaagtggagcggtcttggatttgccttatgatttgataccggccttgaccttggagtctgctctggttcatgtcaagacagttccagctggagcttgcatgggctatggagcaacttatcaagcggatagcgagcaagtcatcgcgaccgtgccaatcgggtatgcagatggatggacaagagacatgcaaaatttctctgtcttggtagatggccaagcttgcccaattgtcggcagggtttcgatggaccaaatcactattcgattgcctaagctttatccgctaggaaccaaggtaaccttgattggctccaatggggataaggaaatcactgcaactcaggtagcgacctaccgcgtaaccattaactatgaggtggtttgcctcctcagcgaccgtattccgagagaatattattag

SEQ ID NO: 9376 - DNA, 1533 bp, Streptococcus pneumoniae
  CDS (1)...(1533)
gtgagggggagttttatgtttaaagttttacaaaaagttggaaaagcttttatgttacctatagctatacttcctgcagcaggtctacttttggggattggtggtgcactttcaaacccaaccacgatagcaacttatccaatactagacaatagtatttttcaatcgatattccaagtaatgagctctgcaggagaggttgtattcagtaatttgtcactacttctctgtgtgggattatgtattggcttagcgaaacgagataaaggaaccgctgcgttagcaggagtaactggttacttagttatgactgcaacgatcaaagctttggtaaaactttttatggcagaaggatctgcaattgatactggagttattggagcattagttgtcggaatagttgccgtatatttgcacaaccgatataacaatattcaattaccttccgctttaggattctttggaggttcacgcttcgttcctattgttacatcgttctcttctatcttgattggctttgtcttctttgttatttggccacctttccaacaacttcttgtttctacaggtggatatatttctcaggcgggtccaattggaacttttctatatggatttttaatgagactttctggagcagtaggcttacatcatataatttaccctatgttttggtatactgaacttggtggtgttgaaactgttgcaggacaaacagtggttggagctcaaaaaatattttttgctcaattagccgatccggcccattctggattatttacagaaggaacaaggttttttgcaggtcgtttctcaacaatgatgttcggtttaccggctgcctgtttagcgatgtaccatagtgttcctaaaaatcgtcgtaaaaaatacgcgggtttgttttttggagttgctttaacatcttttattaccggtattacagaaccaattgaatttatgtttctattcgtcagtccggttctatatgttgttcacgcattccttgatggtgttagcttctttattgcagacgtcttaaatatttcaataggaaacacattttcaggaggtgtaatcgatttcacattatttggaattttgcaggggaacgctaagacgaattgggttcttcagattccatttggacttatttggagtgttttgtattatattatttttagatggttcattactcaattcaacgttctaacgccaggacgaggagaagaagtagattctaaagaaatttctgaatccgcagattcaacttcaaatactgcagattatttaaaacaggatagcctacaaattatcagagccttgggtggatcaaataatatagaagatgtagatgcttgtgtgacacgtttacgtgtagctgtaaaagaagttaatcaagttgataaagcacttttaaaacaaattggtgcagttgatgtcttagaagtgaagggtggcattcaagcaatctatggagcaaaagcaatcttatataaaaatagtattaatgaaattttaggtgtagatgattaa

SEQ ID NO: 9377 - DNA, 885 bp, Streptococcus pneumoniae
  CDS (1)...(885)
atgacatactacgttgcaattgatatcggtggaactaacatcaagtatggtttggttgatcaagaggggcaacttcttgaatcacatgaaatgccaacagaggcgcataagggtggacctcatatcttacaaaagaccaaagatatcgtagctagttatttagaaaaaggcccagtagcaggtgttgccatatcttctgctgggatggtggatccggataagggtgagattttctatgctgggccgcaaatccctaactacgcaggcacccagttcaaaaaggaaatcgaagaaagctttactattccttgtgagattgaaaatgatgtcaactgtgcaggtcttgctgaggcagtatctggttcaggcaagggagcaagtgtgacactttgcttgaccattggaaccggtatcggtggttgcttgattatggataggaaagtcttccatggttttagtaattcagcctgtgaagtcgggtatatgcatatgcaggatggagcttttcaggatctcgcttctacaacagctttagtgaaatatgtagctgaagcccatggagaagatgttgatcagtggaatggccgacgtatctttaaggaagctactgaaggaaacaaaatctgcatggaaggtattgaccgtatggttgactatctaggaaaaggtctggcaaatatttgctacgttgccaatccagaagtggtcattcttggtggtggtatcatggggcaagaggctatcctcaaacctaagatccgcacagccttgaaagaggctttggtaccaagtttagcagaaaaaacacgattagaatttgcccatcaccaaaatacagcagggatgttgggtgcatattatcattttaagacaaaacaatcctag

SEQ ID NO: 9378 - DNA, 852 bp, Streptococcus pneumoniae
  CDS (1)...(852)
atggacaaaccagatatcgcaactatcattgattcacattttgaagaaatgacagacccagagcaagaaatcgctcgctattttttgcaagctgaaacgattacagatgatttatcttctcaacaagtcacccaaaaattacatatttctcaagctgctttgacccgctttgctaaaaagtgtggctttactggctaccgagaatttattttccaataccaacatcaggcagaaaatcaagccaaccaagtttccaagcacagtccactgaccaaacgagtcctcagaagttatagcaatatgagggaacaaacacaagacttgattgacgaaatccaactagaacgaattgcccagctaatcgaagatgctgagcgtatctacttctttggaacagggagttctggcctcgtcgcccgtgaaatgaaattacgttttatgcgattaggtgtggtctgcgaagctttgacagaccaagacggctttgcctggacaaccagcatcatggatgaaaattgtctagtactgggcttctcactttcaggctcaactccttctattttagatagtctattagatgccaaggagatgggggcaaagactgtactctttacaagtgttcccaataaaaatagccagacctatacagagactgttcttgtagccacccacagccaaccctcctatatccaacgaatatccgctcaacttcctatgctcttctttatcgatttgatttatgcctactttttggaaatcaatcgcgaaagcaaggaaaaaatctttaatagctactgggaaaataaaaaactcaacggctatcgtagacaaaaacgtgtaagaaaatcctag

SEQ ID NO: 9379 - DNA, 2058 bp, Streptococcus pneumoniae
  CDS (1)...(2058)
atgagactgatttgtatgagaaaatttaacagccattcgattccgattcggcttaatttattgttttcaatcgtcattttactctttatgaccattattggtcgtttgttgtatatgcaggttttgaacaaggatttttacgaaaaaaagctagcctcagctagtcagaccaagattacaagcagttcagcccgtggggaaatttatgatgctagtggaaaacctttggtagaaaatacgttaaagcaggttgtttcctttacgcgtagcaataaaatgacggctacagacttaaaagaaacagctaaaaagttactgacttatgtgagcatcagttctccaaatttgacagaacgccagctggcggattactatttggctgatcctgaaatctataaaaaaatagtggaagctctcccaagcgagaaacgcttggattcagatggcaatcgtctatccgaatcagaactgtataacaatgcggtcgatagtgtacaaacgagtcaactaaactatacagaggatgaaaagaaagaaatctatctttttagtcagttaaatgctgttggaaactttgcgacaggaaccattgctacagatcctctaaatgattctcaggtggctgttattgcctctatttcaaaggagatgcctggcattagtatttctacttcttgggatagaaaggttttggaaacttccctttcttctatagttgggagtgtatccagtgaaaaagctggtctcccagcggaagaagcagaagcctatcttaaaaaaggctattctctaaatgaccgtgtaggaacctcctatttggaaaagcaatatgaagagaccttacaaggaaaacgctcggtaaaagaaatccatctggataaatatggcaatatggaaagcgtggatacaattgaggaaggtagtaagggaaacaatatcaaactgaccattgatttggctttccaagatagcgtggatgctttactgaaaagttatttcaattctgagctagaaaatggtggagccaagtattctgaaggtgtctatgcagtcgcccttaacccaaaaacaggtgcggttttgtctatgtcagggattaaacatgacttgaaaacgggagagttgacgcctgattccttgggaacggtaaccaatgtctttgttccaggttcggttgtcaaggcggcgaccatcagctcaggttgggaaaatggagtcttgtcaggaaaccagaccttgacagaccagtccattgtcttccaaggttcagctcccatcaattcttggtatactcaggcttacggttcattccctatcacagcggtccaagctctggagtattcatcaaatacctatatggtccaaacagccttaggtcttatggggcaaacctatcaacccaatatgtttgtcggcaccagcaatctagagtctgctatggagaaactgcgttcaacctttggcgaatatggcttgggtactgcgacaggaattgacctaccagatgaatctactggatttgttcccaaagagtatagctttgctaattacattactaatgcctttgggcagtttgataactatacgccgatgcagttggctcagtatgtagcaactattgcaaataatggtgttcgtgtggctcctcgtattgttgaaggcatttatggtaataatgataagggaggactgggtgacttgattcagcaactgcaaccgacagagatgaataaggtcaatatatccgactccgatatgagcatcttgcaccaaggtttttatcaggttgcccatggtactagtggattgacaactggacgtgccttttcaaatggtgccttggtatccattagcggaaaaacaggtacagccgaaagctatgtggcagatggtcagcaagcaaccaataccaatgcggtggcctatgccccatctgataatccccaaatcgctgtcgcagtggtctttcctcataataccaatctaacaaatggtgtaggaccttccattgcgcgtgacattatcaatctgtatcaaaaataccatccaatgaattag

SEQ ID NO: 9380 - DNA, 1374 bp, Streptococcus pneumoniae
  CDS (1)...(1374)
atgaaattaacaatccatgaaattgcccaagttgttggagccaaaaatgatatcagtatctttgaggacactcagttagaaaaagctgagtttgatagtcgtttgattggaactggagatttatttgtgccacttaaaggtgcgcgtgatggccatgactttattgaaacagcctttgaaaatggtgcagcagtaaccttgtttgagaaagaggtctcaaatcatccttacattttagtagatgatgttttgacagcctttcaatccctagcatcctactatcttgaaaaaacgactgttgatgtctttgctgttacaggttcaaatggcaagacaacgactaaggatatgttggcgcatttactgtcaacaagatacaagacctacaaaacacaaggcaattacaataatgagattggccttccttacacagttcttcatatgcctgaaggaacagaaaagttggttttggagatgggacaggatcacttgggagatattcatctcttgtctgaattggctcgtccaaaaacagccatcgtgaccttggttggagaagctcatttggcctttttcaaagatcgttctgagattgctaaaggaaaaatgcaaattgcagacggaatggcttcaggttccttgcttttagcgccggctgaccctatcgtagaggactatttgccaattgataaaaaggtggttcgttttggtcaaggagcagagctggaaattactgacttggttgagcgtaaggacagtctgacctttaaggctaatttcttggaacaagcccttgatttgccagtaactggcaagtacaatgcgacaaatgctatgattgcatcctatgttgccttgcaagaaggagtttcagaggagcaaattcgtttggcattccaacatcttgaattgacgcgtaaccgtaccgagtggaagaaagcagccaatggagcagatatcctgtcagatgtttacaatgccaatccaactgctatgaaactgattttagagactttctctgccattccagccaatgaaggtggcaagaaaattgcagtgttggcggatatgaaggagcttggtgaccagtctgttcaacttcataatcagatgattttgagcctctccccagatgtgcttgatatcgttattttctatggagaagatattgctcagttggctcaattggccagtcaaatgttcccaatcggccacgtttactacttcaagaaaacagaagaccaggatcaatttgaagacctagtcaagcaggtcaaggaaagccttggagcccatgaccaaatcctgctcaaaggctctaactctatgaatctagccaagttggtagaaagtttagaaaatgaagacaagtga

SEQ ID NO: 9381 - DNA, 1260 bp, Streptococcus pneumoniae
  CDS (1)...(1260)
atgacattttcatttgatacagctgctgctcaaggggcagtgattaaagtaattggtgtcggtggaggtggtggcaatgccatcaaccgtatggtcgacgaaggtgttacaggcgtagaatttatcgcagcaaacacagatgtacaagcattgagtagtacaaaagctgagactgttattcagttgggacctaaattgactcgtggtttgggtgcaggaggtcaacctgaggttggtcgtaaagccgctgaagaaagcgaagaaacactgacggaagctattagtggtgccgatatggtcttcatcactgctggtatgggaggaggctctggaactggagctgctcctgttattgctcgtatcgccaaagatttaggtgcgcttacagttggtgttgtaacacgtccctttggttttgaaggaagtaagcgtggacaatttgctgtagaaggaatcaatcaacttcgtgagcatgtagacactctattgattatctcaaacaacaatttgcttgaaattgttgataagaaaacaccgcttttggaggctcttagcgaagcggataacgttcttcgtcaaggtgttcaagggattaccgatttgattaccaatccaggattgattaaccttgactttgccgatgtgaaaacggtaatggcaaacaaagggaatgctcttatgggtattggtatcggtagtggagaagaacgtgtggtagaagcggcacgtaaggcaatctattcaccacttcttgaaacaactattgacggtgctgaggatgttatcgtcaacgttactggtggtcttgacttaaccttgattgaggcagaagaggcttcacaaattgtgaaccaggcagcaggtcaaggagtgaacatctggctcggtacttcaattgatgaaagtatgcgtgatgaaattcgtgtaacagttgtcgcaacgggtgttcgtcaagaccgcgtagaaaaggttgtggctccacaagctagatctgctactaactaccgtgagacagtgaaaccagctcattcacatggctttgatcgtcattttgatatggcagaaacagttgaattgccaaaacaaaatccacgtcgtttggaaccaactcaggcatctgcttttggtgattgggatcttcgccgtgaatcgattgttcgtacaacagattcagtcgtttctccagtcgagcgctttgaagccccaatttcacaagatgaagatgaattggatacacctccatttttcaaaaatcgttaa

SEQ ID NO: 9382 - DNA, 801 bp, Streptococcus pneumoniae
  CDS (1)...(801)
gtgaggaatagaatgccaattacatcattagaaataaaggacaagacttttggaactcgattcagaggttttgatccagaagaagtcgatgaatttttagatattgtggttcgtgattacgaagatcttgtgcgtgcgaatcatgataaaaatttgcgtattaagagtttagaagagcgtttgtcttactttgatgaaataaaagattcattgagccagtctgtattgattgctcaggatacagctgagagagtgaaacaggcggcgcatgaacgttcaaacaatatcattcatcaagcagagcaagatgcgcaacgcttgttggaagaagctaaatataaggcaaacgagattcttcgtcaagcaactgataatgctaagaaagtcgctgttgaaacagaagaattgaagaacaagagccgtgtcttccaccaacgtctcaaatctacaattgagagtcagttggctattgttgaatcttcagattgggaagatattctccgtccaacagctacttatcttcaaaccagtgatgaagcctttaaagaagtggttagcgaagtacttggagaaccgattccagctccaattgaagaagaaccaattgatatgacacgtcagttctctcaagcagaaatggaagaattacaagctcgtattgaggtagccgataaagaattgtctgaatttgaagctcagattaaacaggaagtggaaactccaactcctgtagtgagtcctcaagttgaagaagagcctctgctcatccagttggcccaatgtatgaagaaccagaagtag

SEQ ID NO: 9383 - DNA, 2793 bp, Streptococcus pneumoniae
  CDS (1)...(2793)
atgaaactcaaagacacccttaatcttgggaaaactgaattcccaatgcgtgcaggccttcctaccaaagagccagtttggcaaaaggaatgggaatatgcaaaactttatcaacgtcgtcaagaattgaaccaaggaaaacctcatttcaccttgcatgatggccctccatacgctaacggaaatatccacgttggacatgctatgaacaagatttcaaaagatatcattgttcgttctaagtctatgtcaggattttacgcaccatttattcctggttgggatactcatggtctgccaatcgagcaagtcttgtcaaaacaaggtgtcaaacgtaaagaaatggacttggttgagtacttgaaactttgccgtgagtacgctctttctcaagtagataaacaacgtgaagattttaaacgtttgggtgtttctggtgactgggaaaatccatatgtgaccttgactcctgactatgaagcagctcaaattcgtgtatttggtgagatggctaataagggttatatctaccgtggtgctaagccagtttactggtcatggtcatctgagtcagcccttgctgaagcagagattgaataccatgacttggtttcaacttccctttactatgccaacaaggtaaaagatggcaaaggagttctagatacagatacttatatcgttgtctggacaacgactccatttactatcacagcctctcgtggtttgacggttggtgcagatattgattacgttttggttcaacctgctggtgaagctcgtaagtttgtcgttgctgctgaattattgactagcttgtctgagaaatttggctgggctgatgttcaagttttggaaacttaccgtggccaagaactcaaccacatcgtaacagaacacccatgggatacagctgtagaagagttggtaattcttggtgaccacgttacgactgactctggtacaggtattgtccatacagcccctggttttggtgaggacgattacaatgttggtattgctaataatcttgaagtcgcagtgactgttgatgaacgtggtatcatgatgaagaatgctggtcctgaatttgaaggtcaattctatgaaaaggtagttccaactgttattgaaaaacttggtaacctccttcttgcccaagaagaaatctctcactcatatccatttgactggcgtactaagaaaccaatcatctggcgtgcagttccacaatggtttgcctcagtttctaaattccgtcaagaaatcttggacgaaattgaaaaagtgaaattccactcagaatggggtaaagtccgtctttacaatatgatccgtgaccgtggtgactgggttatctctcgtcaacgtgcttggggtgttccacttcctatcttctacgctgaagatggtacagctatcatggtagctgaaactattgaacacgtagctcaactttttgaagaacatggttcaagcatttggtgggaacgtgatgccaaagacctcttgccagaaggatttactcatccaggttcaccaaacggcgagttcaaaaaagaaactgatatcatggacgtttggtttgactcaggttcatcatggaatggagtggtggtaaaccgtcctgaattgacttacccagccgacctttacctagaaggttctgaccaataccgtggttggtttaactcatcacttatcacatctgttgccaaccatggcgtagcaccttacaaacaaatcttgtcacaaggttttgcccttgatggtaaaggtgagaagatgtctaaatctcttggaaatactattgctccaagcgatgttgaaaaacaattcggtgctgaaatcttgcgtctctgggtaacaagtgttgactcaagtaatgacgtgcgtatctctatggatatcttgagccaagtttctgaaacttaccgtaagattcgtaacactcttcgtttcttgattgccaatacatctgactttaacccagctcaagatacagtcgcttacgatgagcttcgttcagttgataagtacatgacgattcgctttaaccagcttgtcaagaccattcgtgatgcctatgcagactttgaattcttgacgatctacaaggccttggtgaactttatcaacgttgacttgtcagccttctaccttgattttgccaaagatgttgtttacattgaaggtgccaaatcactggaacgccgtcaaatgcagactgtcttctatgacattcttgtcaaaatcaccaaactcttgacaccaatccttcctcacactgcggaagaaatctggtcatatcttgagtttgaaacagaagacttcgtccaattgtcagaattaccagaagttcaaacttttgctaaccaagaagaaatcttggatacatgggcagccttcatggactttcgtggacaagcacaaaaagccttggaagaagctcgtaatgcaaaagttatcggtaaatcacttgaagcacacttgacagtttatccaaatgaagttgtgaaaactctactcgaagcagtaaacagcaatgtagcacaacttttgatcgtgtctgagttgaccatcgcagaaggaccagctccggaagctgcccttagcttcgaagatgtagccttcacagttgaacgtgctactggtgaagtatgtgaccgttgccgtcgtatcgacccaacaacagcagaacgcagctaccaggcagttatctgtgaccactgtgcaagcatcgtagaagaaaactttgcggaagcagtcgcagaaggatttgaagagaaataa

SEQ ID NO: 9384 - DNA, 711 bp, Streptococcus pneumoniae
  CDS (1)...(711)
gtgggtctgatggcttatattgagatgaaacactgttacaagcgttatcaggttggggacacggagattgtggccaatcgtgatgtgaattttgagattgaaaagggggaactggttattatccttggtgcttcaggtgcaggcaagtcaacagttcttaaccttcttgggggaatggataccaatgatgaaggggaaatctggattgatggtgttaatattgcggattatagttcccaccagcgcaccaattaccgtagaaatgatgtggggtttgtttttcagttttataatctagtttctaatctgacagctaaggaaaatgtggaactggcttctgaaattgtgacagatgccttgaattctgatcaggtcttgacagatgtaggtctggctcatcgtctaaataactttccagcccagctttctggaggggagcaacagcgagtctccattgcacgcgcggtagccaaaaatcctaaaattctcctttgtgatgaaccgactggagccttggattatcagacgggcaagcaggttttgaaaattctccaagacatgtctcgtcaaaagggagcgacggtgatcatcgtgactcataatggagctttggcgcccattgctgatcgcgtgattcaaatgcacgatgccagtgtcaaggatgtggtgctcaaccagcatcctcaggatattgacagtttggagtactag

SEQ ID NO: 9385 - DNA, 2223 bp, Streptococcus pneumoniae
  CDS (1)...(2223)
atgccgaaagaagtgaatttaacaggcgaagaagttgtcgctttaaccaaagaatatttaacggaagaggatgttcattttgtccataaggccttggtctatgctgttgaatgccacagtggtcaatatcgcaaatcaggcgagccttatatcattcaccctatccaagtggcaggtattttagctaagctaaagctggatgctgtaacagtagcttgtggattcttgcatgatgtggtggaagatacagatgcgactttggacgatttggaaagagagtttggtcctgatgtgcggatgattgttgacggagttaccaagcttggcaaggtcgagtacaaatcgatcgaggagcaattagcggaaaatcatcgcaagatgctcatggccatgtctgaggacatccgcgttattttggtcaaactgtctgaccgcttgcacaatatgcggaccctgaaacatcttcgaaaagacaagcaggagcgtatttccaaagaaaccatggaaatctatgccccgcttgcccatcgtttggggatttccagtgtcaaatgggaattagaagacttgtctttccgttatctcaatccaacggagttttacaagattacccatatgatgaaggaaaagcgcagggagcgtgaggccttggtggatgaggtagtcacaaaattagaggagtatacgacagaacgtcacttgaaagggaagatttatggtcgtcccaagcatatttactcaattttccgcaaaatgcaggacaagagaaaacggtttgaggaaatctatgatctgattgctattcgttgtattttagatacccaaagtgatgtttatgccatgcttggttacgtgcatgaattttggaaaccgatgccaggtcgcttcaaagactatatcgccaaccgcaaggccaatggttatcagtctatccatacgactgtttatggaccaaaagggccgattgaattccagattcgaaccaaggaaatgcacgaggtggctgagtacggggttgcggctcactgggcttataagaaaggtataaaggggcaagttaacagcaaggaatcagctattggaatgaactggatcaaggagatgatggagctccaagaccaggctgatgatgctaaggaatttgtggactctgttaaggaaaactatttggctgaggagatttacgtttttaccccagatggagctgtccgttcccttcccaaagattcaggaccgattgattttgcctacgaaatccataccaaggtcggtgaaaaagcaactggtgccaaggtcaatggccgcatggttccactgacaaccaagttaaagacaggggatcaggttgaaattatcgccaacccgaactcctttggacctagccgtgactggctcaatatggtcaagactagcaaggcgcgcaataagattcgccagttctttaaaaaccaagataaggaattgtctgtcaacaagggtcgtgagatgctgatggctcagttccaagaaaatggctatgtggcaaataaatttatggacaagcgccacatggatcaagttctgcaaaagaccagttacaagacagaagactccctctttgcggccattggttttggggaaatcggtgcgattaccgtctttaaccgtctgactgaaaaggagcgccgtgaggaagagcgtgccaaggccaaggctgaggcagaggagcttgtcaaaggtggcgaggtcaaggttgaaaataaagaaactctcaaggtcaagcatgaggggggagtggttattgaaggtgcttctggtctcctagtgcggattgctaagtgttgtaaccccgtgcctggtgacgatattgttggctacattaccaagggtcgtggtgtggctattcaccgtgtggactgtatgaacctgcgtgcccaagaaaactacgagcaacgtctccttgatgtggaatgggaagaccagtactctagctcaaataaggagtatatggcccatatcgatatctacggtctcaaccgtacaggactgttgaacgatgtactgcaagttctttcaaatacaaccaagaatatttcaacggtcaatgcccaaccaaccaaggatatgaagtttgctaatatccatgtgtccttcggtattgccaacctctctacactgaccacggttgtcgataaaattaagagtgtgccagaagtttactctgtcaaacggaccaacggctag

SEQ ID NO: 9386 - DNA, 1983 bp, Streptococcus pneumoniae
  CDS (1)...(1983)
atgcttagaaactatgaaataataaaaaaggagaacatcatgattaacattactttcccagatggcgctgttcgtgaattcgaatctggcgtaacaacttttgaaattgcccaatctatcagcaattccctagctaaaaaagccttggctggtaaattcaacggcaaactcatcgacactactcgcgctatcactgaagatggaagcatcgaaattgtgacacctgatcacgaagatgcccttccaatcttgcgtcactcagcaactcacttgttcgcccaagcagctcgtcgtcttttcccagacattcacttgggagttggtccagccatcgaagatgggttctactacgatactgaccacacagctggtcaaatctctaacgaagaccttcctcgtatcgaagaagaaatgcaaaaaatcgtcaaagaaaacttcccatctattcgtgaagaagtgactaaagacgaggcacgtgaaatcttcaaaaatgacccttacaagttggaattgattgaagaacactcagaagacgaaggcggtttgactatctatcgtcagggtgaatatgtagacctctgccgtggacctcacgttccatcaacaggtcgtatccaaatcttccaccttctccatgtagctggtgcgtactggcgtggaaacagcgacaacgctatgatgcaacgtatctacggtacagcttggtttgacaagaaagacttgaaaaactaccttcaaatgcgtgaagaagctaaggaacgtgaccaccgtaaacttggtaaagagcttgacctctttatgatttcacaagaagtgggacaaggtttgccattctggttgccaaatggtgcgactatccgtcgtgaattggaacgctacatcgtaaacaaagagttggtttctggctaccaacacgtctacactccaccacttgcttctgttgagctttacaagacttctggtcactgggatcattaccaagaagacatgttcccaaccatggacatgggtgacggggaagaatttgtccttcgtccaatgaactgtccgcaccacatccaagttttcaaacaccatgttcactcttaccgtgaattgccaatccgtatcgctgaaatcggtatgatgcaccgttacgaaaaatctggtgccctcactggccttcaacgtgtacgtgaaatgtcactcaacgacggtcacctattcgttactccagaacaaatccaagaagaattccaacgtgcccttcagttgattatcgatgtttatgaagacttcaacttgactgactaccgcttccgcctctctcttcgtgaccctcaagatactcataagtactttgataacgatgagatgtgggaaaatgcccaaaccatgcttcgtgcagctcttgatgaaatgggcgtggactactttgaagccgaaggtgaagcagccttctacggaccaaaattggatatccagattaaaactgcccttggaaaagaagaaaccctttctactatccaacttgatttcttgttgccagaacgcttcgacctcaaatacatcggagctgatggcgaagatcaccgtccagtcatgatccaccgtggggttatctcaactatggaacgcttcacagctatcttgattgagaactacaagggggccttcccaacatggctggcaccacaccaagtaaccctcatcccagtatctaacgaaaaacacgtggactacgcttgggaagtggccaagaaactccgtgaccgcggtgtccgtgcagacgtagatgagcgcaatgaaaaaatgcagttcaagatccgtgcttcacaaaccagcaagattccttaccaattaattgttggagacaaagaaatggaagacgaaacagtcaacgttcgtcgctacggccaaaaagaaacacaaactgtctcagttgataattttgttcaagctatcctagctgatatcgccaacaaatcacgcgttgagaaataa

SEQ ID NO: 9387 - DNA, 270 bp, Streptococcus pneumoniae
  CDS (1)...(270)
atggcaatctcaaaagagaaaaaaaatgaaatcattgcacaatatgcacgtcacgaaggtgatacaggttcagtagaggttcaagttgctgtccttacttgggaaatcaaccaccttaacgaacacatcaaacaacacaaaaaagaccacgctacttaccgtggattgatgaaaaaaatcggtcgccgtcgtaacttgcttgcatacttgcgtaaaaacgacgttaaccgttaccgtgagttgatcaactctctaggacttcgtcgctaa

SEQ ID NO: 9388 - DNA, 750 bp, Streptococcus pneumoniae
  CDS (1)...(750)
atgttttatacttatttgcgtggattagttgtattgctcttatggtccatcaatggcaatgctcactatcataatactgataaaattcctaatcaagatgaaaattatattttagttgcgcctcaccgtacctggtgggatcctgtttatatggcctttgcgaccaagccaaaacagttcatctttatggcaaaaaaagaactctttaccaaccgtatctttggttggtggattcgtatgtgtggcgcctttcccatcgaccgtgaaaatcccagcgcctcagccatcaaatatcctatcaacgttctcaaaaaaagtgaccgctctctcatcatgtttccaagtggtagccgccactcaaacgatgtcaaggggggcgcagcactgattgccaaaatggccaaggtccgtatcatgccggttacctacaccggtcccatgactttgaagggcttgattagccgtgaacgtgtcgatatgaactttggaaatccaatcgatatctcagatatcaagaaaatgaatgatgaaggcattgaaacagtcgccaatcgtattcaaacagaattccaacgtctggacgaagaaacgaaacaatggcacaatgataaaaaaccaaatccactctggtggtttatccgcatccctgccctcatccttgctattatcctcgctatcctaaccatcatctttagctttatcgcaagcttcatctggaacccagataagaaaagagaagaacttgcatag

SEQ ID NO: 9389 - DNA, 213 bp, Streptococcus pneumoniae
  CDS (1)...(213)
atgaacatgaaaatcacacttatacctgaacgatgtatcgcctgtggactttgccaaacttattctgatttatttgattaccacgataatggaatcgtgcgtttttacgatgaccctgaccaactggaaaaagaaatttctcctagtcaggatgtcttagaggctgttaaaaattgcccaactcgcgccctgattggaaaccaggaagcctaa

SEQ ID NO: 9390 - DNA, 987 bp, Streptococcus pneumoniae
  CDS (1)...(987)
atgcccgttacgattaaagacgtggccaaggctgctggtgtttcgccttcaaccgtaacccgtgttattcaaaataaatcaaccattagcgacgaaacaaaaaaacgcgttcgcaaagctatgaaggaactcaactaccacccaaacctcaacgctcgtagcttggtaagcagctatactcaggttatcggattagttcttcctgatgactcagacgccttctaccagaatcctttctttccatcggttctacgtggcatctctcaagtcgcatctgaaaaccactatgccattcagatagcaacagggaaagatgagaaggagcgtctcaacgctatttcacaaatggtctacggcaagcgtgtagatgggctaatctttctctatgcccaagaagaagaccctctcgtaaaactcgtcgcagaagaacagttccccttccttatcctaggtaaatctctatctcctttcatcccacttgtcgacaacgacaatgttcaagctggttttgatgcgactgaatatttcatcaaaaaaggctgcaaacgcattgcctttatcggaggaagtaaaaagctcttcgtgaccaaagaccgtttaacaggctatgaacaggcgcttaaacattacaaacttaccactgacaacaatcgcatctactttgccgacgagtttctggaagaaaagggctataaatttagcaagcgattattcaagcacgatccacaaattgatgctatcatcacaaccgatagcctcctagctgaaggtgtttgtaactatattgccaaacaccagctggatgtccctgttctcagctttgactcggttaatcccaagctcaacttggcagcctatgtcgatatcaatagtttagagcttggtcgtgtttcccttgaaactattctccagattattaatgataataaaaacaataaacaaatttgttaccgtcaattgatcgcccacaaaattatcgaaaaataa

SEQ ID NO: 9391 - DNA, 783 bp, Streptococcus pneumoniae
  CDS (1)...(783)
atggtttatacttcactttcctcaaaagatggcaattacccctatcagctcaacattgcccacctctacggaaatctcatgaatacctacggggacaatggaaacatcctcatgctcaagtatgtggctgaaaaactgggagcccatgtgaccgttgacatcgtttctctccatgatgactttgatgaaaatcactacgacatcgcctttttcggtggtggtcaagactttgaacaaagtatcattgcagacgacctacctgctaaaaaagagagcattgacaactacatccaaaacgacggtgtagttctggctatctgcggtggtttccaactattgggtcaatattatgttgaagcttcaggaaaacgtatcgaagggctaggggtcatgggacactacacgctcaaccagaccaataaccgttttatcggtgacatcaagattcacaatgaagatttcgatgaaacctactatggatttgaaaatcaccaaggccgtaccttcctctctgatgaccaaaaaccgctgggacaggttgtctatggaaatggaaacaacgaagaaaaggtcggtgaaggggttcattataagaatgtctttggttcctacttccacgggcctatcctctctcgtaatgccaatctggcttatcgcctagttactactgccctcaagaagaaatatggtcaggacatccaactccctgcctatgaggatatcctcagccaagaaatcgctgaagagtacagtgacgtcaaaagcaaggctgacttttcttaa

SEQ ID NO: 9392 - DNA, 1344 bp, Streptococcus pneumoniae
  CDS (1)...(1344)
atgaacttaaaaactactttgggccttcttgctgggcgttcttcccacttcgttttaagccgtcttggacgtggaagtacgctcccagggaaagtcgcccttcaatttgataaagatattttacaaagcctagctaagaactacgagattgtcgttgtcactggaacaaatggaaaaaccctgacaactgccctcactgtcggcattttaaaagaggtttatggtcaagttctaaccaacccaagcggtgccaacatgattacagggattgcaacaaccttcctaacagccaaatcttcaaaaactgggaaaaatattgccgtcctcgaaattgacgaagccagtctatctcgtatctgtgactatatccagcctagtctttttgtcattactaatatcttccgtgaccagatggaccgtttcggtgaaatctatactacctataacatgatattggatgccattcgaaaagttccaactgctactgttctccttaacggagacagtccacttttctacaagccaactattccaaaccctatagagtattttggttttgacttggaaaaaggaccagcccaactggctcactacaataccgaagggattctctgtcctgactgccaaggcatcctcaaatatgagcataatacctatgcaaacttgggtgcctatatctgtgaaggttgtggatgtaaacgtcctgatctcgactatcgtttgacaaaactggttgagttgaccaacaatcgctctcgctttgtcatagacggccaagaatacggtatccaaatcggcgggctctataatatctataacgccctagctgctgtggccatcgcccgtttcctaggtgccgattcgcaactcatcaaacagggatttgacaagagccgtgctgtctttggacgccaagaaacctttcatatcggtgacaaggaatgtacccttgtcttgattaaaaatccagtcggtgcaacccaagctatcgaaatgatcaaactagcaccttatccatttagcctatctgtcctccttaatgccaactatgcagatggaattgacactagctggatctgggatgcagactttgaacaaatcactgacatggacattcctgaaatcaacgctggcggtgttcgtcattctgaaatcgctcgtcgcctccgagtgactggctatccagctgagaaaatcactgaaacgagtaatctggagcaagttctcaagaccattgagaatcaagactgcaagcatgcctatattctggcaacttatactgccatgctggaatttcgtgaactgctggctagtcgtcagattgttagaaaggagatgaactaa

SEQ ID NO: 9393 - DNA, 1575 bp, Streptococcus pneumoniae
  CDS (1)...(1575)
gtgaaatttaatgaattaaacttgtctgctgatttgctagcagaaattgaaaaagctggttttgtagaagctagtcctatccaagaacaaactattcctttggcccttgaaggcaaggatgttatcggtcaagctcagactggtacaggaaaaactgcagcctttggcttgcctacccttgaaaaaatccgtacagaagaagcgactatccaagctttggtcatcgctccaactcgtgaactagctgtccaaagtcaagaagaactcttccgctttggtcgtagtaagggagtcaaagtccgttcagtatatggcggatcaagcattgaaaaacaaattaaggctcttaaatctggtgcccatatcgtggtgggaactccaggtcgcctcttggacttgattaaacgcaaggccttgaaattacaagacattgaaacccttatccttgacgaagcggatgaaatgcttaacatgggcttccttgaagacatcgaagccattatttcccgtgtacctgagaaccgtcaaactttgcttttctcagcaactatgccagatgccatcaaacgtatcggtgttcagtttatgaaagcccctgaacatgtcaagattgcggctaaggaattgacaacagaattggttgaccagtactatatccgtgttaaggaacaagaaaaatttgacaccatgactcgtctcatggatgtggcacaaccagaactcgctattgtatttggtcgtaccaaacgccgtgtggatgaattgactcgtggtttgaaaattcgtggcttccgtgcagaaggaattcatggcgacctagaccaaaacaaacgtcttcgtgtccttcgtgactttaaaaatggcaatcttgatgttttggttgcgacagacgttgcagcgcgtggtttggatatttcaggtgtgacccatgtctacaactacgatattccacaagatcctgagagttatgttcaccgtatcggtcgtacaggtcgtgctggtaagtcaggtcaatctattacttttgttgctccaaacgaaatgggttaccttcaaatcattgaaaacttgactaagaaacgcatgaaaggtctcaaacctgcaagtgtagaagaatccttccaatcaaaaaaacaggtagctctcaagaaaatcgaacgtgattttgcagatgaaaccattcgtgccaactttgagaaatttggtaaggatgctcgcaaattggctgctgagtttactccagaagaattggcaatgtatatcttgagtctgacagtccaagacccagatagccttccagaagtggagattgcacgtgaaaaaccactaccgtttaaaccatcaggtaatggtttcggtggtaaagctaagggaggtcgtggaggccgtcgtggggacgaccgtcgagagcgtgatcgccgtggcaatggtcgccgtgatgagttcaaaaaaggaagtcgtggcaacgatcgttttgataaggaaaaacgttaccgtaaggataataaaaaaccacgcaatactttaagcgaaaagcaaacaggctttgttattcgtaacaaaggcgataaataa

SEQ ID NO: 9394 - DNA, 1764 bp, Streptococcus pneumoniae
  CDS (1)...(1764)
atgaaacgtagtatgtatgctggtcgtgttcgtgaggaacacatcggacaagaaataaccttgaaaggatgggttggccgtcgtcgtgaccttggtggtttgatctttatcgatcttcgtgaccgtgaaggaatcatgcagttggttatcaaccctgaaaaagtatctgcagaggttatggcaacagctgaaagccttcgtagcgaatttgttattgaggtgactggtcaggtcgctgcgcgtgagcaagccaatgataagttgccaactggtgcggttgagttaaacgtgacagctcttattgtgcttaacacagctaagacaacaccatttgagattaaggatggcattgaggcaaatgacgatacacgtttgcgttaccgttaccttgaccttcgtcgtccagaaatgttggaaaatcttaaacttcgtgccaaggtgacccactctatccgcaactacttggatgagttggagtttatcgacgtggagacaccattcctttctaagtcaacgcctgaaggggcgcgtgattatttagtgccgtctcgtgttaataaggggcatttttacgctcttcctcaaagtccacaaatcacgaaacagctcttgatgaatgctggttttgaccgttactaccaaatcgttaaatgtttccgtgacgaggacttgcgtggagaccgccagcctgaatttactcaggtcgacttggaaacgtccttccttactgagcaagaaatccaagatattacagaaggcttgatcgcgcgcgtgatgaaggaaacaaaagacatcgaagtaacgctaccgttccctcgtatgaaatacgatgatgctatggctctttacggttctgacaagccagatactcgttttgacatgttgcttcaggacttgacagaagtggtcaaaggtgtagactttaaagtcttttcagaagcacttgctgtaaaagcgattgtggtcaaaggagctgcggacaactattcacgtaaagacatcgacaagatgacggaagtagccaaacagtatggtgccaaaggtcttgcttgggtcaaggtggttgatggagaattaaacggaccagttgccaagttcttgactggtatccaagaagaattgacaacagcgcttgctcttgaagataaggacttggttctctttgtggcggatacgcttgaagtggctaatgcaacactgggtgcccttcgtggacgtattgctaaagagcttggcttgattgataatgataagttcaacttcctttgggtggttgactggccgatgtttgaatggtctgaagaagaaggccgctacatgagcgcccaccatccattcacacttccacaggaagagactgctcacgaattagaaggtgatttggctaaggttcgtgccattgcttacgatatcgtcttgaacggttatgagcttggtggtggtagccttcgtatcaaccaaaaagaccttcaagaacgcatgttcaaggctcttggtttctcagctgaagaagccaatgaccagtttggtttccttcttgaagccatggactatggtttcccaccacacggtggtttggctatcgggcttgaccgttttgtcatgttgcttgctggagaagaaaatatccgtgaagtcattgcctttcctaagaacaacaaggcaactgacccaatgacacaagctccatcaacagtcgctctcaaacaactagaggaactcagcttacaagtagaagaagatgaaacaagcaaaacgaattaa

SEQ ID NO: 9395 - DNA, 759 bp, Streptococcus pneumoniae
  CDS (1)...(759)
atgtcacgtaaaccatttatcgctggtaactggaaaatgaacaaaaatccagaagaagctaaagcattcgttgaagcagttgcatcaaaacttccttcatcagatcttgttgaagcaggtatcgctgctccagctcttgatttgacaactgttcttgctgttgcaaaaggctcaaaccttaaagttgctgctcaaaactgctactttgaaaatgcaggtgctttcactggtgaaactagcccacaagttttgaaagaaatcggtactgactacgttgttatcggtcactcagaacgccgtgactacttccatgaaactgacgaagatatcaacaaaaaagcaaaagcaatctttgcgaacggtatgcttccaatcatctgttgtggtgaatcacttgaaacttacgaagctggtaaagctgctgaattcgtaggtgctcaagtatctgctgcattggctggattgactgctgaacaagttgctgcctcagttatcgcttatgagccaatctgggctatcggtactggtaaatcagcttcacaagacgatgcacaaaaaatgtgtaaagttgttcgtgacgttgtagctgctgactttggtcaagaagtcgcagacaaagttcgtgttcaatacggtggttctgttaaacctgaaaatgttgcttcatacatggcttgcccagacgttgacggtgcccttgtaggtggtgcgtcacttgaagctgaaagcttcttggctttgcttgactttgtaaaataa

SEQ ID NO: 9396 - DNA, 537 bp, Streptococcus pneumoniae
  CDS (1)...(537)
atgaatgaggtaaagaaaatggtagaattgaaaaaagaagcagtaaaagacgtaacatcattgacaaaagcagcgccagtagcattggcaaaaacaaaggaagtcttgaaccaagctgttgctgatttgtatgtagctcacgttgctttgcaccaagtgcactggtatatgcatggtcgtggtttccttgtatggcatccaaaaatggatgagtacatggaagctcttgacggtcaattggatgaaatcagcgaacgcttgattacactcggtggaagcccattctctacattgacagagttccttcaaaatagtgaaatcgaagaagaagctggtgaataccgtaatgttgaagaaagcttggaacgtgttcttgttatctaccgttacttgtcagaacttttccaaaaaggtttggatgtcactgatgaagaaggtgacgatgtgacaaacggtatctttgtaggcgctaaaactgaaacagataaaacaatttggatgcttgcagccgaacttggacaagcacctggtttgtaa

SEQ ID NO: 9397 - DNA, 507 bp, Streptococcus pneumoniae
  CDS (1)...(507)
atgactaagaaaatcgtagctatttgggcccaggatgaagagggtttgattggtaaggaaaatcgtctgccttggcatttgccagcagaattgcagcactttaaagaaacaactctgaatcatgctatcttgatggggcgtgtgacctttgatgggatggggcgtcgcttgcttccaaaacgggaaaccctgattttgacgcgtaatccggaagaaaagatagatggggttgctacttttcaggacgtccagtctgttcttgactggtatcaggatcaagaaaagaatctctacattatcggtgggaagcaaatttttcaggcttttgaaccttaccttgatgaagtgattgtcactcacattcatgctcgggtggaaggagatacctatttccctgaagagcttgacttgtctctttttgagacagtttcaagcaaattttacgccaaagatgagaagaatccttatgattttaccatccaataccgcaagagaaaggaagtctaa

SEQ ID NO: 9398 - DNA, 912 bp, Streptococcus pneumoniae
  CDS (1)...(912)
atgagtttcacagtagcagtaaaagaagaaatcctgggccaacaccatctgagctggcatgaattatctgccattatcaaaatgtctggtagcatcggtctctcgacttcgggcttgactttgtcagttgtgacagaaaatgccaaactggcccgtcacctctatgagtcctttctccatttctatgaaatcaaatctgaaattcgtcaccaccaacggagcaatcttcgcaagaatcgcgtctataccgtttttacagatgaaaaggtgcaggatttgttaagtgatttgcacttggcagactctttctttggcctggaaacaggtattgatgaggcgattttatcggatgaggaagcaggtcgtgcctatctctgtggcgctttcttggcaaatgggagcattcgtgaccctgagtcaggcaagtaccagttggaaatcagttctgtttatctggaccacgcgcaaggaattgcctcccttctccaacagtttttactggatgccaaggtgcttgagcgcaagaagggggctgtgacctatctccagcgagcagaagacattatggacttcttgatagtaataggagccatgcaggcacgtgatgattttgagcgggttaagattttgcgagaaacccgtaacgacctcaatcgagctaataatgccgagacagctaatatcgctcggacagtttctgccagcatgaagaccattaacaatatcagtaaaatcaaagatatcatgggcttagaaaatttgccagtagatttgcaggaagtggcgcaactgaggattcagcacccagactactctatccagcagttagcagatagtctcagcacccctctgaccaaaagtggtgtcaatcacagactcagaaaaatcaataagatagcggatgaattataa

SEQ ID NO: 9399 - DNA, 1353 bp, Streptococcus pneumoniae
  CDS (1)...(1353)
atgggtaaatattttgggactgatggagtccgtggagaagctaacctagagctaacaccagaattagcctttaaactaggacgttttggaggctatgttcttagtcaacatgaaacggaagcgccgaaagtctttgtaggacgtgacacacgtatttcaggggaaatgctggaatcggccttggtggcaggtctcctttcagtagggattcacgtatacaaacttggtgtccttgcaacaccagcagtagcttacttggttgaaactgaaggagcaagtgccggtgtcatgatttctgctagccacaacccagcccttgataacggaatcaagttctttggcggtgatggcttcaaactagatgatgaaaaagaagcagaaattgaagccttgctagatgctgaggaagacactcttcctcgtccaagtgcagaaggcttaggaattttggtagattatccagaaggcttgcgtaagtatgaaggataccttgtttcaactggaactcctcttgatggaatgaaggttgccttggatacagctaatggagcagcttctaccagtgcccgtcaaatctttgcagaccttggtgcccaattgacggttatcggggaaacaccagacggtcttaacatcaaccttaatgttggttcaacacatccagaagcccttcaagaagtggtcaaagaaagtgggtcagctattggtttggcctttgatggagacagtgaccgcttgattgctgttgatgagaatggtgacatcgtcgatggtgacaagattatgtacatcatcggaaaatacctttctaaaaaaggacaattggctcaaaatacaattgtgacaactgttatgtctaaccttggtttccacaaggccttgaatcgcgaaggtattaacaaggcagttactgcagttggtgaccgctacgttgttgaagaaatgagaaaatcaggttacaaccttggtggtgaacagtctggtcacgttatcttgatggattacaataccacaggtgatggtcaattatcagcagttcaattgactaaaatcatgaaggaaactggtaagagcttatcagagttggcggcagaagtaacgatttatccacaaaaattagttaatatccgagtggaaaacgtcatgaaggaaaaggccatggaagtgccagctatcaaggccatcatcgagaagatggaagaagaaatggcggggaacggccgtatccttgttcgtccaagtggaacagaacccctcttgcgtgttatggcagaagcgcctacaacagaagaagtagactactatgttgataccatcacagatgtagttcgtgctgaaattgggattgactaa

SEQ ID NO: 9400 - DNA, 768 bp, Streptococcus pneumoniae
  CDS (1)...(768)
atgagtattcgagtaattattgccggttttaagggaaagatgggccaggctgcttgtcagatggtattgactgatccagacttggacttggtggcagttttggatccttttgagtctgagtcagaatggcagggtattcctgttttcaaggataaggctgatttagctggttttgaagcggatgtctgggtagattttactactccagctgttgcctacgaaaatacacgttttgctcttgaaaatggctttgctccagtagttggaacgactggtttcacgagtgaagaaattgcagagctaaaagaattttctcgtgcccaagacttgggtggcctgattgcccctaactttgccttgggtgctgtcttactcatgcaatttgcgacgcaggctgccaaatatttcccaaatgtggagattattgagctccatcatgacaagaaaaaggatgctccgagtggaacagccattaaaacagctgagttgatggcagaggttcgagagtccattcagcaaggcgcagcagatgaggaagagctgattgctggtgctcgtggtgctgactttgatggtatgcgcatccactcagttcgtttgccaggcttggtagctcatcaagaagtcatctttggcaatcagggagaagggttgaccctccgtcatgactcctatgatcgcatctccttcatgacaggagtcaatttgggaattaaagaagttgtcaagcgtcatgagcttgtctatggattagaacacttattatga

SEQ ID NO: 9401 - DNA, 1872 bp, Streptococcus pneumoniae
  CDS (1)...(1872)
atgagtgattttatcgttgaaaaactaagtaaatccgttggtgacaagaccgtttttagggatatttcctttattatccatgacttagacagaattggtttaatcggtgtcaatgggactggcaagaccacccttttggacgtcctttctggtgtttctggatttgatggggatgtcagtcctttttcagctaaaaatgattaccagattggttacttgactcaggatcctgattttgatgatagaaagacagttttggatacggttctatctagtgaactcaaggaaatccagctcattcgtgagtatgaattgattatgctcgactatagtgaggacaagcaggcgcgtttggaacgtgtcatggcagagatggactctctccaagcttgggaaatcgaaagtcaggtcaagaccgttcttagcaaattgggcattcaagacttatctactcctattggggaattgtcaggtggtctgagaagacgggtacagttggcacaagtcttacttggcaaccacgacctcttgcttttggatgagccgaccaaccatctggatattgcgattattgagtggctgaccctctttttgaaaaattctaagaagaccgtcctttttatcactcacgatcgttatttcttagacgctttgtcaacacggattttcgagttggatcgtgcaggcttgaccgagtaccagggaaattaccaggactatgttcgcctaaaggcggaacaggatgagcgcgacgcggctcttcttcacaaaaaagaacaactctacaaacaagaattggcctggatgcgcagacaaccgcaggcgcgtgcgaccaagcagcaggcccgtatcaatcgattccatgatctgaaaaagaaagtttcaggcagtagtgctgagacagacttgaccatgaactttgaaaccagtcggattgggaagaaagtcatcgagtttcaggctgtttcctttgcctatgaaaacaagcctattttgcaagattttaatctcttggtgcaggccaaagaccgtatcggaatcgttggggacaatggtgttggaaaatcaaccctgctcaacttgattgcaggaagtcttgagccaactaaaggacaagttgtgattggggaaactgttcgcatcgcctatttctctcagcaaattgagggtttggatgaaagcaagagagttatcaattacctgcaggaagtggcagaggaggtcaagaccagtggcggttctacgacttcgattgcagagttgctggagcagttccttttcccacgttcgacgcatggaaccttgattgagaaattgtcagggggtgagaaaaaacgtctttatctcctcaaactgcttttggaaaaaccaaatgttcttcttttagacgagccaaccaatgacctagatattgcaactttgacagtcttagagaatttcttgcaaggttttgcaggtcccgttttaacagtcagtcacgaccgctatttcttggataaggtagcgaccaagattctcgcttttgaggatggcaagattcgtcctttctttggtcattacaccgactatcttgatgaaaaagcttttgaaacagatatggccaatcaagtgcaaaaggtcgaaaaggaaaaagtggtcaaggttcgagaagacaagaaacgcatgacctaccaagaaaagcaggagtgggcaagtattgaaggtgatattgaaaccttggaaaaacgtatcgctgctattgaagaggaaatgcaggctaacggctctgactttggtaagctggctactctccaaaaagaattggatgagaaaaatgaagcactccttgaaaaatacgaacgctatgagtatctcagtgaatttgatagttaa

SEQ ID NO: 9402 - DNA, 1185 bp, Streptococcus pneumoniae
  CDS (1)...(1185)
atgaagcaatctatctcaaatctcaagttagctgagcgtggagccattatcagtatttcgacctatttgatcttgtctgcagccaaattagcagctggtcatctccttcattcatccagtttggtggccgatggttttaataacgtatcggacatcattggaaatgtggccctcttaatcgggattcggatggcgcgccagcctgcagaccgtgaccaccgttttggtcattggaagattgaagatttggcaagcttgatcacttctatcatcatgttctatgtcggtttcgatgttctaagagataccattcaaaagattctcagtcgggaagaatcggtcattgatcctcttggtgcaactctaggaatcatttctgcagcgattatgtttgtggtctatctctacaatactcgcctcagtaagaaatccaactccaaagcgctgaaggcagctgctaaggacaatctttctgacgctgttacctcacttggaaccgccattgccatcctagctagtagtttcaattatccgattgtggataaactggttgctatcatcatcactttctttatcttgaagactgcctatgatatcttcatcgagtcttcctttagtctttcagatggctttgacgaccgcctgctcgaggactaccaaaaggctatcatggaaattcccaaaatcagcaaggtcaaatcgcaaagaggtcgcacctacggtagcaacatctacctggatattacactagagatgaatcctgacttgtctgtttttgaaagccatgaaatcgcggatcaggtcgagtctatgctggagaatcgttttggcgtctttgataccgatgtccatatcgaaccagcacctatccctgaggatgaaattttagacaatgtctataaaaaattgcttatgcgtgaacaattgatcgaccaaggaaaccaactagaagaactcttgactgatgattttgtctatattcgccaagatggagagcagatggataaagaggcttataagaccaaaaaagagttaaattctgctatcaaggacattcaaattacttccatcagtcaaaaaaccaaacttatctgctatgagttagatggtatcatccataccagtatctggcgtcgccacgaaacctggcaaaatatctttcatcaagaaaccaaaaaagaatag

SEQ ID NO: 9403 - DNA, 291 bp, Streptococcus pneumoniae
  CDS (1)...(291)
atggctaaatacgaaattctttatatcattcgtccaaacattgaagaagaagctaaaaacgctttggtagcacgttttgactctattttgactgacaacggtgcaactgttgttgaatcaaaaacttgggaaaaacgtcgtcttgcatacgaaatccaagatttccgtgaaggactttaccacatcgttaacgttgaagcaaatgacgatgcagctcttaaagagtttgaccgtctttcaaaaatcaacgctgacattcttcgtcacatgatcgtcaaaattgacgcgtaa

SEQ ID NO: 9404 - DNA, 471 bp, Streptococcus pneumoniae
  CDS (1)...(471)
atgattaacaatgttgtacttgtagggcgtatgacacgtgacgctgagttgcgttataccccatcaaatgtagcagttgcgacttttactcttgcagtaaaccgtacatttaagagtcaaaatggtgaacgtgaggctgattttatcaatgtcgttatgtggcgccaacaggctgaaaatcttgctaactgggctaaaaaaggctcacttatcggggtgacaggtcgtatccagactcgtagttacgataaccagcaaggacaacgtgtctacgtgacagaggtcgtggctgagaatttccaaatgttggaaagccgtagtgtgcgtgagggtcacacaggtggagcttactctgcaccaactgcaaactattcagcacctacaaattcagtaccagacttttcacgtaatgaaaatccatttggagcaacaaacccattggatatttcagatgatgatttaccattctaa

SEQ ID NO: 9405 - DNA, 240 bp, Streptococcus pneumoniae
  CDS (1)...(240)
atggctcaacaacgtcgtggcggattcaaacgccgtaaaaaagttgattacatcgcagcaaacaaaattgaatatgttgattacaaagatactgagcttcttagccgtttcgtttcagaacgtgggaaaatccttcctcgtcgtgtaacaggaacttcagctaaaaaccaacgtaaagtaacaacagctatcaaacgcgctcgcgtaatggctttgatgcctttcgtaaacgaagattaa

SEQ ID NO: 9406 - DNA, 936 bp, Streptococcus pneumoniae
  CDS (1)...(936)
atgtccaagattctagtatttggtcaccaaaatccagactcagatgccatcgggtcatctgtagcttttgcctaccttgcaaaagaagcttacggtttggatacggaagctgttgcccttggaactccaaatgaagaaacagcctttgtcttgaactattttggtgtggaagcaccacgtgttatcacttctgccaaagcagagggggcagagcaagttatcttgactgaccacaatgaattccaacaatctgtatcagatatcgctgaagtagaagtttacggtgttgtagaccaccaccgtgtggctaactttgaaactgcaagcccactttacatgcgtttggagccagttggatcagcgtcttcaatcgtttaccgtatgttcaaagaacatggtgtagctgtgcctaaagagattgcaggtttgatgctttcaggtttgatttcagatacccttcttttgaaatcaccaacaacacacccaacagataaaatcattgctcctgaattggctgaattggctggtgtaaacttggaagaatatggtttggcaatgttgaaagctggtaccaacttggctagcaaatctgctgaagaattgattgacatcgatgctaagacttttgaactcaacggaaataatgtccgtgttgcccaagtgaacacagttgacatcgctgaagttttggaacgccaagcagaaattgaagctgcaatgcaagctgccaacgaatcaaacggctactctgactttgtcttgatgattacagatatcgtcaactcaaactcagaaatattggctcttggtgccaatatggacaaggtcgaagcggctttcaatttcaaacttgaatacaatcatgccttccttgctggtgccgtttcacgtaagaaacaagtggtacctcaattaactgaaagctttaatgcgtaa

SEQ ID NO: 9407 - DNA, 1446 bp, Streptococcus pneumoniae
  CDS (1)...(1446)
atgattaagattgaaaccgtattagatattttaaagaaagatggcctttttcgcgaaattattgaccaaggtcattaccactacaactacagcaaagttatttttgatagcatcagctacgacagccgaaaagtaacagaagacactcttttttttgcaaaaggcgctgcctttaaaaaagaataccttctttctgctataacacaaggtttagcttggtatgtagctgaaaaggactacgaagtcgatatccctgtcatcattgtgaacgatataaagaaagccatgagtttgattgccatggagttctatggtaatccacaagagaaactcaaactccttgcctttactggtactaagggtaagacaacagcaacctatttcgcctataacatcttatctcaagggcatagacctgctatgttgtcgaccatgaacacaactcttgatggcgagactttctttaagtcagcgttgacaacccctgagagtattgacctctttgacatgatgaatcaggctgtgcaaaatgaccgtacccacctcatcatggaagtctccagtcaagcctatctagtccatcgagtctatggactgacctttgatgtaggagtctttcttaacatcactcctgaccatatcggcccgattgaacaccctagctttgaagactatttctaccacaagcgtctcttgatggaaaatagccgagcagtcatcattaacagtgacatggaccacttctcagtcttgaaagaacaggttgaagatcaagaccatgatttctatggtagccaatttgataaccaaatcgagaattccaaagcctttagcttttcagctacgggtaaactcgctggagattatgatatccaactcattggcaacttcaaccaagaaaatgcagttgctgctggacttgcttgtctccgtctcggagcaagtcttgaggacatcaaaaaaggcatcgctgcaacccgcgttcctggtcgtatggaagtcctcactcagaaaaatggagccaaggtcttcatcgactatgcccacaatggggatagtctgaaaaaactcatcaatgtggttgaaactcatcaaaccggaaagattgctctggttctgggatcaacaggaaacaagggagaaagtcgtcgtaaggactttggcctcctcctcaatcaacaccctgagattcaagtctttctgactgctgatgaccctaactatgaagacccaatggccattgcagatgaaattagtagctacatcaatcatcctgttgaaaagattgcggatcgccaagaagccatcaaggcggcaatggctatcacaaatcacgaattagatgcagttattattgcgggtaagggagccgattgttaccaaatcatccagggcaagaaagaatcctacccaggagatacagccgtcgcagaaaattatttataa

SEQ ID NO: 9408 - DNA, 1290 bp, Streptococcus pneumoniae
  CDS (1)...(1290)
atgaaattacaaaaaccaaaaggaacgcaggatattttacctgctgaatctgctaagtggcagtacgttgagggctttgcccgtgagattttcaagcgctataactatgcagaagtgcgcacgcctatttttgagcattacgaggttatcagtcgctctgtcggagatacaacggatatcgtaaccaaggaaatgtacgatttttatgacaagggtgaccgtcatattaccctccgtccagaaggaactgcgcccgttgtccgttcctatgtggaaaataaactcttcgccccagaagtgcaaaagccaagcaagttctactatatgggacctatgttccgttatgagcgtccacaggcagggcgcttgcgccaattccaccagattggtgttgagtgttttggctctagcaatccagctaccgatgtggaaacaatcgctatggcagcccattttttgaaggaaatcggtattcaaggtgtcaaattgcacctcaacactcttggaaatcctgagagccgtgcagcctaccgccaagccttgattgactatttgacaccgctcaaggagaccttgtctaaggatagccaacgtcgcttggaggaaaatcctcttcgtgtcttggactctaaggaaaaagaagacaaggtggcagtagagaatgcgccgtctatcttggactttcttgatgaagaaagccaaactcattttgatgctgtgcgtcagatgttggaaaatcttggagtagattacatcatcgataccaatatggtgcgtggtctggactactacaaccacaccattttcgagtttatcacagagattgagggcaatgacttgacagtctgtgcgggtggtcgctacgatggtttggttgcttactttggaggccctgaaactgctggatttggttttgggcttggtgtagagcgcctgcttctcatccttgaaaaacaaggcgtggccctccctatcgaaaacgccctagatgtctatatcgcagtcttgggtgatggagcaaatgtcaaagccctagaactagtccaagctcttcgccaacaaggtttcaaagcagagcgtgattacctcaaccgtaagctcaaagctcagttcaagtcagcagatgtctttgcggctaagaccctcatcaccctaggagagagcgaagtcgaaagcggacaagtgacggtcaagaacaaccaaacccgagaagaagtgcaagtgtcacttgagacaatcagccaaaacttctcagaaatctttgaaaaactaggattttatactcaatga

SEQ ID NO: 9409 - DNA, 1335 bp, Streptococcus pneumoniae
  CDS (1)...(1335)
atgtcaaagacatatcattttatcggaattaagggatcagggatgagtgccttggccttgatgttgcaccagatggggcacaaggttcagggatcagatgttgaaaagtactactttacccaacgcggtcttgagcaggcaggaattaccattcttccttttgatgaaaagaatctagacggtgatatggaaattatcgctggaaatgcctttcgtccagataacaacgtcgaaattgcctatgcggaccaaaatggtatcagctacaaacgttaccatgagtttctaggtagctttatgcgtgactttgttagcatgggagtagcaggagcacatggaaaaacttcaacgacaggtatgttgtctcatgtcttgtctcacattacagataccagtttcttgattggagatgggacaggtcgtggttcggctaatgccaaatattttgtctttgaatctgacgaatatgagcgtcacttcatgccttaccacccagaatactctattatcaccaacattgactttgaccatccagattatttcacaagtctcgaggatgtttttaatgcctttaacgactatgccaaacaaattaccaagggtctttttgtctatggtgaagatgctgaattgcgtaagattacgtctgatgcaccaatttattattatggttttgaagctgaaggcaatgactttgtagctagtgatcttcttcgttcaacaactggttcaaccttcaccgttcatttccgtggacaaaacttggggcaattccacattccaacctttggtcgtcacaatatcatgaatgcgacagccgttattggtcttctttacacagcaggatttgatttgaacttggtgcgtgagcacttgaaaacatttgccggtgttaaacgtcgtttcactgagaaaattgtcaatgatacagtgattattgatgactttgcccatcatccaacagaaattattgcgaccttggatgcggctcgtcagaaatacccaagcaaggaaattgtagcagtctttcaaccgcatacctttacaagaaccattgccttgttggacgactttgcccatgctttaaaccaagcagatgctgtttatctagcgcaaatttatggctcggctcgtgaagtagatcatggtgacgttaaggtagaagacctagccaacaaaatcaacaaaaaacaccaagtgattactgttgaaaatgtttctccactcctagaccatgacaatgctgtttacgtctttatgggagcaggagacatccaaacctatgaatactcatttgagcgtctcttgtctaacttgacaagcaatgttcaatag

SEQ ID NO: 9410 - DNA, 717 bp, Streptococcus pneumoniae
  CDS (1)...(717)
atggaagaaagtattaatccaatcatctctattggtcctgttatcttcaatctgactatgttagccatgactttgttgattgtgggagttatttttgtctttatttattgggcaagccgcaatatgaccttgaaacccaaaggaaagcaaaatgtacttgagtatgtctatgactttgttattggatttacagaacctaacattggttcgcgctacatgaaagattactcactctttttcctttgtttattccttttcatggtgattgccaataaccttggcttaatgacaaagcttcaaacgatcgatgggactaactggtggagttcgccaaccgctaatttacagtatgacttaaccttatcttttcttgtcattttgttgacacatatagaaagcgttcgtcgtcgtggatttaaaaaaagtataaaatcttttatgagtcctgtttttgtcataccgatgaatatcttggaagaatttacaaacttcttatctttggctttgcggatttttgggaatatctttgcaggagaggtcatgacgagtttgttacttcttctttcccaccaagctatttattggtatccagtagcctttggagctaatttggcttggactgcattttctgtctttatttcctgcatccaagcttatgtttttactcttttgacatctgtgtatttagggaataagattaatattgaagaggaatag

SEQ ID NO: 9411 - DNA, 495 bp, Streptococcus pneumoniae
  CDS (1)...(495)
atgcacgtaacagtaggtgaattaattggtaattttattttaatcactggctcttttattcttttgctagtcttgattaaaaaatttgcatggtctaatattacaggcattttcgaagaaagagctgaaaaaattgcttcagatattgacagagctgaagaagcccgtcaaaaagcagaagtattggctcaaaaacgcgaagatgaattggctggtagccgtaaagaagctaagacaatcattgaaaatgcaaaggaaacagctgagcaaagtaaggctaatatcttagcagatgctaaactagaagcgggacacttaaaagaaaaagccaatcaagaaattgctcaaaataaagtagaagctttacagagtgttaagggtgaggtcgcagatttgaccatcagcttagctggtaaaatcatctcacaaaaccttgacagtcatgcccataaagcactcattgatcagtatatcgatcagctaggagaagcttaa

SEQ ID NO: 9412 - DNA, 1434 bp, Streptococcus pneumoniae
  CDS (1)...(1434)
gtgactgaaacaggtgttgtaacctatatcggggacggtatcgcgcgtgctcacggccttgaaaatgtcatgagtggagagttgttgaattttgaaaacggctcttatggtatggctcaaaacttggagtcaacagacgttggtattatcatcctaggtgactttacagatatccgtgaaggcgatacaatccgccgtacagggaaaatcatggaagtccctgtaggtgaaagtctgattggtcgtgttgtggatccgcttggtcgtccagttgacggtcttggagaaatccacactgataaaactcgtccagtagaagcaccagctcctggtgttatgcaacgtaagtctgtttcagaaccattgcaaactggtttgaaagctattgacgcccttgtaccgattggtcgtggtcaacgtgagttgattatcggtgaccgtcagacagggaaaacaaccattgcgattgatacaatcttgaaccaaaaagatcaagatatgatctgtatctacgtcgcgattggacaaaaagaatcaacagttcgtacgcaagtagaaacacttcgtcagtacggtgccttggactacacaatcgttgtgacagcctctgcttcacaaccatctccattgctcttcctagctccttatgctggggttgctatggcggaagaatttatgtatcaaggtaagcatgttttgattgtatacgatgatctatcaaaacaagcggtagcttatcgtgaactgtcgctcttgcttcgtcgtcctccaggtcgtgaagccttcccaggggatgttttctatctccacagccgtttgcttgagcgctcagctaaagtttctgatgaacttggtggtggatcaattacagccctaccatttatcgagacacaagcaggagatatctcagcctatatcgcaaccaacgtgatttctatcactgatggacaaatcttccttggcgatggcctcttcaatgcaggtattcgtccagccatcgatgcgggttcatctgtatctcgtgtaggtggttctgcacaaatcaaagccatgaagaaggttgctggtacacttcgtatcgaccttgcttcataccgtgagttggaagcctttactaagtttggttctgacttggacgcagcaacacaggctaagttgaaccgtggacgtcgtaccgttgaggtcttgaaacaacctgttcacaaaccattacctgttgagaaacaagtaaccattctttatgctttgacacatggtttcttggatactgttccagtagatgatattgttcgtttcgaggaagagttccatgccttctttgatgctcaacatccagagattttggaaaccattcgtgatacaaaagacttgccagaagaagcagtcttggatgctgcgattacagagtttctcaatcaatctagcttccaataa

SEQ ID NO: 9413 - DNA, 1704 bp, Streptococcus pneumoniae
  CDS (1)...(1704)
atgactgaattagataaacgtcaccgcagtagcatctatgacagcatggttaaatcacctaaccgtgctatgcttcgtgcgactggtatgacagataaggactttgaaacatcgattgtgggagtgatttcgacttgggcggaaaatacaccatgtaacattcacttgcatgatttcgggaaactggctaaagaaggtgtcaaatctgcaggcgcttggcctgtacagtttggaaccattaccgtagcggacgggatcgctatgggaacgcctggtatgcgtttctctctaacatctcgtgacatcatcgcggactccatcgaggcggctatgagtggtcacaacgtggatgccttcgtcgctatcggtggctgtgacaagaacatgcctggatctatgattgctattgctaatatggatatcccagctattttcgcctatggtggaactattgcaccgggaaatcttgatggtaaagatatcgacttggtttctgtctttgaaggtatcggaaaatggaaccacggtgacatgacagctgaggacgtgaaacgtcttgaatgtaatgcctgccctggccctggtggctgtggtggtatgtatactgctaataccatggcaactgctatcgaagttctagggatgagtttgccagggtcatcctctcacccagctgaatcagctgataagaaagaagatatcgaagcagcaggccgtgctgttgttaagatgttggaacttggtctcaaaccatcagatatcttgactcgtgaagcctttgaagatgctatcactgtaacgatggctctcggtggttctacaaacgccactcttcacttgctcgccattgcccatgccgcaaatgttgacttgtcacttgaggacttcaatacgattcaagaacgtgtgcctcacttggccgacttgaaaccatctggtcagtatgtcttccaagacctctacgaagtcggtggtgtccctgcggttatgaagtacttgttggcaaatggtttccttcacggagatcgcatcacatgtactggtaagactgtagctgaaaacttggctgactttgcagacttgactccaggccaaaaagttatcatgccacttgaaaatccaaaacgtgcggatggtccgcttatcatcttgaacgggaaccttgctcctgacggtgcagttgccaaggtatcaggtgttaaagtgcgtcgtcacgttgggccagctaaggtctttgactcagaagaagatgcgattcaggccgttctgacagatgaaatcgttgatggcgatgtagtcgttgttcgttttgttggacctaaaggtggtcctggtatgcctgagatgctgtcactttcttcaatgattgttggtaaaggtcagggagataaggtggccctcttgacggacggccgtttctctggtggtacttatggtctggttgttggacatatcgctcctgaagctcaggatggtggaccaattgcctatctccgtaccggcgatatcgttacggttgaccaagataccaaagaaatttccatggccgtatccgaagaagaacttgaaaaacgcaaggcagaaacaaccttgccaccactttacagccgtggtgtcctcggtaaatatgcccacatcgtatcatctgcttcacgcggagccgtgacagacttctggaatatggacaagtcaggtaaaaaataa

SEQ ID NO: 9414 - DNA, 1347 bp, Streptococcus pneumoniae
  CDS (1)...(1347)
atgatgaagttcatattggatattgttagtacaccagctattttagtagctttaattgcaattttaggattagttcttcagaagaagaaattacctgatattattaaaggtggaattaagacctttgttggtttcttagttgtatctggtggtgcaggaattgtacaaaattctttaaatccatttggtaccatgtttgagcatgcttttcatttatctggcgttgtgccgaataatgaagcaattgtagctgtagctttaacaacatatggctcagctactgcaatgattatgtttgcaggcatggtgttcaatatcttaatcgctcgttttactcgatttaaatatatctttttaacagggcaccacactctatatatggcgtgtatgattgcggtcattttatcagttgctggctttactagcttgcctcttatcttactaggaggattagcactcggtattattatgagtatttccccagcatttgtgcaaaaatatatggttcaattaactggaaatgacaaggtggctttaggtcatttcagttctttgggatattggttgagtggttttactggtagccttatcggtgacaaatcaaaatcaacagaggacattaaatttccaaagagtttagcttttttacgtgatagtactgttagtattactttatccatggcagttatttacattattgtagctatctttgcagggtcagaatatatagaaaaagaaatcagtagtggtacaagtggtctagtttatgctttacaattagcaggtcaatttgcagcaggggtatttgttattttagcaggtgttcgccttattttgggcgaaattgttccagcctttaaaggtatttcagagcgtcttgtacctaattcaaaacctgctttggattgtccgattgtttatacttatgcacccaatgcagttctaattggatttatctctagttttattggtggtttagtaagtatggcaattatgattgcttcaggaacggttgttatcttaccaggtgttgtgcctcatttcttctgtggagcgactgcaggtgtcattgggaatgcatctggtggtgttcgtggagccactattggagcatttttacaaggtattttaatcagttttcttccagtctttttaatgccagttttgggaggacttggtttccaaggatcaactttctcagatgcagattttggtctatcaggaattattttaggaatgttaaatcaatttggctcacaagcaggcattgtgattggtcttgttcttattctagcagttatgtttggagtatcctttattaaaaagccatctgcaaaggaggaataa

SEQ ID NO: 9415 - DNA, 2031 bp, Streptococcus pneumoniae
  CDS (1)...(2031)
atgtttgattatagagcactagttattttgatgactttgatggatcattgtgagctatcattatatgaattatctgttaaggtgagcttacctataaaggaagtcaaagaaggaatagattatttagtgccttatctagctaataaagggatagtgctggataaaaaacaaggtcgctatagtttatcaaatcgtacgaagcagtctttgacagatattattaagtcggatgaattggttttaccaaagtcgactcgcttagctttaatctatctttacactttttgccgattagattttatatcgaataatcattaccaagactttttgaaagtaagtaagaatacaaccttatctgatattcaatcattaagaaagattatgttagataatgatttggagctagggtacagtagagcaaaaggttatactttacacggttcagagtggaataagcaccgcttagcttttcaaatggttagtgagttgctggaatcctccatagggatttgggatttggattatgttttatccagttgggggtattcattaacttatgatttgataaatcaggtagttaaagattattatgagaagctacaactagtacctattgttaatcaattaaaagtttgccttttcggtttagtattcattctgtgtaggtatcaaagggatgttgaaagagtatgtctttcagagacattagtatctcctgttattcaagatataaccactattttattggatacagtggttgatttgggaattatagatacggtgttttctgaggatgattatcgctatatcacagttttattatcaagttgctttgaaggtgaagtagatgttgctccggtttactttaatcaattaacagaggctattataagtagaatggaagatatttctttgttacattttaaacaaagggaaggattgagagaaaatcttcgccgccaccttataccggcttactatagattaaagttcggcctacctagttcaaatgaatatgtattgcatgttaaagaacattatcctgatttatttgaattagtcaaagattctttgatgcccttgatggacgctattgacaatcccatacctgatagtgaaacagcatattttgttatccatttcggaggttatttaaagaaagcagatactttgcctcaaaaatgctataaagcagcaatcatttgtcctaatggtgttagttcttcattgatgttaaaagagaatctattagcattatttcctcaaattgagtttatagcaacctcaaagattgatgatttacaggtgaaagctagtagtgactatgatatggttttttctaccataaaggtggagacagaaaagccaaattatctagtttcggttatgatgactgaagagcaagcaatacaactagtagaactagtgttaaaagattttccgaatttagagtatggagattttgagattgaacaaatcctgaatattgtcaaaagatatggaattattacacaagaattggaattaagattggcgttaaagaattatctttatcaaaaaaatgatagaaaggaaattgtaccagtgctagaacaacttattaccaaagaaacctatcaggttagttcgcaaaaattaggatggaaggaggcgattcgtttagcagctaaaccgcttttggatcaagataagataactgagaactaccctgaggcaatgattcaaaaagtagaagagtttggaccttttattaatttagggaagggagtagcaattcctcacgctcggccagatgaaggtgtgaatgaaataggaatgtcaatgttagttttggaagaaccgatttatttattggataatccagaacaagaggtaagattgttgatttgtattgcagccattgataatgagagtcatttaaaggctttgtcacatttaacaacaattttaagagataaaaatcatgttcaaactttaatatcatcaaaaaactatgatgacattaaaatgataattaaacaggaggattag

SEQ ID NO: 9416 - DNA, 948 bp, Streptococcus pneumoniae
  CDS (1)...(948)
atggcaaatcgtaaaattgtagtagctttgggaggaaatgcgattctttcttctgacccatcagcaaaggctcaacaagaagctttagttgaaacagctaagcatcttgtaaaattgattaaaaatggagatgatctgattatcactcacggtaatggacctcaagttgggaatctcttgctccaacatttggcatcagactctgaaaagaaccctgccttcccactcgactcacttgtcgctatgacagaaggtagcatcggtttctggttgaaaaatgctttgcaaaatgctctcttggatgaaggcatcgaaaaaaatgttgcctctgttgtaacgcaagttgtcgtagataaaaatgatccagcttttgttaacttgagtaaaccaatcggtcctttctattcagaagaagaagcaaaagcagaagccgaaaaaagcggagcgactttcaaggaagatgctggccgtggctggcgtaaggtcgttgcctcaccaaaacctgttgacatcaaagaaattgaaaccatccgtactcttttaaataatggtcaagtcgtcgtagctgcaggtggtggcggtattcccgtcgtcaaagaaaacaatggacatttgactggtgtcgaagcggttattgataaagacttcgcttcccaacgtttggcagaattggttgatgcagacctcttcatcgttttgacaggtgtagattatgtatttgttaactacaacaagccaaaccaggaaaaattggaacatgtgaatgttgcccagctggaagaatatatcaaacaagatcagtttgcaccaggtagcatgcttccaaaagtagaagcagctatcgcttttgtcaatggtcgtccagaaggaaaagcagttattacttcccttgaaaatctaggcgccttgattgaatctgaaagcggaacaattattgaaaaaggataa

SEQ ID NO: 9417 - DNA, 2535 bp, Streptococcus pneumoniae
  CDS (1)...(2535)
atggcgatagaaaagctatcacccggcatgcaacagtatgtggatattaaaaagcaatatccagatgcttttttgctctttcggatgggtgatttttatgaattattttatgaggatgcggtcaatgctgcgcagattctggaaatttccttaacgagtcgcaacaagaatgccgacaatccgatccctatggcgggtgttccctatcattctgcccaacagtatatcgatgtcttgattgagcagggttataaggtggctatcgcagagcagatggaagatcctaaacaagcagttggggttgttaaacgagaggttgttcaggtcattacgccagggacagtggtcgatagcagtaagccggacagtcagaataattttttggtttccatagaccgcgaaggcaatcaatttggcctagcttatatggatttggtgacgggtgacttttatgtgacaggtcttttggatttcacgctggtttgtggggaaatccgtaacctcaaggctcgagaagtggtgttgggttatgacttgtctgaggaagaagaccaaatcctcagccgccagatgaatctggtactctcttatgaaaaagaaagctttgaagaccttcatttattggatttgcgattggcaacggtggagcaaacggcatctagtaagctgctccagtatgttcatctgactcagatgagggaattgaaccacctcaaacctgttatccgctacgatattatggatttcttgcatatggattatgcgaccatggctagtctggatttggttgagaatgctcgctcaggtaagaaacaaggcagtcttttctggcttttggatgaaaccaaaacggctatggggatgcgtctcttgcgttcttggattcatcgccccttgattgataaggaacgaatcgtccaacgtcaagaagtagtgcaggtctttctcgaccatttctttgagcgtagtgacttgacagacagtctcaagggtgtttatgacattgagcgcttggctagtcgtgtttcttttggcaaaaccaatccaaaggatctcttgcagttggcgactaccttgtctagtgtgccacggattcgtgcgattttagaagggatggagcaacctactctagcctatctcatcgcacaactggatgcaatccctgagttggagagtttgattagcgcagcgattgctcctgaagctcctcatgtgattacagatgggggaattatccggactggatttgatgagactttagacaagtatcgttgcgttctcagagaagggactagctggattgctgagattgaggctaaggagcgagaaaactctggtatcagcacgctcaagattgactacaataaaaaggatggctactattttcatgtgaccaattcgcaactgggaaatgtgccagcccactttttccgcaaggcgacgctgaaaaactcagaacgctttggaaccgaagaattagcccgtatcgagggagatatgcttgaggcgcgtgagaagtcagccaacctcgaatacgaaatatttatgcgcattcgtgaagaggtcggcaagtacatccagcgtttacaagctctagcccaaggaattgcgacggttgatgtcttacagagtctggcggttgtggctgaaacccagcatttgattcgacctgagtttggtgacgattcacaaattgatatccggaaagggcgccatgctgtcgttgaaaaggttatgggggctcagacctatattccaaatacgattcagatggcagaagataccagtattcaattggttacagggccaaacatgagtgggaagtctacctatatgcgtcagttagccatgacggcggttatggcccagctgggttcctatgttcctgctgaaagcgcccatttaccgatttttgatgcgatttttacccgtatcggagcagcagatgacttggtttcgggtcagtcaacctttatggtggagatgatggaggccaataatgccatttcgcatgcgaccaagaactctctcattctctttgatgaattgggacgtggaactgcaacttatgacgggatggctcttgctcagtccatcatcgaatatatccatgagcacatcggagctaagaccctctttgcgacccactaccatgagttgactagtctggagtctagtttacaacacttggtcaatgtccacgtggcaactttggagcaggatgggcaggtcaccttccttcacaagattgaaccgggaccagctgataaatcctacggtatccatgttgccaagattgctggcttgccagcagaccttttagcaagggcggataagattttgactcagctagagaatcaaggaacagagagtcctcctcccatgagacaaactagtgctgtcactgaacagatttcactctttgatagggcagaagagcatcctatcctagcagaattagctaaactggatgtgtataatatgacacctatgcaggttatgaatgtcttagtagagttaaaacagaaactataa

SEQ ID NO: 9418 - DNA, 633 bp, Streptococcus pneumoniae
  CDS (1)...(633)
aaaatgggaaaaattgaagttattaatcacccactgattcaacacaaattgtcaatcttgcgtcgtacagatacttctacaaaagcttttcgtgagctagtagatgagattgcaatgttgatggggtatgaagtacttcgtgatcttccactagaagatgtggaaatcgaaacaccaattacaaaaacagttcaaaaacaattggcaggtaagaaattggccatcgtcccaatcttgcgtgcaggtatcgggatggttgatggtctcttgagcttggttccagctgctaaagttggccacatcggtatgtaccgtgatgaagaaacacttcaaccagttgaatacttggtgaaattgcctgaggacattgaccaacgtcaaatttttgtagtagacccaatgttggcaacaggtggctcagcaatcttggctgttgattctcttaaaaaacgtggcgcatcaaatatcaaatttgtctgccttgtatctgctccagagggtgtaaaagcccttcaagaagctcatccagatgtagaaatctttacagcagccttggatgaacgtttgaacgaacacggttatatcgttccaggtcttggagatgctggagaccgcttgttcggtacaaaataa

SEQ ID NO: 9419 - DNA, 420 bp, Streptococcus pneumoniae
  CDS (1)...(420)
atggctaaaaaagtcgaaaaacttgtaaaattgcaaatccctgctggtaaagctacaccagctccaccggttggacctgctcttggtcaagctggtatcaacatcatgggattcacaaaagagttcaacgctcgtacagctgaccaagctggtatgatcattccagttgttatctcagtttacgaagataaatcatttactttcgttacgaaaacaccaccagctgctgttcttttgaaaaaagctgcaggtgttgaaaaaggatcaggtacacctaataaaactaaagttgctacagttactcgtgcacaagtacaagaaattgcagaaactaagatgccagatttgaacgcagcaaacgtagagtctgcaatgcgtatgatcgaaggtactgctcgttctatgggaatcactgttgtt

SEQ ID NO: 9420 - DNA, 738 bp, Streptococcus pneumoniae
  CDS (1)...(738)
atgctatcttcgggagaagaccgtgtcattgccagtcctgttgctggaacaactcgtgacgctattgatacccactttacagatacagatggtcaagagtttaccatgattgatacggctggtatgcgtaagtctggtaaggtttatgaaaatactgagaagtactctgtcatgcgtgccatgcgtgctattgaccgttcagatgtggtcttaatggtcatcaatgcggaagaggggattcgtgaatacgacaagcgtatcgctggatttgctcatgaagctggtaaagggatgattatcgtggtcaacaagtgggatacgcttgaaaaagataaccacactatgaaaaactgggaagaagatatccgtgagcagttccaatacctgccttacgcaccgattatctttgtatcagctttaaccaagcaacgtctccacaaacttcctgagatgattaagcaaatcagcgaaagtcaaaatacacgtattccatcagctgtcttgaacgatgtcatcatggatgccattgccatcaacccaacaccgacagacaaaggaaaacgtctcaagattttctatgcgacccaagtggcaaccaaaccaccaacctttgtcatctttgtcaatgaagaagaactcatgcacttttcttacctgcgtttcttggaaaatcaaatccgcaaggcctttgtttttgagggaacaccgattcatctcatcgcaagaaaacgcaaataa

SEQ ID NO: 9421 - DNA, 999 bp, Streptococcus pneumoniae
  CDS (1)...(999)
atggctttaacagaacaaaaacgtgtacgcttagaaaaactttctgatgaaaatggtatcatctcagctcttgcatttgaccaacgtggtgctttgaaacgcctcatggctcaacaccaaacagaagaaccaactgtggcccaaatggaagaacttaaagtcttggtagcagatgaattgactaaatacgcttcatctatgcttcttgaccctgagtatggacttccagcaactaaagctcttgatgaaaaagctggtcttctccttgcttatgaaaaaacaggttatgacacaacaagcacaaaacgcttgccagactgcttggatgtctggtctgcaaaacgtattaaagaagaaggtgcagatgcagttaaattcttgctttactatgatgtagatagctcagacgaactcaatcaagaaaaacaagcctacatcgaacgcatcggttctgagtgtgtggctgaagatatcccattcttccttgaaattcttgcttacgatgaaaaaattgcggatgcaggttctgtagaatacgcgaaagtaaaaccacacaaagttatcggcgctatgaaagtcttttcagacccacgctttaacattgatgtcttgaaagttgaagttcctgttaacattaaatatgttgaaggcttcgctgaaggtgaagtagtttatacacgtgaagaagcagcagccttcttcaaagcgcaagatgaagcaacgaacttgccatacatctacttgagtgctggtgtatcagctaaactcttccaagatactcttgtatttgctcatgaatcaggtgcaaactttaacggagttctttgtggccgtgcaacatgggctggatcagttgaagcatacatcaaagatggtgaaacagcagctcgcgaatggttcgcacaactggatttgaaaacattgatgagctcaacaaagttcttcaaacaacagcaacttcatggaaagaacgtgtgtaagaaagtcctcctagtttag

SEQ ID NO: 9422 - DNA, 627 bp, Streptococcus pneumoniae
  CDS (1)...(627)
atgacaaaaggaatcttagggaaaaaagtgggaatgactcaaatcttcactgaagctggcgaattgatccctgtaacagttattgaagcaactccaaacgttgttcttcaagttaaaactgttgaaacagacggatacaacgctatccaagttggtttcgatgacaaacgcgaagtattgagcaacaaacctgctaaaggacatgtagcgaaagctaacacggctcctaagcgcttcattcgtgaattcaaaaacgttgaaggcttggaagttggtgctgaaattacagttgaaacattcgcagctggagatgttgttgatgtaactggtacttctaaaggtaaaggtttccaaggtgttatcaagcgccacggacaatcacgtggaccgatggctcacggttctcgttaccaccgtcgtccaggttctatgggacctgttgcacctaaccgcgtattcaaaggtaaaaaccttgcaggacgtatgggtggtgaccgcgtaacaattcaaaatcttgaagttgtacaagttgttccagaaaagaacgttatccttatcaaaggtaacgtaccaggtgctaagaaatctcttatcactatcaaatcagcagttaaagctggtaaataa

SEQ ID NO: 9423 - DNA, 1668 bp, Streptococcus pneumoniae
  CDS (1)...(1668)
attgcgattatcgcccacgttgaccacggtaaaacaaccctggttgacgaattattgaaacaatcagaaacgcttgatgcacgtactgaattggcagagcgtgctatggactcaaacgatatcgaaaaagagcgtggaatcaccatccttgctaaaaatactgccgttgcttacaacggaactcgtatcaacattatggacacaccaggacacgcggacttcggtggagaagttgagcgtatcatgaaaatggttgacggtgttgtcttggtcgtagatgcctatgaaggaaccatgccacaaactcgtttcgtattgaaaaaagccttggaacaagaccttgtcccaatcgtggttgttaacaaaatcgataagccatcagctcgtccagcagaagtagtggatgaagtcttggaacttttcatcgagcttggtgcagatgacgaccagcttgatttcccagtggtttatgcttcagcgatcaacggaacttcttcattgtcagatgatccagctgaccaagaagcgactatggcaccaatctttgacacgattatcgaccatatcccagctccagtagataactcagatgagcctttgcagttccaagtgtcacttttggactacaatgacttcgttggacgtatcggtatcggtcgtgtcttccgtggtacagttaaggttggggaccaagttaccctttctaaacttgacggtacaactaaaaacttccgtgttacaaaactcttcggtttctttggtttggaacgtcgtgaaatccaagaagccaaagcgggtgacttgattgccgtttcaggtatggaagacatctttgtcggtgaaaccatcactccgacagatgcagtagaagctcttccaatcctacacatcgatgagccaactcttcaaatgactttcttggtcaacaactcaccatttgctggtaaagaaggtaaatgggtaacttctcgtaaggtggaagaacgcttgcaggcggaattgcaaacagacgtttcccttcgtgttgacccaactgattcaccaaataaatggactgtttcaggacgtggagaattgcacttgtcaatccttatcgaaacaatgcgtcgtgagggctatgaacttcaagtatctcgtccagaagttatcgtaaaagaaatcgacggtgttaaatgtgaaccatttgaacgtgtacaaatcgacactccagaagaataccaagggtctgttatccaaagcctttctgaacgtaaaggtgaaatgttggatatgatttcaactggtaatggtcaaactcgtttggtcttccttgttccagcgcgtggtttgattggatactcaactgagttcttgtcaatgactcgtggttacggtatcatgaaccataccttcgaccaatacttgccattgattccaggggaaattggtggacgtcaccgtggtgcccttgtttctatcgatgctggtaaggctacaacttactcaatcatgtctatcgaagaacgtggtacgatctttgtcaacccaggtactgaggtttatgaaggaatgatcatcggtgaaaactctcgtgaaaatgacttgacagttaacatcacgaaggcaaaacaaatgaccaacgttcgttcagctactaaggaccaacagctgttatcaagacgcctcgta

SEQ ID NO: 9424 - DNA, 525 bp, Streptococcus pneumoniae
  CDS (1)...(525)
aaaaatttgctccctgaaaaagtgactttgcttaaaaccaagttctttcaaaagcccaagaaaaaacgagctccaaagttgggagatgatatcgtggttctcagttatggtcagcgtggtaccttgaccagtcaactcaaggacggccgctgggaagcccaagttggcttgattaagatgaccttggaagagaaagagtttgatcttgttcaagcccagcaagaaaaaccagtcaagaagaaacaggtcaatgttgtgaaacgaacttctgggcgaggacctcaagctagactggatcttcgaggcaagcgctatgaagaagccatgaatgagctagataccttcatcgaccaagccttgcttaacaatatggctcaagttgatatcatccatggtatcggaacaggagtcatccgtgaaggagttaccaaatacttgcaaagaaacaaacatgtcaagagtttcggctatgccccacaaaatgctggaggcagtggtgcgactattgtcacttttaaaggatag

SEQ ID NO: 9425 - DNA, 135 bp, Streptococcus pneumoniae; identical to SEQ ID NO: 9083
  CDS (1)...(135)

SEQ ID NO: 9426 - DNA, 951 bp, Streptococcus pneumoniae
  CDS (1)...(951)
atgtctgtaagagaaaaaatgcttgaaatcttagaaggaattgatatccgttttaaggaacccttgcatagctatagttatacaaaagtaggtggagaggctgattatttggtctttccacgaaatcgttttgagttggctcgcgttgtgaaatttgccaaccaagaaaatatcccttggatggttcttggcaatgcaagcaatatcatcgttcgtgatggtgggattcgtggatttgtcatcttgtgtgacaagctcaataacgtttctgttgatggctataccattgaagcagaagctggggctaacttgattgaaacaactcgcattgccctccgtcatagtttaactggctttgagtttgcttgtggtattccaggaagcgttggcggtgctgtctttatgaatgcgggtgcctatggtggcgagattgctcacatcttgcagtcttgtaaggtcttgaccaaggatggagaaatcgaaaccctgtctgctaaagacttggcttttggttaccgccattcagctattcaggagtctggtgcagttgtcttgtcagttaaatttgccctagctccaggaacccatcaggttatcaagcaggaaatggaccgcttgacgcacctacgtgaactcaagcaacctttggaatacccatcttgtggctcggtctttaagcgtccagtcgggcattttgcaggtcagttaatttcagaagctggcttgaaaggctatcgtatcggtggcgtagaagtgtcagaaaagcatgcaggatttatgatcaatgtcgcagatggaacggccaaagactacgaggacttgatccaatcggttatcgaaaaagtcaaggaacactcaggtattacgcttgaaagagaagtccggatcttgggtgaaagcctatcggtagcgaagatgtatgcaggtggttttactccctgcaagaggtag

SEQ ID NO: 9427 - DNA, 1395 bp, Streptococcus pneumoniae
  CDS (1)...(1395)
atggcatttgaaagtttaacagaacgtttgcagaacgtctttaaaaatctacgtaaaaaaggaaaaatctctgaatctgatgtccaagaggcaaccaaagaaattcgcttggccttgctcgaggccgacgttgccttgcctgttgtaaaggactttatcaagaaagttcgtgagcgtgcagtcgggcatgaggtcattgatacacttaatcctgcgcaacagattattaaaatcgttgatgaggaactgacagccgttttaggttctgatacggcagaaattatcaagtcacctaagattccaaccatcatcatgatggttggtttacaaggggctggtaaaacaacctttgctggtaaattggccaacaaactcaagaaagaagaaaatgctcgtcctttgatgattgcggcggatatttatcgtccagctgccattgaccagcttaagaccttgggacaacagattgatgtgcctgtctttgcacttggaacagaagtaccagctgttgagattgtacgtcaaggtttggagcaagcccaaactaatcataacgactatgtcttgattgatactgcgggtcgtttgcagattgatgagctcctcatgaatgagcttcgtgatgtgaaagcattggctcaaccaaatgaaatcttgcttgtcgttgatgctatgattggtcaggaagcagccaatgttgcgcgtgagtttaatgctcagttggaagtgactggggtcatccttaccaagattgatggcgatactcgtggtggtgctgctctgtctgttcgtcacattactggaaaaccaatcaagttcactggtacaggtgaaaagattacggacattgaaaccttccacccagaccgcatgtctagccgtatccttggtatgggggatatgctcactttgattgagaaagcttctcaggaatacgatgaacaaaaagcccttgaaatggctgagaagatgcgcgaaaacacctttgattttaatgatttcatcgatcaattagatcaggtgcaaaatatggggccgatggaagacttgctcaagatgattccaggtatggccaacaatccagcacttcaaaacatgaaggtggatgaacgccagattgctcgtaaacgtgccattgtgtcttcgatgacacctgaagaacgtgaaaacccagatttgttaaatccaagccgtcgccgtcgtattgctgctggttctggaaatacattcgtcgaagtcaataaatttatcaaggactttaaccaggctaaacagctcatgcagggtgttatgtctggggatatgaataaaatgatgaagcaaatggggattaatccaaataaccttcctaaaaatatgccgaatatggggggaatggatatgtctgcccttgaa

SEQ ID NO: 9428 - DNA, 786 bp, Streptococcus pneumoniae
  CDS (1)...(786)
atggataatcgaccaattggttttttggattcgggtgtcgggggcttgaccgttgtgcgcgagctcatgcgccagcttccccatgaagaaatcgtctatattggagattcggcgcgggcgccctatggcccccgtcctgctgagcaaattcgtgaatatacttggcagctggtcaactttctcttgaccaaggatgtcaaaatgattgtcattgcttgtaacactgcgactgcggtcgtctgggaagaaatcaaggctcaactagatattcctgtcttgggtgtaattttgccaggagcttcggcagccatcaagtccagtcaaggtgggaaaatcggagtgattggaacgcccatgacggtacaatcagacatataccgtcagaaaatccatgatctggatcccgacttacaggtggagagcttggcctgtcccaagtttgctcccttggttgagtcaggtgccctgtcaaccagtgttaccaagaaggtggtctatgaaaccctgcgtcccttggttggaaaggtggatagcctgattttgggctgtactcattatccactccttcgccctattatccaaaatgtgatggggccaaaggttcagctcatcgatagtggggcagagtgcgtacgggatatctcagtcttactcaattattttgaaatcaatcgtggtcgcgatgctggaccactccatcaccgtttttacacaacagccagtagccaaagttttgcacaaattggtgaaggatggctggaaaaagagatcatgtggagcatgtag

SEQ ID NO: 9429 - DNA, 366 bp, Streptococcus pneumoniae
  CDS (1)...(366)
atgtcctggacatttgacaacaaaaaacccatctatttacagattatggagaaaatcaagcttcagattgtttcccatacactggaacccaatcaacaacttccaaccgtgagggagctagctagcgaggctggtgtcaatcccaataccatccaaagagccttatcagaccttgaacgagaaggatttgtctacagcaagcgaacaactggacgatttgtgactaaggataaggagctaatcgcccagtcacgcaaacaattatcagaagaagaattggaacacttcgtttcctccatgacccattttggctatgaaaaagaagaactaccaggcgtagtcagtgattatattaaaggagtttaa

SEQ ID NO: 9430 - DNA, 414 bp, Streptococcus pneumoniae; identical to SEQ ID NO: 9106
  CDS (1)...(414)

SEQ ID NO: 9431 - DNA, 261 bp, Streptococcus pneumoniae; identical to SEQ ID NO: 9109
  CDS (1)...(261)

SEQ ID NO: 9432 - DNA, 369 bp, Streptococcus pneumoniae; identical to SEQ ID NO: 9110
  CDS (1)...(369)

SEQ ID NO: 9433 - DNA, 444 bp, Streptococcus pneumoniae
  CDS (1)...(444)
taaaaaggagtatacaatatgtctattgttatcggtgcagatgctgcaggtttgagattgaaagaagttgtgaaagacttcttagaaaaagaaaacttccaccttgtggatgttacagctgaaggtcaagactttgttgatgtgactctcgctgttgctgcagaagtaaacaaagaagaacaaaaccttggtatcgtgattgatgcttatggagctggttcatttatggttgcaactaagatcaaaggaatggttgctgcagaagtatctgacgaacgttcagcttatatgactcgtggccacaacaactcacgtatgatcactatgggtgcacaacttgttggtgatgaattggctaaaaacatcgctaaaggatttgttaacggtaaatacgatggtggacgtcatcaaatccgggtcgacatgttgaacaaaatgggctaa

SEQ ID NO: 9434 - DNA, 516 bp, Streptococcus pneumoniae; identical to SEQ ID NO: 9176
  CDS (1)...(516)

SEQ ID NO: 9435 - DNA, 687 bp, Streptococcus pneumoniae
  CDS (1)...(687)
atgaataacaactttaataattttaataacatggatgatttatttaaccaattgatgggtggtatgcgaggatatagttctgaaaatcgccgttacttaattaatggacgcgaagtcacacctgaggaatttgctcactatcgtgcgactggtcaattaccaggaaatgcagaaactgatgtgcaaatgccacaacaggcatcaggtatgaaacaagacggtgtccttgcaaaactaggtcgaaacttgacagcagaagcgcgtgagggcaagttggatcctgttatcggacgaaacaaggaaattcaagaaacatctgaaatcctctcacgccgcaccaagaacaatcctgttttggtcggagatgcaggtgttggtaagacagcagttgtcgaaggtctagcgcaagccattgtgaacggagatgttcctgctgctatcaagaacaaggaaattatttctattgatatctcaggtcttgaggctggtactcaataccgtggtagctttgaagaaaatgtccaaaacttagtcaatgaagtgaaagaagcagggaatattatcctcttctttgatgaaattcaccaaattcttggtgctggtagcactggtggagacagtggttctaaagggcttgcggatattctcaagccagctctctctcgtggagaattgacagtgattggg

SEQ ID NO: 9436 - DNA, 300 bp, Streptococcus pneumoniae; identical to SEQ ID NO: 9225
  CDS (1)...(300)

SEQ ID NO: 9437 - DNA, 546 bp, Streptococcus pneumoniae
  CDS (1)...(546)
atgaaaaaagaacaaattcccaatctcttaacaataggtcgaattctctttatacctatttttatctttattttaacgataggaaattcgatagagagtcatatagttgcagctattatctttgctgttgccagtattaccgactatttagatggatatttagctcgtaaatggaatgtggtcagtaattttggtaaatttgcagatcctatggcggataagttactagttatgtcggcttttattatgttgattgagttaggtatggctccggcttggattgttgcagtgattatctgtcgtgagttagctgtgacaggtttaaggcttttattggttgaaactggtggaacaattttagcagcagcaatgcctggaaaaattaaaacttttagtcagatgtttgccattattttcttgctattacattggactttgcttggtcaagttctactttatgtagccttatttttcactatctactctggctatgactatttcaagggtagtgcctatgtatttaaagggacatttggttcgaaatga

SEQ ID NO: 9438 - DNA, 642 bp, Streptococcus pneumoniae; identical to SEQ ID NO: 9231
  CDS (1)...(642)

SEQ ID NO: 9439 - DNA, 1401 bp, Streptococcus pneumoniae
  CDS (1)...(1401)
atgacagcaattgattttacagcagaagtagaaaaacgcaaagaagacctcttggctgacttgtttagccttttggaaatcaattcagaacgtgatgacagcaaggctgatgcccagcatccatttgggcctggtccagtaaaagccttggagaaattccttgaaatcgcagaccgcgatggctacccaactaagaatgttgataactatgcaggacattttgagtttggtgatggagaagaagttctcggaatctttgcccatatggatgtggtgcctgctggtagcggttgggacacagacccttacacaccaactatcaaagatggtcgcctttatgcgcgcggggcttcggacgataagggtcctacaacagcttgttactatggtttgaaaatcatcaaagaattgggtcttccaacttctaagaaagttcgcttcatcgttggaacagacgaagaatcaggctgggcagacatggactactactttgagcacgtaggacttgccaaaccagatttcggtttctcaccagatgctgaatttccaatcatcaatggtgaaaaaggaaatatcacggaatacctccactttgcaggagaaaatacaggtgttgcccgtcttcacagctttacaggtggtttacgtgaaaatatggtaccagaatcagcaacagcagtcgtttcaggtgacttggctgacttgcaagctaaactagatgcctttgttgcagaacacaaacttagaggagaactccaagaagaagctggcaaatacaaggtgacgatcattggtaaatcagcccacggtgctatgcctgcttcaggtgtcaatggcgcaacttaccttgccctcttcctcagtcagtttggctttgctggtccagccaaagactaccttgacatcgcaggtaaaattctcttgaacgatcatgagggtgaaaatcttaagattgctcatgtggatgaaaagatgggtgctctttctatgaatgccggcgtcttccgcttcgatgaaacaagtgctgataataccattgccctcaacatccgctatccaaaaggaacaagtccagaacaaatcaagtcaatccttgaaaacttgccagttgtttctgttagcctgtctgaacacggtcacacgcctcactatgtgccaatggaagatccacttgtgcaaaccttgttgaatatctatgaaaaacaaactggctttaaaggtcatgaacaagtcatcggtggtggaacctttggtcgcttgttagagcgcggagttgcctatggtgctatgttcccagactcaattgataccatgcaccaagccaatgaatttatcgccttggacgatctcttccgagcagcagcaatctatgccgaagctatttacgaattgatcaaataa

SEQ ID NO: 9440 - DNA, 456 bp, Streptococcus pneumoniae
  CDS (1)...(456)
ttacatggttataagcagatgaatcctatggtctttgcgggtctctacccaatcgaatcaaacaaatacaatgacctgcgtgaagcgcttgaaaaattgcaactgaatgatgctagtcttcagtttgaaccagaaacatctcaggcacttggatttggtttccgttgtggatttcttggacttctccatatggatgttatccaggaacgtttagagcgtgagttcaatattgacctcatcatgacagctccgtctgttatttacaaagttaatttgaccgacggtgagtctatggatgtgtctaacccatctgagtttccagacccaactaagattgcgaccattgaagagccttatgtcaaggcgcaaatcatggtaccacaggagttcgtcggagcagtaatggagctagctcagcgtaaggtagagggactttgtgactatggactatattga

SEQ ID NO: 9441 - DNA, 834 bp, Streptococcus pneumoniae
  CDS (1)...(834)
gtgggaattcgtgtttataaaccaacaacaaacggtcgccgtaatatgacttctttggatttcgctgaaatcacaacaagcactcctgaaaaatcattgcttgttgcattgaagagcaaggctggtcgtaacaacaacggtcgtatcacagttcgtcaccaaggtggtggacacaaacgtttctaccgtttggttgacttcaaacgtaataaagacaacgttgaagcagttgttaaaacaatcgagtacgatccaaaccgttctgcaaacatcgctcttgtacactacactgacggtgtgaaagcatacatcatcgctccaaaaggtcttgaagtaggtcaacgtatcgtttcaggtccagaagcagatatcaaagtcggaaacgctcttccacttgctaacatcccagttggtactttgattcacaacatcgagttgaaaccaggtcgtggtggtgaattggtacgtgctgctggtgcatctgctcaagtattgggttctgaaggtaaatacgttcttgttcgtcttcaatcaggtgaagttcgtatgattcttggaacttgccgtgctacagttggtgttgtcggaaacgaacaacatggacttgtaaaccttggtaaagcaggacgtagccgttggaaaggtatccgcccaacagttcgtggttctgtaatgaaccctaacgatcacccacacggtggtggtgaaggtaaagcaccagttggtcgtaaagcaccatctactccatggggcaaacctgctcttggtcttaaaactcgtaacaagaaagcgaaatctgacaaacttatcgttcgtcgtcgcaacgagaaataa

SEQ ID NO: 9442 - DNA, 282 bp, Streptococcus pneumoniae
  CDS (1)...(282)
atgggacgcagtcttaaaaaaggacctttcgtcgatgagcatttgatgaaaaaagttgaagctcaagctaacgacgaaaagaaaaaagttattaaaacttggtcacgtcgatcaacgatcttcccaagtttcattggttacactattgcagtttatgacggacgtaaacacgtacctgtttacatccaagaagacatggtaggccacaaacttggtgaatttgcaccaactcgtacttacaaaggtcacgctgcagacgacaagaaaacacgtagaaaataa

SEQ ID NO: 9443 - DNA, 987 bp, Streptococcus pneumoniae
  CDS (1)...(987)
taccaaatctacatgaaaggacggggtatgaaactttctcattatttaattggcttacttctactcctagtctttctctctattagcattgggaccagtgatttttcatggggaaagctatttgatttcgaccagcagacctggctcctctttcaagagtcccgtctcccaagaactatcagtattctcctgactgcctctagtatgagtatggcaggccttctcatgcagactattacccaaaatcagtttgctgcaccgagtacagttggaacgactgaagccgccaaactgggaatggtgctgagcctttttgtctttccatcggctagtctgacccaaaagatgctcttcgcttttgtttcatccatcgtattcaccctcttcttcctagcctttatgaccatttttactgtaaaggaaaggtggatgttgcctctgattgggatcatctatagcgggattatcggctcagtcacagaagttatcgcctatcgtttcaatctggttcagagtatgactgcctggacccagggctccttctccatgattcagacccatcagtatgagtggctcttcttaggcctcatcatcctgataaccgtttggaaattatcccaaaccttcaccatcatgaatctagggaaagaaaccagcgagagtttggggatttcctactccctacttgaaaaactggccctctttctggtggcgctaacgacaagcgtcaccatgattaccgtgggtggcctaccatttctcggagttatcgttcccaatcttgttcgcaagcgctatggagataatctaagtcaaaccaaactcatggtcgcactggttggtgccaatctagttctggcttgcgatatcctatcccgagttctgattaggccctatgagttgtctgtcagtctcttgctaggaatcatcggtagtctcgtctttatcctacttctctggagagggggacgaaaagatgcagactaa

SEQ ID NO: 9444 - DNA, 1419 bp, Streptococcus pneumoniae
  CDS (1)...(1419)
ggtataataaaagggaatttctacagaaaagagaagattatgtcaaattttgccattattttagcagcgggtaaagggactcgcatgaaatctgatttgccaaaagttttgcacaaggttgcgggtatttctatgttggaacatgttttccgtagtgtgggagctatccaacctgaaaagacagtaacagttgtaggacacaaggcagaattggttgaggaggtcttggctgaacagacagaatttgtgactcaatctgaacagttgggaactggtcatgcagttatgatgacagagcctatcttagaaggtttgtcaggacacaccttggtcattgcaggagatactcctttaatcactggtgaaagcttgaaaaacttgattgatttccatatcaatcataaaaatgtggccactatcttgactgctgaaacggataatccttttggctatggacgaattgttcgtaatgacaatgctgaggttcttcgtattgttgagcagaaggatgctacagattttgaaaagcaaatcaaggaaatcaacactggaacatacgtctttgacaacgagcgtttgtttgaggctttgaaaaatatcaataccaataacgctcaaggcgaatactatattacagacgtcattggtattttccgtgaaactggtgaaaaagttggcgcttatactttgaaagattttgatgaaagtcttggggtaaatgaccgtgtggcgcttgcgacagctgagtcagttatgcgtcgtcgcatcaatcataaacacatggtcaacggtgttagctttgtcaatccagaagcaacttatatcgatattgatgttgagattgctccggaagttcaaatcgaagccaatgttatcttgaaagggcaaacgaaaattggtgctgagactgttttgacaaacggtacttatgtagtggacagcactatcggagcaggagcggtcattaccaattctatgattgaggaaagtagtgttgcagacggtgtgacagtcggtccttatgctcacattcgtccaaattcaagtctgggtgcccaagttcatattggtaactttgttgaggtgaaaggatcttcaatcggtgagaataccaaggctggtcatttgacttatatcggaaactgtgaagtgggaagcaacgttaatttcggtgctggaactattacagtcaactatgacggcaaaaacaaatacaagacagtcattggagacaatgtctttgttggttcaaattcaaccattattgcaccagtagaacttggtgacaattccctcgttggtgctggttcaactattactaaagacgtgccagcagatgctattgctattggtcgcggtcgtcagatcaataaagacgaatatgcaacacgtcttcctcatcatcctaagaaccagtag

SEQ ID NO: 9445 - DNA, 498 bp, Streptococcus pneumoniae
  CDS (1)...(498)
atgataaataacgttgttttagtagggcgacttacaagagatgccgaactgagatacacgcaatctaatattgcggttgctacgtttactcttgctgtaaaccgtccatttaagaacgaggctggagagcgtgaggctgattttatcaattgcgttatctggagacagttagctgaaaatcttgctaattgggctaaaaaaggctctcttatcggagttacaggagtaattcaaacacgtagctatgataaccagcaaggtcaacgtgtttatgtcacagaagttgttgccagtaattttcaactgttggaaagccgtaacagtcagcaaaataatcaaggtcatcaagaccatcatggcggttatcagcagcagggctacagtaatcaaggcagttctttccaaaatggaaatagttacgggcaacaaggcagtttcgttgaggggaacacaacaaatctagttcctgatttcacccgtgataacaatccatttgtt

SEQ ID NO: 9446 - DNA, 1092 bp, Streptococcus pneumoniae
  CDS (1)...(1092)
cgaaagaggttatttatgggatatacagttgctgtagtcggcgcgacaggtgctgtcggtgctcagatgataaaaatgttggaagaatcaacacttccaatcgataaaatccgttaccttgcttctgcacgttcagcaggtaagtcattgaaatttaaagatcaagatattacgattgaagaaacgactgaaacagcttttgaaggagttgatattgctctcttttcagcaggtggttcgacatcagctaagtatgcaccatacgcagtaaaagctggcgtggtagtagtggataatacatcttatttccgtcaaaatccagatgttcctttggttgttccagaggtcaatgctcatgcacttgatgcccacaacggaatcattgcctgccctaactgttcaacaatccaaatgatggtggctcttgagccggttcgccaaaaatggggcttggaccgtatcattgtttcaacttatcaagccgtttcaggtgctggtatgggagcaattcttgagacacaacgtgaacttcgtgaggtcttgaatgatggagtgaaaccacgtgatttgcatgcggaaatcttgccttcaggtggtgacaagaaacattatcctatcgcctttaacgctcttccacaaattgatgtcttcactgataatgattacacgtacgaagagatgaagatgaccaaggaaactaagaaaattatggaagatgatagcattgcagtatctgcgacatgtgtgcgtattccagtcttgtcagctcactctgagtcagtttatattgaaacaaaggaagtggctccaattgaagaagtcaaagcagctatcgcatccttcccaggtgctgttcttgaagatgatgtagttcatcaaatctatcctcaagccatcaatgcagttggttcacgtgatacctttgttggtcgtatccgtaaagacttggatgcagaaaaaggaattcacatgtgggttgtttcagataaccttctcaaaggtgctgcttggaactcagttcagattgctgaaactcttcatgaacgtggattggttcgtccaacagctgaattgaaatttgaattaaaatag

SEQ ID NO: 9447 - DNA, 1014 bp, Streptococcus pneumoniae
  CDS (1)...(1014)
atggagaaaaagaaattacgcatcaatatgttgagttcaagtgagaaagtagcaggacagggagtttcaggtgcttaccgtgaattagttcgtcttcttcaccgtgctgccaaggaccaattgattgttacagaaaatcttccaatcgaggcagatgtgactcactttcatacgattgattttccctattatttatcaaccttccaaaagaaacgctcagggagaaagattggctatgtgcatttcttgccagctacacttgagggaagtttgaaaattccatttttcttaaagggaattgtgaaacgctatgtattttctttttacaaccggatggagcacttggttgtggtcaatcctatgtttattgaggatttggtagcagctggtattccacgtgaaaaagtgacctatattcctaactttgtcaacaaggaaaaatggcatcctctaccacaagaagaggtagtcagactgcgcacagatcttggtcttagtgacaatcagtttatcgtagtaggtgctgggcaagttcagaaacgtaaagggattgatgactttatccgtctggctgaggaattgcctcagattacctttatctgggctggtggcttctcttttggtggtatgacagatggttatgaacactataagaaaattatggaaaatccccctaaaaatttgatttttccaggcattgtatcgccagagcggatgcgcgaattgtatgctctagcggatcttttcttgttgcctagttacaatgagctctttcctatgactattttagaagctgcgagttgtgaggctcctattatgttgcgtgatttagatctctataaggtaattttggagggaaattatcgggcgacagcgggtagagaagagatgaaagaggctattttggaatatcaagcaaatcctgctgccttaaaaagatctcccaagaaaagggctaaagaatatttcccagagagtatttctgaagagcatcttgttacaaatctgggttgg

SEQ ID NO: 9448 - DNA, 291 bp, Streptococcus pneumoniae; identical to SEQ ID NO: 9403
  CDS (1)...(291)

SEQ ID NO: 9449 - DNA, 471 bp, Streptococcus pneumoniae
  CDS (1)...(471)
atgattaacaatgttgtacttgtagggcgtatgacacgtgacgctgagttgcgttataccccatcaaatgtagcagttgcgacttttactcttgcagtaaaccgtacatttaagagtcaaaatggtgaacgtgaggctgattttatcaatgtcgttatgtggcgccaacaggctgaaaatcttgctaactgggctaaaaaaggctcacttatcggggtgacaggtcgtatccagactcgtagttacgataaccagcaaggacaacgtgtctacgtgacagaggtcgtggctgagaatttccaaatgttggaaagccgtagtgtgcgtgagggccacacaggtggagcttactctgcaccaactgcaaactattcagcacctacaaattcagtaccagacttttcacgtaatgaaaatccatttggagcaacaaacccattggatatttcagatgatgatttaccattctaa

SEQ ID NO: 9450 - DNA, 240 bp, Streptococcus pneumoniae; identical to SEQ ID NO: 9405
  CDS (1)...(240)

SEQ ID NO: 9451 - DNA, 534 bp, Streptococcus pneumoniae
  CDS (1)...(534)
gtgaaggaaacttatactgatgaacatttggaaattatgcgtgataactgtgaaaatttgagagatttggcaataatagacctactagcatcgacaggtatgcgtgtaggggagcttgtacagttgaatcgttcagatattgattttgaaaacagagagtgtgttgtctttggtaaaggaaagaaggagagaccagtatattttgatgctcggacgaaaattcatttaagaaattatcttaacgacagaaaagatagtcaccctgctctttttgtaacgctagttggaaaagcccagagacttggaattgctggtgtagagattcgcttaagaaagttaggagacaaactcggcatacaaaaggttcacccacataagttcagaagaactttagcgactaaggcaattgataaaggtatgcctatcgaacaagtccaaaaactgctaggtcatagcaagattgacacaaccctggcctatgccatggtcaatcaaaataatgtcaagcattcacaccaaaaattcatctcttaa

SEQ ID NO: 9452 - DNA, 774 bp, Streptococcus pneumoniae
  CDS (1)...(774)
atgatttttgatacacatacacacttgaatgtagaagaatttgcaggtcgtgaggcagaagaaattgccttggctgctgagatgggtgtgatacagatgaatattgttggttttgataaaccgacgattgagcgtgccttggagttggtagatgagtatgagcagctctatgcgactattggttggcatcctacagaagctggtacttatacagaggaagttgaggcttacttgttggataagttaaaacatcccaaggttgtggctctaggtgaaattggcttagactaccattggatgacagcgcccaaagaggtgcaggagcaggtttttcgtcgtcagattcagctatctaaggacttggatttgccttttgttgtccatacccgtgatgcgctggaagatacctatgagattatcaagagtgagggcgttggtcctcgtggtggtatcatgcattcattttcagggacgcttgagtgggcagagaagtttgtggatcttggtatgaccatttccttctcaggagtggtgactttcaagaaggcaactgacctccaagaagcagctaaagagttacctttggacaagattttggtggaaacagatgcgccttacttagcacctgtacccaagcgtggtcgtgaaaataaaacagcctatactcgctatgtggtcgactttatcgctgacttgcgtggtatgacgacagaagagctggcggtagaaacgactgcaaatgcagaacgaatttttggattggacagcaagtaa

SEQ ID NO: 9453 - DNA, 561 bp, Streptococcus pneumoniae
  CDS (1)...(561)
atgaaagagaaaatttctcaagttatcgtggttgaaggtcgcgatgatacggtcaatctcaagcgttatttcgatgtggagacctatgagacacgaggttctgccatcaatgatcaggatatagagcgaattcagcgtctacaccaacgtcatggagtcattgtctttacagacccagattttaatggggagcggattcggcgcatgattatgacggccattccaacagttcagcatgcctttctcaagcgagatgaagctgttcccaagtccaagaccaaggggcgttctctgggaattgagcatgccagctatgaagacctgaaaacggctctagctcaggtgacagaacaatttgaacatgagagtcagtttgacattagtcgtagcgacttgattcgccttggttttctagcaggggcagacagccgtaagcgtagagaatatctcggagagactctccgaatcggctattccaacggcaagcaactcctcaaacgcctagagttgtttggggttactttggcagaagtggaagaagctatgaaatcttatgagtag

SEQ ID NO: 9454 - DNA, 1329 bp, Streptococcus pneumoniae
  CDS (1)...(1329)
gaatttgcacaagaaagactgactcgatccatgtatgatttctatgctattcaagctgaactcatcaaggtagaggaaaatgttgccactatatttctacctcgctctgaaatggaaatggtctgggaaaaacaactaaaagatattattgtagtagctggttttgaaatttatgacgctgaaataactccccactatattttcaccaaacctcaagatacgactagctcacaagttgaagaagctacaaatttaactctttatgactatagtccaaagttagtatctattccttattcagatacgggattaaaagaaaagtatacctttgataactttattcaaggggatggaaatgtttgggctgtatcagccgctttagctgtctctgaagatttggctctgacctataaccctctttttatctatggaggaccaggccttggtaagactcacttattaaacgctattggaaatgaaattctaaaaaatattcctaatgcgcgtgttaaatatatccctgccgaaagctttattaatgactttcttgatcacctaagacttggggaaatggaaaagtttaaaaagacctatcgtagtcttgatcttttgttaatcgatgatatacagtcactcagcggaaaaaaagtcgcaactcaggaagaatttttcaatacctttaacgcccttcatgacaagcaaaaacagattgtcctaacgagtgatcgtagtccaaaacatctagaagggctcgaggagaggcttgtcacgcgttttagttggggattgacacaaactatcacaccccctgactttgaaacacgtattgccattttacaaagtaagacggaacatttaggctacaatttccaaagtgatactctagaatacctagctgggcaatttgattcaaatgttcgagatcttgagggagccatcaacgacatcactttaattgccagagtaaaaaaaatcaaggatatcactattgatattgctgcagaagccattagagcccgcaaacaagatgttagccaaatgctcgtcatcccaattgataaaatccaaactgaagttggtaacttttatggtgttagtatcaaagaaatgaagggaagtagacgccttcaaaatattgttttggcccgtcaagtagccatgtatttatctagagaactaacagataatagtcttccaaaaattgggaaggaatttgggggaaaagatcataccacagtcattcatgcccatgccaaaataaaatctttgattgatcaagacgataatttacgtttagaaattgaatcaatcaaaaagaaaatcaaataa

SEQ ID NO: 9455 - DNA, 918 bp, Streptococcus pneumoniae
  CDS (1)...(918)
atgaatcaacaagaattagctaagaaaatgttgcttccatcaaagaattctcgtctggagaaattaggaaaaggtttgacctttgcctgtctttctttgatagtcatccttgtggccatgattttggttttcgtagcgcaaaaaggcttgtcgaccttctttgtcaatggtgtgaatatctttgactttcttttgggaggaacttggaatccttctagtaaagaatttggtgcccttcctatgattttgggttcctttatcgttaccattctctcagcccttatcgcaacaccctttgctattggtgcagcagtttttatgaccgaagtatcaccaaaaggggcgaagattttgcaaccagctattgaactcctggttgggattccttcagtagtgtacggatttattggcttgcaagtcgtcgttccctttgttcgcagtgtctttggtgggactggttttgggattttgtcagggatttccgtcctctttgtcatgattttgccgaccgtaacctttatgacaacggatagcttgcgtgcggttcctcgttattatcgtgaggccagtttcgctatgggagccactcgctggcagactatctggcgtgtgatcttgaaggcggcccgttctggtattttcactgcagtggtctttgggatggcgcgtgcctttggtgaggctttagctatccagatggttgtcggaaactcagctgttatcccaacttccttgaccacaccagctgcaactttaacttctatattaactatgggaattgggaacactgtcatgggaactgtaaataataatgttctctggtcactggccttggtactgctcttgatgagtttagtttttaacagtgtgattaaattgattacgaaagaaagaggaaagaaaaattatgcgcgctaa

SEQ ID NO: 9456 - DNA, 450 bp, Streptococcus pneumoniae
  CDS (1)...(450)
cgtgctatcaacgctcgtatcgagccaggtgctattatccgtgaccaggtggaaattggtgacaatgctgttatcatgatgggagctgttatcaatatcggtgctgaaatcggtgctggaaccatgattgacatgggtgccatccttggtggccgtgccatcgttggaaaaaatagccacgttggtgcaggtgcagttttggcaggtgtgattgagccagctagtgctgaaccagtccgtgtcggagacaatgttctcatcggggctaatgcagtggttatcgaaggagtccaaatcggtagtggttcagttgtcgcagcaggagctattgttacccaagatgtcccagaaaacgtggtagtagcaggtgttccagctcgtattatcaaagaaattgatgcccaaactcaacaaaaaacagcgctagaggatgcgcttcgtaccttgtaa

SEQ ID NO: 9457 - DNA, 795 bp, Streptococcus pneumoniae
  CDS (1)...(795)
atggatagtatgattttagggcgttatatcccaggggattcgattgttcaccgattggatccacgtagcaaattgcttgctatgatgctactgattttgattgtgttttgggctaataaccccttgacgaatctgattctttttatagcgacagggatatttattgccttgtcaggagtatctctttcattttttattcagggcttgaagtctatgtttttcttgattgccttcacaactatttttcaactatttttcatttctaatgggaatgttttatttgagttttcgtttgtgagaatcacggattatgctttgcaacaagctgggattattttttgtcgctttgtattgattattttcttttcaactttgttaaccttaacaaccatgcctttaagtttggcatcagctgtcgaagctttattagcacctttaaagcgtgtgaaagttccagttcatgaaattggattgatgctgtctatgagtttgcgttttgtcccaaccttgatggatgatacgactcggattatgaatgcacagaaagctcgtggagtggattttggagaaggaagcatcgttcaaaaagtaaaggcgatgattcccattttgattcctctttttgcgacaagtttaaaacgtgcagattccttggctatcgctatggaagcgcgtggctatcagggtggaaaaggcagaagtcaataccgacaattgaaatggactctaaaggatacgctgaccattcttgttattctcgtacttggttgttgtttatttttcttaaaatcttag

SEQ ID NO: 9458 - DNA, 987 bp, Streptococcus pneumoniae
  CDS (1)...(987)
atgcccgttacgattaaagacgtggccaaggctgctggtgtttcgccttcaaccgtaacccgtgttattcaaaataaatcaaccattagcgacgaaacaaaaaaacgcgttcgcaaggctatgaaggaactcaactaccacccaaacctcaacgctcgtagcttggtaagcagctatactcaggttatcggattagttcttcctgatgactcagacgccttctaccagaatcctttctttccatcggttctacgtggcatctctcaagtcgcatctgaaaaccactatgccattcagatagcaacagggaaagatgagaaggagcgtctcaacgctatttcacaaatggtctacggcaagcgtgtagatgggctaatctttctctatgcccaagaagaagaccctctcgtaaaactcgtcgcagaagaacagttccccttccttatcctaggtaaatctctatctcctttcatcccacttgtcgacaacgacaatgttcaagctggttttgatgcgactgaatatttcatcaaaaaaggctgcaaacgcattgcctttatcggaggaagtaaaaagctcttcgtgaccaaagaccgtttaacaggctatgaacaggcgcttaaacattacaaacttaccactgacaacaatcgcatctactttgccgacgagtttctggaagaaaagggctataaatttagcaagcgattattcaagcacgatccacaaattgatgctatcatcacaaccgatagcctcctagctgaaggtgtttgtaactatattgccaaacaccagctggatgtccctgttctcagctttgactcggttaatcccaagctcaacttggcagcctatgtcgatatcaatagtttagagcttggtcgtgtttcccttgaaactattctccagattattaatgataataaaaacaataaacaaatttgttaccgtcaattgatcgcccacaaaattatcgaaaaataa

SEQ ID NO: 9459 - DNA, 1839 bp, Streptococcus pneumoniae
  CDS (1)...(1839)
atgggattaaaacatcttgaagacgtgacttacttccgtcttaataacgaaattaaccgtcctgttaatggacaaatcatgcttcataaagataaggaagccttggatgctttctttaaagaaaatgtagttccaaacactatggtttttgattcaatcaaagacaaaatcaattacctcattgaacacaactacatcgaaacagcctttatcaagaaataccgtccagagttcttggaagaattggctcaatttatcaaagaccaaaacttccaattcaagtcattcatggcagcttataaattttacaatcaatatgccttaaagactaatgacggtgaatactatcttgaaaatatggaagaccgtgtcttcttcaacgccctttatttcgctgatgggaatgaagctgttgcaatcgatattgccaatgaaatcatccaccaacgctaccaacctgctactccttccttcttgaatgctggacgtgctcgtcgtggggagttggtatcttgtttcctaatccaagtgacggatgatatgaactctatcgggcgttctatcaactcagctcttcaactttcacgtattggtggtggtgtgggaattaccctcagcaaccttcgtgaagctggtgcacctatcaaaggctatgaaggagctgcttcaggtgtcgttcctgttatgaagctttttgaagacagcttctcttactccaaccaattggggcaacgtcaaggtgccggcgttgtctacctcaacgtctttcacccagatatcatcgctttcctttcaactaagaaagaaaacgctgatgaaaaagtacgtgtcaagactctatcacttggtgttgtagtacctgataaattctacgaattggctcgtaaaaatgaagaaatgtacctcttcagcccttactctgtagaaaaagaatacggtgtgccattcaattacatcgacattactgaaaaatacgatgaattggtcgcaaatccaaatattcgcaagacaaaaatcaaggcgcgggatttggaaactgaaatctctaaattgcaacaagagtctggctatccttatgtagtcaacatcgatacggctaaccgtgcaaatcctgttgatggaaagattatcatgagtaacttgtgttctgagattcttcaagttcaagaaccaagcttgatcaacgatgctcaagaattccttcaaatgggaacagatgtttcatgtaacctgggttcaaccaacgtggttaacatgatgacttcacctgattttggtcgttctatccgtgctatggttcgtgcccttactttcgttacagatagttcacatatcgtagctgtaccaacgattgaccatggaaatagccaagcccacacctttggtctcggtgccatgggactgcacagctaccttgcccaacaactcattgaatatggttcacctgagtctgttgaatttacaagcatctactttatgcttatgaactactggaccttggtagagtcaaacaatattgcacgtgaacgtggtattaccttccacaactttgaaaaatcagactatgctaacggaagttactttgacaagtatgtaactggtgaatttgttccaacatcagaccgtgttaaagaactcttcaaaaatgtttttatccctggtgttgctgattgggctgaacttcgcgacaaggttcaagaagatggtctttaccaccaaaatcgccttgctgtagcgccaaatggttctatcagctatatcaacgacgtttctgcttctatccacccgattacgcaacgtatcgaagaacgccaagagaagaaaattggtaaaatctac

SEQ ID NO: 9460 - DNA, 705 bp, Streptococcus pneumoniae
  CDS (1)...(705)
atgaaaaaaatactaattgtagatgatgagaaaccaatctcggatattatcaagtttaatatgaccaaggaaggttatgaagttgtaactgcttttaatggtcgtgaagcgctagagcaatttgaagcagagcaaccagatattattattctggatttgatgcttccagaaattgatggtttagaagttgctaagaccattcgtaagacaagcagtgtgcccattcttatgctttcagccaaagatagtgaatttgataaggttatcggtttggaacttggggcagatgactatgtaacgaaacccttctccaatcgtgagttgcaggcgcgtgttaaagctcttctgcgtcgttctcaacctatgccagtagatggtcaggaagcagatagtaaacctcaacctatccaaattggggatttagaaattgttccagacgcctacgtggctaaaaaatatggcgaagaactagacttaacccatcgtgaatttgagcttttgtatcatttagcatcgcatacaggtcaagtcatcacgcgcgaacacttgcttgagactgtctggggttatgactattttggtgatgtccgtacagttgatgtgactgtacgacgtctgcgtgagaagattgaagatacgcccagccgaccagagtatatcttgacacgccgtggtgtagggtattacatgagaaataatgcttga

SEQ ID NO: 9461 - DNA, 1350 bp, Streptococcus pneumoniae
  CDS (1)...(1350)
atgcttgatttactgaaacaaaccatttttaccagagattttatctttatcctgattttgttaggtttcatccttgttgtgaccctcttattactggaaaatagacgtgataatattcagttgaagcaaatcaatcaaaaggttaaagatttgattgcaggagattattccaaggttcttgatatgcaaggtgggtctgaaatcaccaatattaccaataatttgaatgacttgtcggaggttattcgtctcactcaggaaaatctagaacaagagagtaagaggctaaatagtattctgttttatatgacagatggggttcttgcgaccaaccgtcggggtcagattatcatgattaacgatacagccaagaagcaactggggttggttaaggaagatgttctgaatagaagcattttggaattgctcaagatagaagaaaactatgaattgcgtgatttgattacccaaagtccagaattgttgctagattcccaagatatcaatggtgaatatttgaaccttcgagttcgctttgccttgatacgtcgagagtctggctttatttcaggtttggtggctgttttgcatgatacgacggagcaggagaaggaagaacgcgaacgaagactctttgtttccaatgttagccatgagttacggactcctctgactagcgtaaaatcctatcttgaagccttggatgagggggctttgtgtgaaactgtagcaccagactttatcaaggtttctcttgatgagaccaaccgtatgatgcgcatggtgacggatctcctccatctttcacgtattgataatgctaccagtcacctagatgtggaactgattaacttcactgcttttattacctttatcctcaatcgttttgacaagatgaaaggacaggaaaaggagaaaaaatatgagttggtgagagattatcccatcaattctatctggatggaaattgatacagataagatgacgcaggttgtcgacaatattttaaataatgctattaagtattcgccagatgggggtaaaatcactgtcagaatgaagacaactgaagaccagatgattttatccatttctgaccacggtttggggattcctaagcaggatttaccacgtatctttgaccgtttctatcgtgtggatcgtgctagaagtcgtgcacaaggtggtacaggtctaggactgtctatcgctaaagaaattattaaacaacataagggctttatttgggccaagagtgaatacggcaagggttcaacctttaccattgtgctcccttatgataaggatgcagtgaaagaagaagtatgggaggatgaagtagaagactag

SEQ ID NO: 9462 - DNA, 1269 bp, Streptococcus pneumoniae
  CDS (1)...(1269)
atgctactaatcaaaaatggtcgtgtaatggatcccaagtctggtttggatcaagtttgtgatgtcttagttcaagatgggaaaattatcaaaattgcgcctgagatcacggaagaaggagcagaaacgattgatgctactggtcttgtggttgctcctggtttggtcgatattcatgtgcatttccgtgaacctggtcaaacacataaagaagacattcatactggtgccctagcagccgctgcaggtggttttactactgtcgtcatgatggctaataccagtccaaccatttcagacgtggagactttgcaagcagttctccagtcagctgccaaagagaagattaatgtcaagacagttgcgaccattactaaaaactttaatggtaaaaacttgactgactttaaggcactcttagaagctggtgcggttggtttctctgatgacggtattccgcttgagagcagtaagattgtcaaggaagccatggaggaagccaaaaaactcaatacctttatcagccttcatgaggaagatccaggtttgaacggtgttcttggctttaatgaaaatattgctagagaacatttccatatctgcggtgctactggggtggctgagtacgctatgatggcgcgtgatgtcatgattgcctatgcaactaaagcccatgttcacatccagcatttgtctaaggaagaaagtgttaaagtagtggagtttgctcaggggttaggtgcagaagtcacagcagaagtagcgccacagcatttctctaagacagaagcacttcttttaacacaaggtagcaatgctaagatgaatccaccgcttcgtttggaatcagaccgtcgtgccgttatcgaaggtctcaaatcaggtgtcatcacagttattgcgactgaccacgcgcctcatcatgtagatgaaaaaaatgttgaggatattaccaaagcgccatctggtatgactggcttagaaacatccctgtctctcggcttgacctatttggtagaagctggtgagttgagcttgatggaattacttgaaaaaatgacatacaacccagccaagctttacaactttaaagcaggttacttggctgagaatggtccagcagatatcactatttttgatgccaaggctgaccgccttgtggactcccattttgcttccaaagcagctaattcaccattcatcggtgaaaccttaaaagggcaggttaaatataccatctgtaagggacaaatcgtctatcaagcttga

SEQ ID NO: 9463 - DNA, 891 bp, Streptococcus pneumoniae
  CDS (1)...(891)
atgacaaagaaacaacttcacttggtgattgtgacagggatgagtggcgcagggaaaactgtagccattcagtccttcgaggatctaggttatttcaccattgataatatgccgccagctctcttgcctaagtttttgcagctggttgaaattaaggaagacaatcctaagttggccttggtagtggatatgcgtagccgttctttcttttcagagattcaagctgttttggatgagttggaaaatcaagatggtttggatttcaaaatcctctttttggatgcggctgataaggaattggtcgctcgttacaaggaaaccagacggagtcacccactagcagcagacggtcgtattttagatggaatcaagttggaacgtgaactcttggcacctttgaaaaatatgagccaaaatgtggtggatacgactgaactcactccacgtgagctgcgtaaaacccttgcagagcagttttcagaccaagaacaagcccagtctttccgtatcgaagtcatgtctttcggatttaaatatggaatcccgattgatgcggacttggtctttgatgtccgtttcttgccaaatccctattatctaccagaactgagaaaccaaacgggtgtggatgaacctgtttatgattatgtcatgaaccatcctgagtcagaagacttttatcaacatttattggccttgattgagccgattctgccaagttaccaaaaggaaggtaagtccgttttgaccattgctatgggatgtacgggtggacaacaccgtagtgtggcatttgctaaacgcttggtgcaggacttatccaagaattggtctgttaatgaagggcatcgcgacaaagaccgcagaaaggaaacggtaaaccgttcatga

SEQ ID NO: 9464 - DNA, 978 bp, Streptococcus pneumoniae
  CDS (1)...(978)
atgagaaaaccaaagataacggtgattggtggagggactggaattcccgtcattctaaaaagtctgcgggaaaaagatgtggaaatcgcagctatcgtgacggtggcagatgatggtggttcttcaggtgaactccgaaaaaatatgcaacagttgacaccgccaggtgatcttcgtaatgtccttgtggccatgtcggatatgcctaagttttatgagaaggtctttcagtatcggttctctgaggatgccggagcctttgctggccatccattgggaaatctcatcattgctggcttgtcagaaatgcagggttcaacctataatgccatgcagttattgagcaaatttttccatacaacagggaaaatttatccttccagtgaccatcctttgacccttcatgcagtctttcaggatgggacagaagtggctggagagagtcatattgtagaccatcgaggcataattgacaatgtctatgtgaccaatgccctaaacgatgatacgcctctggccagccgtcgagtagtgcagaccatccttgaaagtgacatgattgtcctagggccaggttccctctttacctctattttgcccaatatcgtgattaaggaaattgggcgggctcttttggaaactaaggcagaaattgcctatgtctgcaatatcatgacccaacgtggggagacggaacactttacagatagcgaccacgtggaagtcttgcatcgtcaccttggtcgcccttttatcgacactgtcttggtgaatattgaaaaagtgcctcaggaatacatgaattccaaccgttttgatgaatacttagtgcaagtggaacacgattttgtaggtctttgtaagcaagtttcgcgcgtgatttcatctaacttccttcgtctggaaaatggcggtgccttccacgatggagatttgattgtggacgagttgatgcgcattatacaggtgaaaaaatga

SEQ ID NO: 9465 - DNA, 1704 bp, Streptococcus pneumoniae
  CDS (1)...(1704)
atggccttagaagtaattatgccaaaagccggcgtggatatgacagaaggacaaatcgtccaatggaataaaaaagtcggagaatttgtaaaagaaggagaaatccttttggaaatcatgactgataaagtcagcatggaattggaagccgaagaagatgggtacttgattgccattctcaaaggagatggtgaaactgtccctgtaacggaagttatcggttaccttggtgaagaaagggaaaacatcccaacagctggagcagcatcgccagaagctagccctgtacctgtagcaagtacctcaaacgatgatggtaagagcgatgatgcttttgatatcgttgtgattggtggaggtcctgctggttatgttgcagccattaaagctgcccaactcggcggtaaggttgcccttgttgagaaatctgaacttggtggaacctgcttaaaccgtggatgtattccaaccaagacctaccttcatagcgctgaaattattgaaaatatcggtcatgctgcaaatcgtggtatcgtgattgaaaatcctaacttcactgttgatatggaaaaacttttagaaactaaatctaaagttgttaatactcttgttggtggtgttgcaggacttcttcgtagctacggagttgctgttcataaaggaattggtacaatcactaaagacaagaacgtcttggtaaatggttctgaattgcttgaaaccaagaaaatcattcttgctggtggttcaaaagtcagcaagatcaacgtccctggtatggaatctccacttgtcatgactagtgatgacattcttgaaatgaacgaagtgccagaaagccttgttatcatcggtggtggagttgtcggtatcgaactcggtcaggccttcatgacatttggttcaaaagtgactgttatcgaaatgatggaccgtatagttccagctatggatgtggaagtttctaagaaccttcgcttgatccttgagcgtaaaggaatgaccatcttgactggtactaaactgcaagaaatcattgaggaaaatggtcaacttcgtatcaaggttgaaggaaaagacgatatcatcgcaagcaaagctcttctttcaattggtcgtatgccagaccttgaaggtattggagaggttgagtttgaattggatcgtggttgtatcaaggtcaacgaatacatggaaacttcagttccaggcatttatgcaccaggtgacatcaacggtactaagatgttggctcacgcagctttccgcatgggtgaagtttccgctgaaaatgcccttaaaggaaatcatgcagttgccaaattgaatttgactcctgcagccatctacactcttcctgaagtagcagcagtaggtttgacagaagaacaagcccgtgagaaatacgatgttgccatcggtaagtttaactttgctgctaacggtcgtgctattgcatctgacgcagctcaaggtttcgtaaaagttatcgctgataagaaatacggagaaatccttggtgtacacattattggtcctgcagccgcagaattaataaacgaagcatcaagcatcatcgaaatggaaatcactgttgaggaaatgctgaagaccatccacgggcacccaacttactctgaagtgatgtacgaagcgtttgcagatgttctaggaatggccatccattcacctaagaaaaaataa

SEQ ID NO: 9466 - DNA, 543 bp, Streptococcus pneumoniae
  CDS (1)...(543)
atgctttatccaacacctattgccaagttgattgacagttattctaagttaccaggtatcgggattaagacggctacgcgtctggccttttatacgattgggatgtctgctgatgatgtcaatgaatttgcaaaaaatctcctttctgctaagagagaattgacatattgttctatttgtggacgtttgacagacgacgatccttgttctatctgtactgattcgactcgtgaccagacaacaattttagttcttgaggatagtagagatgtggcagccatggaaaatatccaagaataccatggactctatcatgtcctgcatggcctcatttctcctatgaatggtatcagtccggacgatatcaatcttaagagccttatgactcgtcttatggatagtgaggtttcagaagtgattgtggcgactaatgctacagcggatggtgaagcgacctccatgtatctttcacgtttgctcaagccggctggtatcaaggttacgcgtctagcacgaggtctcgctgtgggagtggacattgag

SEQ ID NO: 9467 - DNA, 969 bp, Streptococcus pneumoniae; identical to SEQ ID NO: 9210
  CDS (1)...(969)

SEQ ID NO: 9468 - DNA, 1851 bp, Streptococcus pneumoniae
  CDS (1)...(1851)
atgaataaaaaactaacagattatgtgattgatctggtggaaattttaaataaacaacaaaagcaggttttctggggaatatttgatattttcagtatggtggtttccataattgtatcttatattttattttatgggctgattaatccagcacctgttgactacattatctatacgagtttggccttcttgttctatcaattgatgattggtttttgggggttgaacgcgagcattagtcgttacagcaagattacggatttcatgaaaatcttttttggtgtgactgctagcagtgtcttgtcatatagtatctgttatgccttcttgccactcttctccatccgtttcatcattctctttatcttgttgagtaccttcttgattttattgccacggattacttggcagttaatctactccagacgcaaaaaaggtagtggtgatggagaacaccgtcggaccttcttgattggtgccggtgatggtggggctctctttatggatagttaccaacatccaaccagtgaattagaactggtcggtattttggataaggattctaagaaaaagggtcaaaaacttggtggtattcctgttttgggctcttatgacaatctgcctgaattagccaaacgccatcaaatcgagcgtgtcatcgttgcgattccgtcgctggatccgtcagaatatgagcgtatcttgcagatgtgtaataagctgggtgtcaaatgttacaagatgcctaaggttgaaactgttgttcagggccttcaccaagcaggtactggcttccaaaaaattgatattacggaccttttgggtcgtcaggaaatccgtcttgacgaatcgcgtctgggtgccgaactgacaggtaagaccatcttagtcacaggagctggaggttcaatcggttctgaaatctgtcgtcaagttagtcgcttcaatcctgaacgtattgtcttgctcggtcatggggaaaactcaatctaccttgtttatcatgaattgattcgtaagttccaagggattgattatgtacctgtgattgcggacattcaagactatgatcgtttgttgcaagtctttgagcagtacaaacctgctattgtttatcatgcggcagcccacaagcatgttcctatgatggagcgcaatccaaaagaagccttcaaaaacaatatccgtggaacttacaatgttgctaaggctgttgatgaagctaaagtgtctaagatggttatgatttcgacagataaggcagtcaatccaccaaatgttatgggagcaaccaagcgcgtggcggagttgattgtcactggctttaaccaacgtagccaatcaacctactgtgcagttcgttttgggaatgttcttggtagccgtggtagtgtcattccagtctttgaacgtcagattgctgaaggtgggcctgtaacggtgacagacttccgcatgacccgttactttatgaccattccagaagctagccgtctggttatccatgctggtgcttatgccaaagatggggaagtctttatccttgatatgggcaaaccagtcaagatttatgacttggccaagaagatggtgcttctaagtggccacactgaaagtgaaattccaatcgttgaagttggaatccgcccaggtgaaaaactctacgaagaactcttggtatcaaccgaactcgttgataatcaagttatggataagattttcgttggtaaggttaatgtcatgcctttagaatccatcaatcaaaagattggagagttccgcactctcagtggagatgagttgaagcaagctattatcgcctttgctaatcaaacaacccacattgaataa

SEQ ID NO: 9469 - DNA, 531 bp, Streptococcus pneumoniae
  CDS (1)...(531)
atgcgaaaagaaattgcacctgaattatacaactataacaagtttcctggtccggagttccatttacacggggacaaggtcgaaacggaagggatagctttttccttggttgaaaatatcaaggatgcctttgatgtgacgacttttaatcagcgtttttcagaagtcttaaccaagtttgattatatcgtgggggactggagcaacgaacagcttcgcctacgaggtttttacaaggatgaccgaacagaagaaaaacttgaaaaaatcagtcgtttacaagactaccttttagagtattgtagttatggttgtgcctattttgtcttagaaaatgaagcccctaagcgagcatcatttgacaagaaaatgcgtaagacggaagaagaaacaccttctagaaaaggaaagaaaccgactcaaactaaacgaaagtcgaatgcagataagaaaaatagacgtcgtcagaaagaccagcattctcagaaagaggacaaggaacaacgtcattttgtcattcgtcagaagtga

SEQ ID NO: 9470 - DNA, 240 bp, Streptococcus pneumoniae; identical to SEQ ID NO: 9318
  CDS (1)...(240)

SEQ ID NO: 9471 - DNA, 720 bp, Streptococcus pneumoniae
  CDS (1)...(720)
atgaagattgatattttaaccctctttccagagatgttttctccactggagcactcaatcgttggaaaggctcgagaaaaagggctcttggatatccagtatcataattttcgagaaaatgctgaaaaggcccgtcatgtagatgatgagccctacggaggcggtcagggcatgttgctcagagcacaacctattttcgattcctttgatgctattgaaaagaaaaatccgcgcgttattctcctcgatcctgctggaaagcagtttgatcaggcttatgctgaagatttggctcaagaggaagagctaatctttatctgtgggcactatgagggttatgatgagcgcattaagaccttggtaacagatgagatttccctaggcgactatgtcctcactggtggagaattggcagctatgaccatgattgatgctacagttcgcctgattccagaagtgattggcaaggagtctagccaccaagatgatagtttttcttcaggtcttttagaatatcctcagtacacacgtccctatgattatcgaggcatggtcgtgccagatgtattgatgagtggccaccatgaaaagattcgtcagtggcgattgtacgagagtttaaagaaaacctacgagcgcagaccggatttacttgaacattatcaactgacagtagaagaagaaaaaatgctggcagaaatcaaagaaaacaaagaataa

SEQ ID NO: 9472 - DNA, 399 bp, Streptococcus pneumoniae
  CDS (1)...(399)
atggttatgactgacccaatcgcagacttcctaactcgtattcgtaatgctaaccaagctaaacacgaagtacttgaagtacctgcatcaaacatcaaaaaagggattgctgaaatccttaaacgcgaaggttttgtaaaaaacgttgaaatcatcgaagatgacaaacaaggcgtcatccgtgtatttcttaaatacggaccaaatggtgaaaaagttatcactaacttgaaacgtgtttctaaaccaggacttcgtgtctacaaaaaacgtgaagaccttccaaaagttcttaacggacttggaattgccatcctttcaacttctgaaggtttgcttactgataaagaagcacgccaaaagaatgttggtggtgaggttatcgcttacgtttggtaa

SEQ ID NO: 9473 - DNA, 537 bp, Streptococcus pneumoniae
  CDS (1)...(537)
atgtcacgtattggtaataaagttatcgtgttgcctgctggtgttgaactcgctaacaatgacaacgttgtaactgtaaaaggacctaaaggagaacttactcgtgagttctcaaaagatattgaaatccgtgtggaaggtactgaaataactcttcaccgtccaaacgattcaaaagaaatgaaaactatccacggaactactcgtgcccttttgaacaacatggttgttggtgtatcagaaggattcaagaaagaacttgaaatgcgtggggttggttaccgtgcacagcttcaaggatctaaacttgttttggctgttggtaaatctcatccagacgaagttgaagctccagaaggaattacttttgaacttccaaacccaacaacaatcgttgttagcggaatttcaaaagaagtagttggtcaaacagctgcttacgtacgtagccttcgttcaccagaaccatataaaggtaaaggtatccgttacgttggtgaattcgttcgccgtaaagaaggtaaaacaggtaaataa

SEQ ID NO: 9474 - DNA, 396 bp, Streptococcus pneumoniae; identical to SEQ ID NO: 9116
  CDS (1)...(396)

SEQ ID NO: 9475 - DNA, 495 bp, Streptococcus pneumoniae; identical to SEQ ID NO: 9117
  CDS (1)...(495)

SEQ ID NO: 9476 - DNA, 225 bp, Streptococcus pneumoniae; identical to SEQ ID NO: 9118
  CDS (1)...(225)

SEQ ID NO: 9477 - DNA, 441 bp, Streptococcus pneumoniae; identical to SEQ ID NO: 9119
  CDS (1)...(441)

SEQ ID NO: 9478 - DNA, 390 bp, Streptococcus pneumoniae
  CDS (1)...(390)
gtggttcgtcccacgatgctaggcgagtcttcacaaaaaatcggggaaacccataaaaatcataggaggtgcataatgagcacatacgcaattatcaaaactggcggaaaacaagttaaagttgaagttggtcaagcagtttacgttgaaaaattgaacgttgaagctggtcaagaagttacttttaacgaagttgttcttgttggtggtgaaaacactgttgtcggaactccacttgttgctggagctactgtagttggaactgttgaaaaacaaggaaaacaaaagaaagtggttacttacaagtacaaacctaaaaaaggtagccaccgtaaacaaggtcaccgtcaaccatatacaaaagttgtcatcaacgcaatcaacgcttaa

SEQ ID NO: 9479 - DNA, 345 bp, Streptococcus pneumoniae
  CDS (1)...(345)
atgatacaggcagtctttgagagagccgaagatggcgagctgaggagtgcggaaattactggacacgccgagagtggcgaatacggcttagatgtcgtgtgtgcatcggtttctacgcttgccattaactttatcaattctattgagaaatttgcaggctatgaaccaatcctagaattaaacgaagatgaaggtggctatctgatggttgaaataccaaaagatcttccttcacaccagagagaaatgacccagttattctttgaatcatttttcttaggtatggcaaacttatcggagaactattctgagttcgtccaaaccagagttatcacagaaaactaa

SEQ ID NO: 9480 - DNA, 294 bp, Streptococcus pneumoniae; identical to SEQ ID NO: 9222
  CDS (1)...(294)

SEQ ID NO: 9481 - DNA, 1023 bp, Streptococcus pneumoniae
  CDS (1)...(1023)
atgattaatcaaatttatcaactaactaagcctaagtttatcaatgtcaaatatcaggaagaggctattgaccaagagaatcatatccttatccgtcccaactacatggctgtctgtcatgcggatcagcgttactatcagggaaaacgtgatcccaagattttgaataaaaagcttccaatggcaatgattcacgagtcatgtggaaccgtcatttctgacccgaccggaacctacgaggttggtcaaaaagttgtcatgattcccaatcagtctcctatgcagagtgatgaagaattctatgaaaactacatgacagggacccatttcttgtctagtggatttgatggctttatgagagagtttgtttctctccctaaagatcgtgtggtggcttatgatgctattgaagatacggttgcagccattacagagtttgtcagtgtgggcatgcacgctatgaatcgtctattgactcttgctcatagcaagcgggagcggatcgccgttattggagatggaagtttagcttttgtggttgccaatattatcaactatactttgccagaatcagagattgtggttattggtcgtcattgggaaaagttggaactcttctcatttgccaaagaatgctatattacggataatattcctgaagagttggcctttgaccatgcttttgaatgttgtggtggtgatggtactggaccagctattaatgacttgattcgctacattcgtcctcagggaacgattctcatgatgggagttagcgaatataaagtcaatctcaatactcgcgatgccttagaaaagggcttgattttggttgggtcatctcgttctggtcgcattgattttaaaaatgctatccaaatgatggaagtcaagaaatttgccaatcgtcttaaaaatatcctttatctagaagaacctgtaagagaaattaaagatattcatcgtgtctttgcaaccgatttaaacacagcctttaaaacagtgtttaagtgggaagtataa

SEQ ID NO: 9482 - DNA, 921 bp, Streptococcus pneumoniae
  CDS (1)...(921)
atgactaaaacagcctttttatttgctggtcaaggtgcccagtatctagggatgggacgggatttctatgatcagtatccgattgtcaaagaaacgattgatcgagcgagtcaggtgctaggttatgatttgcgttatctcatcgatacggaagaggacaaactcaatcagacccgctatacgcaaccagccattctagcgacttcggttgctatctaccgtttattgcaagaaaagggctatcagcctgatatggttgctggtttgtctcttggagaatactctgccttggtggcaagcggcgccttggattttgaagatgcggttgccttggtagctaagcgtggagcctatatggaagaagcggctcctgctgactctggcaagatggtagcagttctcaatacgccagtagaggtcattgaagaagcctgtcaaaaagcttctgaacttggagtggttactccagccaactataacacacctgcacaaatcgtcattgctggagaagtggttgcagttgatcgagcggttgaacttttgcaagaagcaggtgccaaacgcttgattcctcttaaggtgtcaggtccctttcacaccgctctccttgaacctgctagccagaaactagctgaaactctagctcaggtaagtttttcagattttacttgtcccctagtcggcaatacagaagctgctgtgatgcaaaaagaggacattgctcagctcttgacgcgtcaggtcaaggaacccgttcgtttctatgaaagtattggggtcatgcaagaagcaggcataagcaactttatcgagattggaccggggaaagttttgtcaggttttgttaaaaaaattgatcgaactgctcacttagctcatgtggaagatcaagcgagtttagtagcacttttagaaaaatag

SEQ ID NO: 9483 - DNA, 732 bp, Streptococcus pneumoniae
  CDS (1)...(732)
atgaaactagaacataaaaatatctttattacaggttcgagtcgtggaattggtcttgccatcgcccacaagtttgctcaagcaggagccaacattgtcttaaacagtcgtggggcaatctcagaagaattgctcgctgagttttcaaactatggtatcaaggtggttcccatttcaggagatgtatcagattttgcagacgctaagcgtatgattgatcaagctattgcagaactgggttcagtagatgttttggtcaacaatgcagggatcacccaagatactcttatgcttaagatgacagaagcagattttgaaaaagtgctcaaggtcaatctgactggtgcctttaatatgacacaatcagtcttgaaaccgatgatgaaagccagagaaggtgctatcattaatatgtctagtgttgttggtttgatggggaatattggtcaagctaactatgctgcttctaaggctggcttgattggctttaccaagtctgtggcacgcgaggtcgctagtcggaatatacgagtcaatgtgattgctccaggaatgattgagtctgatatgaccgctatcttatcagataagattaaggaagctacactagctcagattccgatgaaagaatttgggcaggcagagcaggttgcagatttgacagtatttttagcaggccaagattatctaactggtcaagtgattgccattgatggtggcttaagtatgtag

SEQ ID NO: 9484 - DNA, 870 bp, Streptococcus pneumoniae
  CDS (1)...(870)
atgaagattattgtacctgcaaccagtgccaatatcgggccaggttttgactcggtcggtgtagctgtaaccaagtatcttcaaattgaggtctgcgaagaacgagatgagtggctgattgaacaccagattggcaaatggattccacatgatgagcgtaatctcttgctcaaaatcgctttgcaaattgtaccagacttgcaaccaagacgcttgaaaatgaccagtgatgtccctttggcgcgcggtttgggttcttccagctcggttatcgttgctgggattgaactagccaaccaactgggtcaactcaacttatcagaccatgaaaaattgcagttagcgaccaagattgaagggcatcctgacaatgtggctccagccatttatggtaatctcgttattgcaagttctgttgaagggcaagtctctgctatcgtagcagactttccagagtgtgattttctagcttacattccaaactatgaattacgtactcgcgacagccgtagtgtcttgcctaaaaaattgtcttataaggaagctgttgctgcaagttctatcgccaatgtagcggttgctgccttgttggcaggagacatggtgaccgctgggcaagcaatcgagggagacctcttccatgagcgttatcgtcaggacttggtaagagaatttgcgatgattaagcaagtgaccaaagaaaatggggcctatgcaacctacctttctggtgctgggccgacagttatggttctggcttctcatgacaagatgccaacaattaaggcagaattggaaaagcaacctttcaaaggaaaactgcatgacttgagagttgatacccaaggtgtccgtgtagaagcaaaataa

SEQ ID NO: 9485 - DNA, 2865 bp, Streptococcus pneumoniae
  CDS (1)...(2865)
atggtaagcaataatggactagaaagaacaaagatgcaagataaaattgtcattcatggggcgcgtgcccataatttaaaaaatattgatgtggagattccgcgagacaagttggttgtcgtgactggcttgtcaggttcagggaagtccagtctggcttttgatactctctatgcggagggacaacgtcgctatgtagagagtttgtctgcctacgctcgtcagttcttgggaaatatggaaaaaccagatgtagatgccattgatggtctcagcccagctatttccatcgaccagaaaacgactagtaaaaatcctcgctcgacggtgggaacgacgactgaaatcaatgactatctgcgtctcctctacgcacgtgtggggacgccttactgtatcaacggacatggagctatcaatgcttcttctgtggagcaaatcgttgataaggttttggagttacctgaacgccagcgcttgcagatcttggctcctgtcatccgcaagaaaaaaggccaacataagagtgttatcgagaaggttcagaaagacgggtatgttcgtgttcgtgtggatggggaagtctatgatgtgaccgaagtgccagagttgtctaagagcaagcaacacaatatcgatgtcgtggttgaccgtattgttatcaaggagggcattcgtagccgtctctttgattccattgaagctgcccttcgtatcgcagaaggttatgtgattatcgacaccatggacgactctgagttgttgttctctgagcattatgcctgtccagtttgtggatttactgtcccagagttagaacctcgtctcttctctttcaatgctccctttggctcttgtagtgagtgtgacggcttggggattaagctggaggtggatactgatttggtagtgccagatgccagcaaaaccttacatgagggagcgctggcaccttggaatcctatctcatccaactactatccaaacatgttagagcaggccatgaaagtctttggagtggctatggataagccttttgaggacctgtcagaagaagataagaacttgattctctacggctcagatggtaaggaattccatttccattatgaaaatgaatttggtggtgtgcgcgatatcgacattccgtttgagggagttatcaataatatcaaacgtcgttaccatgaaaccaatagcgattacactcgcactcagatgcgtctctacatgaatgagctgacctgcggaacctgtcaaggctatcgtctcaatgaccaggccttgtctgtccgtgtgggcggccagcaagggccacatattggagaaatctcagacctgtctatcgctgaccacttggacttggtgagccagttaactttgtctgaaaatgaagccatcattgctcgtcccattctcaaggaaatcaaggatcgtttgaccttccttaataatgtgggtcttaactatctaaccctgtcacgttcagcaggaaccctttcaggtggggaaagtcagcgcattcgtttggcaacccagattggttccaacctatcaggtgtcctctatatcctagacgagccgtcaatcggtcttcaccagagggacaatgaccgcctgattgccagtctgaaaaagatgcgtgacttgggcaatactcttatcgtggtggaacacgacgaagataccatgcgtgaagctgattatctgattgacgttggtcctggtgccggtgtttttggtggtgagattgttgcagcaggtacacctaagcaagtggctcgcaacagcaagtctatcacaggtcagtacttgtcaggcaaacgtgtcatcccagtaccagaagagcgccgtgtcggaaatggtcgttttattgaagtgacaggagcgcgtgagaacaacttgcaaaatgtcacggctcgctttccactaggaaaatttatcgcagtgacaggtgtgtcgggttcagggaaatcgactctaatcaacagcattctcaaaaaagccattgcccagaagctcaaccgtaattcagacaaacctggtaagtttaagactattacagggattgagcatgtcgaccgtttgattgatattgaccagagccctatcggacggacgccgaggtctaacccagctacctatacaggagtttttgacgatatacgtgacctttttgctcagacaaatgaagccaagattcgaggctacaagaaggggcgcttcagtttcaacgtcaagggaggtcgctgtgaagcttgctcaggtgacgggattatcaagattgagatgcacttcttgccagatgtttatgtggcttgtgaagtttgccacggaacccgctataacagtgaaaccctagaagttcactacaaggaaaagaatatttcgcaggtcttggatatgacggtcaacgatgcggtagaatttttccaacacattccgaaaattcaacgcaaactccagaccatcaaggatgtaggtctaggctatgtgaccttgggacagccagctaccaccctttctgggggagaagcccaacgtatgaagttagctagcgaactccacaaacgctcgacaggaaaatctttctacattctggatgagccgacgacagggcttcatacagaggacattgctcgcctgctcaaggttttagctcgctttgtagacgccggcaatacagtcctcgtcatcgagcacaatctggatgttatcaagacggcagaccatatcattgacttgggacctgagggcggtgtcggtggtggaaccatcatcgtaacaggaactccagaagaagtagctgccaacgaagccagctatacaggacactatttgaaaggaaagttacatcatgaataa

SEQ ID NO: 9486 - DNA, 426 bp, Streptococcus pneumoniae
  CDS (1)...(426)
atggactttcttctattttatgactctaaaaagaaaggagacactatgacctatttggaaaaatggtttgacttcaatcggcgtcagaaagaaattgaaagtctcttggaagagaccattgcccaacagagcgagcaaagtctgaccttgaaagagttctacctgctctactatctggacttggctgaagaaaaatctctacgccagattgacctgccagataagcttcatctgagcccgagcgcagtttctaggatggtggctcgcttggaagctaaaaattgcggtttactcagtcgcatgtgttgccatcaagatagacgctctagttttatctgcctgacaaatgatgggcaaaagacactggcctcgctacaaaagactgtcgaagaaagcttggaagcaggtttggatttcttgatttaa

SEQ ID NO: 9487 - DNA, 1257 bp, Streptococcus pneumoniae; identical to SEQ ID NO: 9364
  CDS (1)...(1257)

SEQ ID NO: 9488 - DNA, 804 bp, Streptococcus pneumoniae
  CDS (1)...(804)
atgacccaggatttacagaaaagaaccttgtttgcagggattgccctggctattttcctaccaattttaatgattgggggcctcttgcttcagatagcaatcggaatcatagccatgctagccatgcatgaacttttgaagataagaggtctagcgaccatgacgatggagggcctcttgactctctttgcaacctttgcattaaccattcccttggagaattacctgacttttttgccagttgatgggaatgtggttgcctatagtgttttgatttcaatcatgttaggaacgaccgtttttagcaagtcttatacgattgaggatgcggttttccctcttgctatgagcttctacgtgggctttggatttaatgctttactagatgctcgtgttgcaggtttggacaaggctctcttagccttgtgtatcgtctgggcgacagacagtggtgcctatcttgttgggatgaactatgggaaacgaaagttagcaccaagggtatcgcctaataaaacccttgagggtgccttgggtggtattttaggagcaattttagtaaccattatctttatgatagttgacagtacagttgctcttccatatggaatttacaagatgtcagtctttgctattttctttagcattgctggacaatttggtgatttactagaaagttcgatcaaacgtcattttggtgttaaggattctgggaaatttatccctggacatggtggtgttttggatcgtttcgatagtatgttgcttgtatttccaatcatgcacttatttggactcttttaa

SEQ ID NO: 9489 - DNA, 513 bp, Streptococcus pneumoniae
  CDS (1)...(513)
gtgaacacactaatgagtgaagcaattattgctaaaaaagcggaactagttgacgtagtagctgaaaaaatgaaagctgctgcatctatcgtcgttgtagacgctcgtggattgacagttgagcaagatacagttcttcgtcgtgagcttcgtggaagcgaagttgagtataaagttattaaaaactcaatcttgcgtcgtgcagctgaaaaagctggtcttgaagatcttgcatctgtatttgttggaccatctgcagtagcattttctaatgaagatgttatcgcaccagcgaaaatcttgaatgacttttctaaaaacgctgaagcacttgaaattaaaggtggtgcaatcgaaggcgctgtcgcatctaaagaagagattcttgcacttgcaactcttccaaaccgcgaaggacttctttctatgctcctttctgtacttcaagcgccagtgcgcaacgttgctcttgcagtcaaagcggttgcagaaagcaaagaagacgcggcttaa

SEQ ID NO: 9490 - DNA, 369 bp, Streptococcus pneumoniae; identical to SEQ ID NO: 9149
  CDS (1)...(369)

SEQ ID NO: 9491 - DNA, 1290 bp, Streptococcus pneumoniae
  CDS (1)...(1290)
atgggattgtttgaccgtctattcggaaaaaaagaagaacctaaaatcgaagaagttgtaaaagaagctctggaaaatcttgatttgtctgaagatgttgatcctaccttcacagaagttgaggaagttcctcaggaagaagcagaggttgaaattgttgaacaagctgtgttccaagaggaggaaatccaagacacagttgaagaaagtcaggattcagagccagctgtaggggtttctcaagaagaaatagaagaattaccaaactcagaagaattaccagaggaagagaagcttgagcacgaaggaactgtagaagaaaataattctgaagttcttgaaccagaaaggcctcaaacagaagaaactgttcaggaaaaatatgaccgcagtctcaagaagactcgtacgggcttcggtgctcgcttgaacgccttctttgctaacttccgctctgttgacgaagaatttttcgaggaactggaagaactgctgattatgagtgatgttggtgtccaagtcgcttctaacttaacggaggaactacgttacgaagccaagcttgaaaatgccaagaaacctgatgcacttcgtcgtgtcatcattgagaaattggttgagctttatgaaaaggatggtagctacgatgaaagcatccacttccaagataacttgacagttatgctctttgttggtgtgaatggtgttgggaaaacaacttctattggaaaactagcccaccgctacaaacgaactggtaagaaggtcatgctggttgcagcagataccttccgtgcgggtgcagtagctcagctagctgaatggggccgacgagtagatgttccagtagtaactggacctgaaaaagctgatccagccagcgtgatctttgacggtatggaacgtgccgtggctgaaggtatcgatattctcatgattgatactgctggtcgtctgcaaaataaggataaccttatggctgagttggaaaagattggtcgtattatcaaacgtgttgtgccagaagcaccacatgaaaccttcttggcacttgatgcatcaacaggtcaaaatgccctagtacaggccaaagaattttcgaaaatcacacctttaacgggaattgttttgactaagattgatggaactgctcgaggaggtgtggttctagccattcgtgaagaactcaatattcctgtaaaattgattggttttggtgaaaaaatcgatgatattggagagtttaactcagaaaactttatgaaaggtctcttggaaggcttaatctaa

SEQ ID NO: 9492 - DNA, 1344 bp, Streptococcus pneumoniae
  CDS (1)...(1344)
atgtcatttacgaaatttcaatttaaaaactatattagagaagccttgaaggagttaaaatttacaactccaacagaggtgcaagacaagttgattcctattgttttggcaggtcgtgacctagtaggagaatcaaaaacaggttcaggtaagactcatactttcttgttaccgattttccagcaattagatgaagctagcgatagtgtacaagcagtgattactgcaccgagtcgtgagttggctactcaaatttaccaagtagcgcgtcagatttcagctcactcagatgtcgaagttcgtgtggttaattatgtgggtggtacggataaggctcgccagattgagaaattggaaagcaatcagcctcatattgttattggaacaccaggccgtatctacgacttggttaaatctggtgatttagctattcataaagccaagacatttgttgttgatgaagcagatatgaccttggatatgggattcttggaaactgttgataagattgctggcagtcttccaaaagacttgcaattcatggtcttctcagcgactatcccacaaaaactgcaaccattcttgaaaaaatacttatcaaatcctgttatggagaaaattaagaccaaaacggttatttctgacaccattgataattggttgatttcgaccaagggacatgataagaatgctcaaatttaccagttgactcagttgatgcagccgtatttggcaatgatttttgttaacactaaaacgcgtgctgatgaattgcattcatatctgactgctcaaggcttgaaggttgcaaaaatccatggagatattgcccctcgtgaacgcaagcgaatcatgaatcaggtgcaaaatctggattttgagtatattgtcgcaacagatttagcagcgcgtgggattgacattgaaggtgtcagccatgtcatcaatgatgccattccgcaagacttatctttttttgttcatcgtgttggtcgtactggacgaaatggcctaccaggtacagctattaccctttatcagccaagtgatgactcggatatccgtgagttggagaaattgggaatcaagtttagtcctaagatggtcaaagacggggaatttcaagatacctatgaccgtgatcgtcgtgccaaccgtgagaaaaaacaagataaacttgatatcgaaatgattggtttggttaaaaagaaaaagaaaaaagtcaaaccgggttataagaagaaaattcaatgggcggttgatgaaaagcgccgtaaaaccaagcgtgctgaaaatcgcgctcgcggtcgtgcagagcgtaaagctaaacgccaaacattttaa

SEQ ID NO: 9493 - DNA, 1191 bp, Streptococcus pneumoniae
  CDS (1)...(1191)
atgtcagaacgtaaattattcacgtctgaatctgtatctgaggggcatccggataagattgcagaccaaatttcagatgcgattttggatgctattttagcaaaggatccagaggcgcacgttgctgctgaaacagctgtatatactggttctgtccacgtttttggtgaaatttctacaaatgcctatgtggatattaaccgtgtggttcgtgataccattgcagagattggttataccaatacagaatatggattttctgctgagacggtgggagtacacccatctttggtggaacaatctcctgacatcgctcaaggtgttaacgaagccttggaggttcgtggaaatgctgatcaagatccactggacttgattggagcaggtgaccaagggctcatgtttggatttgcagtagatgaaacagaagagctcatgccattgccaattgcactcagtcataaattggttcgtcgtctggcagaacttcgtaagtctggagaaattagctatctccgtccagatgcaaaatcacaagttacagttgagtacgatgaaaatgaccgtccggtacgtgtagatacagtcgttatttctactcagcatgatccagaggccactaatgaacaaatccatcaagatgtgattaacaaggtcatcaaagaagttattccatcttcttatcttgatgataagacaaaattctttatcaatccgacaggtcgttttgtaatcggtggtcctcaaggggactcaggtttgactggtcgtaagattattgtagatacttatggtggctactctcgtcatggtggtggtgccttctctggtaaagatgcgactaaggtggatcgttcagcctcttatgcggctcgctatattgccaagaatatcgttgcagcaggccttgctaagaaggcagaagtgcagttggcctatgctatcggtgttgcgcaacctgtttctgttcgtatcgatactttcggtacaggaacagtagctgaaagtcaacttgaaaaagcggctcgtcaaatctttgaccttcgccctgcagggattatccaaatgctggacctcaagcgtccaatttaccgtcaaacatcggcttacggtcacatgggacgtacagatattgatcttccatgggaacgtttggataaggtagatgctttgaaagaagcagtaaaataa

SEQ ID NO: 9494 - DNA, 1005 bp, Streptococcus pneumoniae
  CDS (1)...(1005)
atgaaagagattattgaaaaactagcaaaatttgaaaatttatcaggtgtggaaatgacggatgtcattgagcgtatcgtaactgggcgtgtaactgaagcgcagattgcttctctcctcttagctcttaagatgaagggggaaacacctgaagaacgtacagccattgcccaagtcatgagaggacatgcccagcatattccaactgagattcatgatgctatggacaactgtggtacaggtggggacaagtctttcagttttaatatttccacaactgcagcctttgtcttggctggtggcggtattcacatggccaagcatggtaaccgctcgatttcttctaaatctggttccgcagatgtcctcgaagccttgggaatcaatcttgacctcaaaccagctgaactaggtaaggtctttgataaaactggaatcgtctttctcttcgctaaaaatatgcacccagctatgaaatacatcatgccagctcgtttggaattgggaattccaacgattatgaacttgactggtccactgattcatccaatggctttagaaacacagcttcttggaattagtcgtccagaactcctagaaagtacagctcaggttttgaaaaatatgggtcgcaaacgtgccatcgtggttgctggaccagaagggttggatgaagctggcttgaacggaacaaccaagattgcacttcttgaaaatggcgaaatcagcttgtcaagctttactccagaggatttgggaatggaagactatgctatggaagatattcgtggtgggaatgctcaggaaaatgcagaaattttgcttagcgttctgaaaaacgaagcaagtccattcttggaaacgacagtcttgaatgctggtcttggtttctatgctaatggtaagattgatagcatcaaggaaggagttgccttggcccgtcaagtgattgctagaggcaaggcccttgaaaaactcagactgttacaggagtaccaaaaatga

SEQ ID NO: 9495 - DNA, 1080 bp, Streptococcus pneumoniae
  CDS (1)...(1080)
gtgatttgtagtgattcaagttactcttttcacaataaaaatttcatgattttcataaggaggaaatcactaatggtagttaaagttggtattaacggtttcggacgtatcggtcgtcttgctttccgtcgtatccaaaacgtagaaggtgttgaagttacacgcatcaacgaccttacagatccagttatgcttgcacacttgttgaaatacgacacaactcaaggtcgtttcgacggtactgttgaagttaaagaaggtggattcgaagttaacggtaaattcgttaaagtttctgctgaacgtgatccagagcaaatcgactgggctactgacggtgtagaaatcgttcttgaagctactggtttctttgctaagaaagaagcagctgaaaaacaccttaaaggtggagctaaaaaagttgttatcactgctcctggtggaaacgacgttaaaacagttgtattcaacactaaccacgacgttcttgacggtactgaaacagttatctcaggtgcttcatgtactacaaactgcttggctccaatggctaaagctcttcaagataactttggtgttgttgaaggattgatgactactatccacgcttacactggtgaccaaatgatccttgacggaccacaccgtggtggtgaccttcgccgtgctcgcgctggtgctgcaaacatcgttcctaactcaactggtgctgcaaaagctatcggtcttgtaatcccagaattgaatggtaaacttgatggatctgcacaacgcgttccaactccaactggatcagttactgaattggtagcagttcttgaaaagaacgttactgttgatgaagtgaacgcagctatgaaagcagcttcaaacgaatcatacggttacacagaagatccaatcgtatcttcagatatcgtaggtatgtcttacggttcattgtttgacgcaactcaaactaaagttcttgacgttgacggtaaacaattggttaaagttgtatcatggtacgacaacgaaatgtcatacactgcacaacttgttcgtactcttgaatacttcgcaaagattgctaaataa

SEQ ID NO: 9496 - DNA, 2619 bp, Streptococcus pneumoniae
  CDS (1)...(2619)
atgaaacaactatctagtgcacaagtacgccaaatgtggcttgatttctgggcgaccaaagctcactcagtagaaccatcagtaagtttggttcctgtaaatgacccaactcttttgtggatcaactctggggtagcaacccttaagaaatactttgacgggaccattatccctgaaaatccacgtattaccaatgcccaaaaggctatccgtaccaacgacatcgaaaacgtagggaagactgcgcgtcaccataccatgtttgaaatgctggggaacttctctatcggggattacttccgtgacgaagctatcacttgggcttatgagcttttgacaagccctgaatggtttgatttccctgctgaaaaactttacatgacctactatccagacgataaagattcttacaaccgctggattgaagtgggagtggatccaagtcacttgattccaattgaggacaacttctgggaaatcggtgcgggaccttctggaccagatacagaaatcttctttgaccgtggggaagcctttgacccagaaaatatcggtcttcgcctgcttgcagaagatattgaaaacgaccgttatattgaaatctggaacatcgtcttgtcacaatttaacgcagaccctgctgttcctcgtagcgaatacaaggaattgccacataagaacattgatacgggcgctggtttggagcgtttggtggctgttatccaaggggctaagaccaactttgaaacggacctcttcatgccgattatccgtgaagtcgagaaattgtctggtaaggtttatgaccaagatggcgacaacatgagcttcaaggttatcgcagaccacattcgttctctttcatttgctatcggtgatggtgcccttccaggaaatgaaggtcgtggttatgttcttcgtcgtcttctccgtcgtgcttctatgcatggtcaaaaattgggtatcaacgaacctttcctttacaaattggttccaactgttggaaaaatcatggaaagctactacccagaagtgcttgagaaacgtgactttattgagaaaatcgttaagagcgaagaagaatcatttgcccgtacccttcactcaggtcaacactttgcccaaggcattgtagcagacttgaaagaaaaaggtcaatctgttatcgctggttcagatgtcttcaaactctatgatacttatgggttcccagttgaattgactgaagaaatcgctgaagaagctggtatgactgtagaccgtgaaggttttgaagcagccatgaaagaacagcaagaacgcgcgcgtgcctcagctgtcaagggtggctcaatgggtatgcaaaatgaaactcttcaaaacatcactgtagaaagtgtcttcaactacaatgctagccaattgtcttctaaattggtagctatcgtggcggacaatgcagaagtagaagctgtttcagaaggaactgcctctcttatctttgcggaaacgtcattttatgctgaaatgggtggacaggtagctgactacggacaaatcttggatgagtcaggtaaggttgtggctactgtgaccaatgttcagaaagccccaaatggtcaagcccttcatacagttgaagtccttgcaccgcttgccttgaaccaagaatataccttggcaattgatagcaatcgccgtcaccgtgtcatgaaaaaccacactgcgactcatttgcttcacgctgcccttcacaatatccttggaaaccacgcaacacaggcaggatctcttaacgaagttgaattccttcgctttgactttacccacttccaagctgtaactgctgaagaattgcgtgcgattgaacagcaagtcaacgaaaaaatctgggaagctcttgaagttaagacagttgaaacggatattgacactgctaaagaaatgggagctatggccctctttggtgagaaatacggcaaggaagttcgtgtcgtgactatcggtgactactctattgaactttgtggtggtactcatgttggcaacacttctgagattggtctcttcaaaattgtcaaagaagaaggaatcggttcaggaactcgccgtatcttggcagtgactggtaaggaagcctttgaagcctatcgtgaacaagaggatgctcttaaagctgtcgcagcaatcttgaaagcacctcaagtcaaggaagtacctcacaaggtagaaggacttcaagaacaacttcgtcaacttcaaaaagaaaatgctgagttgaaagaaaaagccgcagctgcagccgcaggcgatatcttcaaagatgctaaggaagtcaacggtcatcgttacattgctagtcaagtgtctgtatccgatgccggtgcccttcgtacttttgcagataactggaaacaaaaagactactctgatcttcttgtcctagttgccgctatcggtgacaaagtcaatgtccttgtagcaagcaagacaaaagaccttcatgcaggaaaccttgtcaaagaattagcaccaatcatcgatggacgtggtggtggtaaaccagacatggccatggcaggaggaagcaaccaagctaagatccaagaattgttggatgcagtagcaggtaaattgtaa

SEQ ID NO: 9497 - DNA, 501 bp, Streptococcus pneumoniae; identical to SEQ ID NO: 9274
  CDS (1)...(501)

SEQ ID NO: 9498 - DNA, 1023 bp, Streptococcus pneumoniae; identical to SEQ ID NO: 9275
  CDS (1)...(1023)

SEQ ID NO: 9499 - DNA, 876 bp, Streptococcus pneumoniae
  CDS (1)...(876)
atgaaaaagcaagaaaaattagctcttgtcgagtcggctttggaagatttttatggagaccagcagtttgcctctagtttacgggagtctgttctctattctattcatgctggtggcaagcgtattcggccttttctcttgttagaagttctggaagccttgcaggttaccatcaaacctgctcacgcgcaggtagctactgccttggagatgattcatacagggagcttgattcacgatgaccttcctgctatggatgatgacgattatcgaagagggcggttaaccaatcacaagaaattcggtgaagctatggccattttggctggagatgccttattcttagacccatatgccttgattgcgcaggcagatttgccaagtcagattaaggtggacttgattgccaacttatcccttgcttcaggtagtctgggtatggtggcagggcaagttttggatatggagggcgaacaccagcacttgtctttggaagaacttcagattattcatgccaataagactgggaagttactagcctatcccttccaagcggcagctattatagctgaattgtcacctgaaatgcaggtgaagctgaaaactgtgggtgaattgattggacttgcttttcaagtcagagatgatgtactggatgtgacagctagttttgaggaaatcggcaagacacctcaaaaggatctgcaggcagaaaaatcaacctatcctgccctgttgggcttggaagagtccattgccttttgtaaccaaaccctggatcaagctaatgaaaaattagaagaaattgcccagcagcttccctttgaaacagaatcgattgtaagtgtagtagaaagtttgagaatcaatggctaa

SEQ ID NO: 9500 - DNA, 2304 bp, Streptococcus pneumoniae
  CDS (1)...(2304)
atggcaaacaagaatacaagtacaacaagacggagaccgtctaaagcagaactggaaagaaaagaagcgattcaacgaatgttgatttcgttaggaattgcgattttattgattttcgcagccttcaaattaggggctgcaggtataaccctttataatttaattcgcttgctagtgggtagcctagcttatctggcgatattcggcctattaatctatctcttttttttcaagtggatacgaaaacaggaaggactcttatctggctttttcaccatatttgctggcttactcttgatttttgaagcctacttggtttggaaatatggtttggacaagtccgttctaaaagggaccatggctcaggttgtgacagatctgactggttttcgaacgactagttttgctggagggggcttgatcggggtcgctctttatattccaacagcttttctcttttcaaatatcggaacttactttattggttctatcttgattttagtgggttctctcctagtcagcccttggtctgtttacgatattgctgaatttttcagtagaggctttgccaaatggtgggaagggcacgagcgtcgaaaagaggaacgctttgtcaaacaagaagaaaaagctcgccaaaaggctgagaaagaggctagattagaacaagaagagactgaaaaagccttactcgatttgcctcctgttgatatggaaacgggtgaaattctgacagaggaagctgttcaaaatcttccacctattccagaagaaaagtgggtggaaccagaaatcatcctgcctcaagctgaacttaaattccctgaacaggaagatgactcagatgacgaagatgttcaggtcgatttttcagccaaagaagcccttgaatacaaacttccaagcttacaactctttgcaccagataaaccaaaagatcagtctaaagagaagaaaattgtcagagaaaatatcaaaatcttagaagcaacctttgctagctttggtattaaggtaacagttgaacgggccgaaattgggccatcagtgaccaagtatgaagtcaagccggctgttggtgtaagggtcaaccgcatttccaatctatcagatgacctcgctctagccttggctgccaaagatgtccggattgaagcaccaatccctgggaaatccctaatcggaattgaagtgcccaactccgatattgccactgtatctttccgagaactatgggaacaatcgcaaacgaaagcagaaaatttcttggaaattcctttagggaaggctgttaatggaaccgcaagagcttttgacctttctaaaatgccccacttgctagttgcaggttcaacgggttcagggaagtcagtagcagttaacggcattattgctagcattctcatgaaggcgagaccagatcaagttaaatttatgatggtcgatcccaagatggttgagttatctgtttacaatgatattccccacctcttgattccagtcgtgaccaatccacgcaaagccagcaaggctctgcaaaaggttgtggatgaaatggaaaaccgttatgaactctttgccaaggtgggagttcggaatattgcaggttttaatgccaaggtagaagagttcaattcccagtctgagtacaagcaaattccgctaccattcattgtcgtgattgtggatgagttggctgacctcatgatggtggccagcaaggaagtggaagatgctatcatccgtcttgggcagaaggcgcgtgctgcaggtatccacatgattcttgcaactcagcgtccatctgttgatgtcatctctggtttgattaaggccaatgttccatctcgtgtagcatttgcggtttcatcaggaacagactcccgtacgattttggatgaaaatggagcagaaaaacttcttggtcgaggagacatgctctttaaaccgattgatgaaaatcatccagttcgtctccaaggctcctttatctcggatgacgatgttgagcgcattgtgaacttcatcaagactcaggcagatgcagactacgatgagagttttgatccaggtgaggtttctgaaaatgaaggagaattttcggatggagatgctggtggtgatccgctttttgaagaagctaagtctttggttatcgaaacacagaaagccagtgcatccatgattcagcgtcgtttgtcagttggatttaaccgtgcgacccgtctcatggaagagcttgagatggcaggtgtcattggtccagctgaaggtaccaagccaagaaaagtattgcagcaataa

SEQ ID NO: 9501 - DNA, 768 bp, Streptococcus pneumoniae
  CDS (1)...(768)
atgagtattcgagtaattattgccggttttaagggaaagatgggccaggctgcttgtcagatggtattgactgatccagacttggacttggtggcagttttggatccttttgagtctgagtcagaatggcagggtattcctgttttcaaggataaggctgatttagctggttttgaagcggatgtctgggtagattttactactccagctgttgcctacgaaaatacacgttttgctcttgaaaatggctttgctccagtagttggaacgactggtttcacgagtgaagaaattgcagagctaaaagaattttctcgtgcccaagacttgggtggcctgattgcccctaactttgccttgggtgctgtcttactcatgcaatttgcgacgcaggctgccaaatatttcccaaatgtggagattattgagctccatcatgacaagaaaaaggatgctccgagtggaacagccattaaaacagctgagttgatggcagaggttcgagagtccattcagcaaggtgcagcagatgaggaagagctgattgctggtgctcgtggtgctgactttgatggtatgcgcatccactcagttcgtttgccaggcttggtagctcatcaggaagtcatctttggcaatcagggagaagggttgaccctccgtcatgactcctatgatcgcatctccttcatgacaggagtcaatttgggaattaaagaagttgtcaagcgtcatgagcttgtctatggattagaacacttattatga

SEQ ID NO: 9502 - DNA, 1200 bp, Streptococcus pneumoniae
  CDS (1)...(1200)
atgagattaatgcaaatgccttctgaatttcagaaggctttaccagtattagaaaaaattaaagaagcaggctttgaggcttattttgttgggggctctgttcgagatgcccttctccatagccctatccacgatgtggatattgcgacgtcttcttatccagaagagaccaagcagatttttccgcgaacagccgatatcggaatcgagcatggaaccgtcttggtcttagatggggatgaggagtatgaggtaacaacctttcggacagaggatgtctatgtggactatcgcagacccagtgcggtttcctttgtgcgctcgctagaagaagacctcaaacgccgtgatttcacagtcaacgcctttgccttggatgagacaggagaaatcgttgacttgttccatggtttagaagatttggaaaagcaagtcttgcgagcagttggagtggctagtgagcgtttcaacgaagatgctttacggattatgcgtggtttccgttttcaggctagtcttggttttgcacttgagccagaaacatttaaagctatgaagaccttgacgccgcttttggagaaaatttctgtagagcgtaccttcgtcgagtttgataaactcttgctggctccattttggagaaggggcttggcttccatgattgagagtcaagcttatgactatctccctgatatggcatctagccaggacaagctcaacagactgtttgatttggagactgattttacttttgaatcctctgaacaagcctgggcggctttactatgggctttggagattgaaaatgcgcagtcatttttgaaatcttggaagacctcacgccagtttgccaagcaagttcaggatttgctgattattttggctctgcgtgaaaatggagaattgagtaagcgtgattgttatcgctttgacttggatttacttttacaggctgaaaatcttcgtcaagctcagggaaaagaagtcaacccacaagtcattaaagaaacctaccagagcttgactattcatgataagaaagaaatccaaatcaacggcggtattttgatcaaggaatatggctatcagccaggcccagacttgggagagattttaacagagattgagtttgccattgtcgatggagaattggagaataatcgtgaagccatccatgcttacctgagggagaaaaaatga

SEQ ID NO: 9503 - DNA, 699 bp, Streptococcus pneumoniae
  CDS (1)...(699)
atgactaaacgtgtactcattacaggagtgagttcagggatcggattggctcaagctcgcctctttttagagaagggctatcaagtttatggagttgaccaaggtgaaaagccactcttagagggtgattttcactttttacagagagatttgaccttggacttggaacctatttttgactggtgccctcaggtggatgttttgtgtaatactgccggagttttggatgcttacaaaccactgttggaacaaacggcgcaggacattcaagagatttttgaaatcaactacattattccagtagagttgactcggtattatttgacacaaatgctggaaaataaaaagggaatcatcatcaatatgtgttccattgcttctagcctagcaggtggaggtggtcacgcctatacttcatccaagcatgccttggctggcttcaccaagcagttggctctagactatgctgaagctgggattcaggtctttggtatcgctccaggagcagtcaagacagctatgaccgctgcggattttgaaccaggtggtttggctgactgggtggctagtgaaaccccaatcaagcgctggattgagccagaggaaatagcagagcttagtctttttttagcaagtggaaaagcgagcgccatgcaaggacaaatcttgacaatagatggtggctggtctttgaagtag

SEQ ID NO: 9504 - DNA, 831 bp, Streptococcus pneumoniae
  CDS (1)...(831)
gtgacgatacagatgaagaatacaggtaaacgaattgatctgatagccaatagaaaaccgcagagtcaaagggttttgtatgaattgcgagatcgtttgaagagaaatcagtttatactcaatgataccaatccggatattgtcatttccattggcggggatggtatgctcttgtcggcctttcataagtacgaaaatcagcttgagaaggtccgctttatcggtcttcacactggacatttgggcttctatacagattatcgtgattttgagttggacaagctagtgactaatttgcagctagatactggggcaagggtttcttaccctgttctgaatgtgaaggtctttcttgaaaatggtgaagttaagattttcagagcactcaacgaagccagcatccgcaggtctgatcgaaccatggtggcagatattgtaataaatggtgttccctttgaacgttttcgtggagacgggctaacagtttcgacaccgactggtagtactgcctataacaagtctcttggcggtgctgttttacaccctaccattgaagctttgcaattaacggaaattgccagccttaataatcgtgtctatcgaacactgggctcttccattattgtgcctaagaaggataagattgaacttattccaacaagaaacgattatcatactatttcggttgacaatagcgtttattctttccgtaatattgagcgtattgagtatcaaatcgcccatcataagattcactttgtcgcgactcctagccataccagtttctggaaccgtgttaaggatgcctttatcggtgaggtggatgaatga

SEQ ID NO: 9505 - DNA, 897 bp, Streptococcus pneumoniae
  CDS (1)...(897)
atgaggtttgaatttatcgcagatgaacatgtcaaggttaagaccttcttaaaaaagcacgaggtttctaagggattgctggccaagattaagtttcgaggtggagctattctggtcaataatcaaccgcaaaatgcaacgtatctattggacgttggagactacgttaccattgacattcccgctgagaaaggctttgaaaccttggaggctattgagcttccattagatattctctatgaggatgaccactttctagtcttgaataaaccctatggagtggcttctattcctagtgttaatcactctaataccattgccaattttatcaagggttactatgtcaagcaaaattatgaaaatcagcaggttcacattgttaccagactagatagggacacttctggcttgatgctctttgccaagcacggttatgcccatgcacgattagacaagcagttgcagaagaaatctatcgagaaacgctactttgctttggttaagggagatggacatttggaaccagaaggggaaattattgctccgattgcgcgtgatgaagattccattattaccagacgagtggctaaaggcggaaagtatgcccatacttcatacaagattgtagcttcttatggaaatattcacttggtctatattcacctgcacactggtcgaacccatcaaatccgagtccatttttctcatatcggttttcctttgctgggagatgatttgtatggtggtagtctggaagatggtattcaacgtcaggctctgcattgccattacctatccttttatcatccatttttagagcaagacttgcagttagaaagtcccttgccggatgatttcagtaaccttattacccagttatcaactaatactctataa

SEQ ID NO: 9506 - DNA, 975 bp, Streptococcus pneumoniae; identical to SEQ ID NO: 9226
  CDS (1)...(975)

SEQ ID NO: 9507 - DNA, 303 bp, Streptococcus pneumoniae; identical to SEQ ID NO: 9271
  CDS (1)...(303)

SEQ ID NO: 9508 - DNA, 1467 bp, Streptococcus pneumoniae
  CDS (1)...(1467)
atgacttttaacaataaaactattgaagagttgcacaatctccttgtctctaaggaaatttctgcaacagaattgacccaagcaacacttgaaaatatcaagtctcgtgaggaagccctcaattcatttgtcaccatcgctgaggagcaagctcttgttcaagctaaagccattgatgaagctggaattgatgctgacaatgtcctttcaggaattccacttgctgttaaggataacatctctacagacggtattctcacaactgctgcctcaaaaatgctctacaactatgagccaatctttgatgcgacagctgttgccaatgcaaaaaccaagggcatgattgtcgttggaaagaccaacatggacgaatttgctatgggtggttccggtgaaacttcacactacggagcaactaaaaacgcttgggaccacagcaaggttcctggtgggtcatcaagtggttctgccgcagctgtagcctcaggacaagttcgcttgtcacttggttctgatactggtggttccatccgccaacctgctgccttcaacggaatcgttggtctcaaaccaacctacggaacagtttcacgtttcggtctcattgcctttggtagctcattagaccagattggaccttttgctcctactgttaaggaaaatgccctcttgctcaacgctattgccagcgaagatgctaaagactctacttctgctcctgtccgcatcgccgactttacttcaaaaatcggccaagacattaagggcatgaaaattgctttgcctaaggaatacctaggcgaaggaattgatccagaggttaaggaaacaatcttaaacgcggccaaacactttgaaaaattgggtgctatcgtcgaagaagtcagccttcctcactctaaatacggtgttgccgtttattacatcatcgcttcatcagaagcttcatcaaacttgcaacgttttgacggtatccgttacggctaccgcgcagaagatgcgactaatcttgatgaaatctatgtaaacagccgtagccaaggttttggtgaagaagtgaagcgccgtatcatgctgggtactttcagtctttcatcaggttactacgatgcctactacaagaaggctggacaggtccgtacacttatcattcaagatttcgaaaaagtcttcgcggattacgatttgattttgggtccaactgctccaagtgttgcctatgacttggattctctcaaccatgacccagttgccatgtacttagccgacctattgaccatacctgtaaacttggcaggactgcctggaatttcgattcctgctggattctctcaaggtctacctgtcggtctgcaattgattggtcccaagcactctgaggaaaccatttaccaagttgctgctgcctttgaagcaacaacaggctaccacaaacaacaacccgtgatttttggaggtgacaactaa

SEQ ID NO: 9509 - DNA, 1533 bp, Streptococcus pneumoniae
  CDS (1)...(1533)
gtgagggggagttttatgtttaaagttttacaaaaagttggaaaagcttttatgttacctatagctatacttcctgcagcaggtctacttttggggattggtggtgcactttcaaacccaaccacgatagcaacttatccaatactagacaatagtatttttcaatcaatattccaagtaatgagctctgcaggagaggttgtattcagtaatttgtcactacttctctgtgtgggattatgtattggcttagcgaaacgagataaaggaaccgctgcgttagcaggagtaactggttacttagttatgactgcaacgatcaaagctttggtaaaactttttatggcagaaggatctgcaattgatactggagttattggagcattagctgtcggaatagttgccgtatatttgcacaaccgatataacaatattcaattaccttccgctttaggattctttggaggttcacgcttcgttcctattgttacatcgttctcttctatcttgattggctttgtcttctttgttatttggccacctttccaacaacttcttgtttctacaggtggatatatttctcaggcgggtccaattggaacttttctatatggatttttaatgagactttctggagcagtaggcttacatcatataatttaccctatgttttggtatactgaacttggtggtgttgaaactattgcaggacaaacagtggttggagctcaaaaaatattttttgctcaattagccgatccggcccattctggattatttacagaaggaacaaggttttttgcaggtcgtttctcaacaatgatgttcggtttaccggctgcctgtttagcgatgtaccatagtgttcctaaaaatcgtcgtaaaaaatacgcgggtttgttttttggagttgctttaacatcttttattaccggtattacagaaccaattgaatttatgtttctattcgtcagtccggttctatatgttgttcacgcattccttgatggtgttagcttctttattgcagacgtcttaaatatttcaataggaaacacattttcaggaggtgtaatcgatttcactttatttggaattttgcaggggaacgctaagacgaattgggttcttcagattccaattggacttatttggagtgttttgtattatattatttttagatggttcattactcaattcaatgttctaacgccaggacgaggagaagaagtagattctaaagaaatttctgaatccgcagattcaacttcaaatactgcagattatttaaaacaggatagcctacaaattatcagagccttgggtggatcaaataatatagaagatgtagatgcttgtgtgacacgtttacgtgtagctgtaaaagaagttaatcaagttgataaagcacttttaaaacaaattggtgcagttgatgtcttagaagtgaagggtggcattcaagcaatctatggagcaaaagcaatcttatataaaaatagtattaatgaaattttaggtgtagatgattaa

SEQ ID NO: 9510 - DNA, 3540 bp, Streptococcus pneumoniae
  CDS (1)...(3540)
atgtatttaaaggaaatcgaaattcagggattcaagtcttttgctgataagaccaaggtcgtctttgaccaaggtgtgacggcagtcgttggacccaatggatctggaaagtcgaatattacagaaagtctgcgatgggccttgggagagtctagtgtcaagagtctccgtgggggcaagatgccggatgtcatctttgctggaacagaaagtcgtaaaccgcttaattatgcttctgtagttgtgactctggataatcatgatggatttatcaaggatgcaggtcaagaaatcagagtagaacgccatatctatcgtagtggggatagtgaatacaaaattgacggcaagaaagttcgtcttcgtgatattcatgatctcttcttggacacaggtttgggacgagattccttttccatcatttcccaaggcaaggttgaggagatttttaattctaagcctgaggaacgccgagctatttttgaagaagctgcaggagttttaaaatacaagactcgtagaaaagaaactgagagcaaattgcaacaaactcaggataatctggaccgcttagaggacattatctacgagttggataatcaaatcaagcctcttgagaagcaagctgagaatgcccgtaagtttttagacttggaaggacaacgtaaggctatttatttagacgtgctggttgctcaaatcaaggataataaggctgaactagactcgacagaagaagagttggctcaggttcaggaactcttgactagttattaccaaaagcgtgaaaaattagaagaggaaaatcaaactcttaaaaagcaacgccaagatttgcaggctgaaatggccaaagaccaaggcagtttgatggatttgaccagtctgattagtgacttagagagaaaattagccctatcgaaactggaatctgagcaagtagccctcaatcaacaggaagcacaagcccgtttggctactttggaggataagagaagttcactcagccaagaaaaatctgataaagaaagctctttagctctgttagagggaaatctagtccaaaataatcaaaaactcaatcgtttagaagctgaattgctggctttctcagacgatcctgatcagatgattgagctcttacgtgaacgctttgtagctcttttacaagaagaagcggatgtctcaaaccagttgacccgtattgagaatgagttggaaaatagtcgtcagctttctcaaaaacaagcagatcaactagaaaagctgaaagagcaattggctatagctaaagagaaggctagtcagcaaaaggaagagcttgaaactgccaaggagcaggttcagaaattattggctgactaccaagctattgccaaggagcaagaggagcagaaaacttcctatcaagctcaacaaagccaactctttgaccgtctggataatctcaaaaacaagcaggccagagctcaaagtttggaaaatatcctgagaaatcatagtaacttttatgcaggtgttaagagtgttctccaagaaaaagatcgcctaggtgggattattggtgcagtcagtgagcatctgacctttgatatgcattatcaaactgccctagaaattgcacttggagcgagtagtcagcacattattgtagaagatgagaatgcggcaaccaaagccattgatttcctcaaacgaaacagagccggtcgtgcaacctttcttcctttgaccactattaaggcgcgtacgatttctagtcagaaccaagatgctatcgctgtaagcccaggtttccttgggatggcagatgagttagttactttcgatactagactggaagccattttcaagaacttgctagctacgacggctatctttgataccgtagaacatgcgcgtgaagctgctcgacaagttcgttatcaggttcgcatggtgacattggatgggacagagcttcgtacaggtggttcctatgcaggtggagccaatcgtcagaacaacagcatcttcatcaagccagaactggagcaattacaaaaagaaattgctgaagaagaagcaagcttggattcagaagaagtggctttgaagaccttgcaagatgagatggccagattgaccgagtcattagaagctattaaatctcaaggagagcaggcacgtattcaggagcaaggcttgttcctcgcttatcagcaaactagtcagcaagttgaagagctagaaactctttggaaactccaagaagaggaaatagatcgtctttccgagggagattggcaagcggataaggaaaactgccaagagcgtcttgctgcaatcgccagtgacaagcaaaatctggaagctgagattgaagagattaagtctaacaaaaatgccatccaagaacgctatcaaaacttgcaggaagagctagcgcaagctcgtttgcttaagacagaactgcaagggcaaaaacgttatgaagttgctgatattgagcgtttaggcaaggaattggataatcttaatatcgaacaagaagaaatccagcgcatgctccaagaaaaagttgacaatcttgagaaagttgatacggatttgctcaatcagcaggccgaagaagccaaaactcagaaaacaaatctccaacaaggtttgattcgcaagcagtttgagttggatgatattgaagggcagctggatgatattgctagtcatttggatcaggctcgccagcagaatgaggagtggattcgcaagcaaacacgtgctgaagctaagaaagaaaaggtcagcgaacgcttgcgccatctacaaagtcaattaacagaccagtaccagattagctatactgaagctctagaaaaagcgcatgaattggaaaacctcaatctggcagagcaagaagttaaggatttagagaaggctattcgctcactgggtcctgtcaatatagaagctattgaccagtacgaagaagtttacaaccgtctggactttctaaatagtcagcgagatgatattttgtcagcgaaaaatctgctccttgaaaccattacagagatgaatgatgaggttaaggaacgctttaaatcaacctttgaagctattcgtgagtcctttaaagtgacctttaagcagatgtttggcggaggtcaggcagacttgatattgactgagggcgaccttttaacagctggtgtggagatttctgttcaacctccaggtaagaaaatccagtcgcttaacctcatgagtggtggtgaaaaagctctatcggctcttgccttgctcttctccattattcgtgtcaagactattccatttgttatcttggatgaggtggaagctgcgctggatgaagctaatgttaaacgttttggggattacctcaaccgctttgacaaggacagccagttcatcgtcgtaacccaccgtaagggaaccatggcagcggctgattctatctatggagtgaccatgcaagaatcaggtgtctcaaaaattgtttcagttaagttaaaagatttagaaagtattgaaggatga

SEQ ID NO: 9511 - DNA, 723 bp, Streptococcus pneumoniae
  CDS (1)...(723)
atgagaatcaataagtatattgcccacgcaggtgtggccagtaggagaaaagcagaagagctgattaagcaaggcttggtgacggttaacggccaagtggtgcgtgaactagcaaccactatcaagtcaggcgacaaggtcgaagttgaaggtcaacctatctacaacgaagaaaaggtctactatctgcttaacaaaccacgcggtgtgatttccagtgtgacagatgataagggtcgcaagacggttgtcgacctcttgcccaatgtcaaagagcgtatttaccctgtgggtcgtttggactgggatacatcaggtgtcttgattttgaccaatgatggggactttacagacgagatgattcaccctcgtaatgagattgacaaggtttatgtcgcgcgtgttaaaggtgtggccaataaggacaatctccgccccttgacccgtggtcttgagattgatggtaagaaaaccaagccagctgtttatgaaattctcaaagtggacccagtcaaaaatcgctctgtggtgcagttgaccatccatgaagggcgtaaccatcaggttaaaaagatgtttgaagctgttggtctccaagtagataagttgtctcggactcgtttcggacacctagacttgacaggactccgtccaggagaatcccgtcgtcttaataaaaaagaaatcagccaactacacaccatggctgtaactaagaaataa

SEQ ID NO: 9512 - DNA, 204 bp, Streptococcus pneumoniae; identical to SEQ ID NO: 9362
  CDS (1)...(204)

SEQ ID NO: 9513 - DNA, 1317 bp, Streptococcus pneumoniae
  CDS (1)...(1317)
atgttaacatacgatttaattgttattggatttggtaaagctggtaaaacactagcaggtaaattggcttcagctggcaaaaaagttgccctcgttgaacgcagcaaggctatgtacggtggaacttgtatcaacattggttgtatcccaactaaaaccttgctagttgctgctgaaaaggacttgtcttttgaagaagtgattgctactaaaaacacgatcactggtcgcctcaacggtaaaaactatgcgactgttgctggtacaggcgtagatatctttgatgcggaagctcacttcctttcaaataaagtcatcgaaatccaagctggtgatgaaaagaaagaactgactgctgaaacaatcgtcatcaacactggtgctgtttcaaacgtcttgccaattcctggacttgctacaagcaaaaacatctttgactcaacaggtatccaaagcttggacaaattacctgaaaaacttggaatccttggtggcggaaatatcggtcttgaatttgccggcctttacaacaaacttggaagcaaggtcacagtcctagatgccttggatacattcctacctcgtgcagaaccttccatcgcagctcttgctaaacaatacatggaagaagatggcattgaattgcttcaaaatatccatactactgaaatcaaaaacgatggtgaccaagtgcttgtcgtaactgaagacgaaacttaccgtttcgacgcccttctctacgcaactggacgcaaaccaaatgtagaaccacttcaacttgaaaatacagatattgaactaactgaacgtggtgctattaaagtagacaaacactgtcaaacaaacgttcctggtgtctttgcagttggagatgtcaacggtggccttcaatttacttacatttcacttgatgacttccgtgttgtttacagctaccttgctggagatggcagctacacacttgaggaccgtctcaatgtgccaaatactatgttcatcacacctgcactttcacaagttggtttgactgaaagccaagcagctgatttgaaacttccatacgcagtgaaagaaatccctgttgcagccatgcctcgtggtcacgtaaatggagaccttcgcggagctttcaaagctgttgttaatactgaaacaaaagaaattcttggtgcaagcatcttctcagaaggttctcaagaaatcatcaacatcattactgttgctatggacaacaagattccttacacttacttcacaaaacaaatcttcactcacccaaccttggctgagaacttgaatgacttgtttgcgatttaa

SEQ ID NO: 9514 - DNA, 1344 bp, Streptococcus pneumoniae
  CDS (1)...(1344)
atgaacttaaaaactactttgggccttcttgctgggcgttcttcccacttcgttttaagccgtcttggacgtggaagtacgctcccagggaaagtcgcccttcaatttgataaagatattttacaaagcctagctaagaactacgagattgtcgttgtcactggaacaaatggaaaaaccctgacaactgccctcactgtcggcattttaaaagaggtttatggtcaagttctaaccaacccaagcggtgccaacatgattacagggattgcaacaaccttcctaacagccaaatcttcaaaaactgggaaaaatattgccgtcctcgaaattgacgaagccagtctatctcgtatctgtgactatatccagcctagtctttttgtcattactaatatcttccgtgaccagatggaccgtttcggtgaaatctatactacctataacatgatattggatgccattcgaaaagttccaactgctactgttctccttaacggagacagtccacttttctacaagccaactattccaaaccctatagagtattttggttttgacttggaaaaaggaccagcccaacttgctcactacaataccgaagggattctctgtcctgactgccaaggcatcctcaaatatgagcataatacctatgcaaacttgggtgcctatatctgtgaaggttgtggatgtaaacgtcctgatctcgactatcgtttgacaaaactggttgagttgaccaacaatcgctctcgctttgtcatagacggccaagaatacggtatccaaatcggcgggctctataatatctataacgccctagctgctgtggccatcgcccgtttcctcggcgcagattcccaactcatcaaacagggatttgacaagagccgtgctgtctttggacgccaagaaacctttcatatcggtgacaaggaatgtacccttgtcttgattaaaaatccagtcggtgcaacccaagctatcgaaatgatcaaactagcaccttatccatttagcctatctgtcctccttaatgccaactatgcagatggaattgacactagctggatctgggatgcagactttgagcaaatcactgacatggacattcctgaaatcaacgctggcggtgttcgtcattctgaaatcgctcgtcgcctccgagtgactggctatccagctgagaaaatcactgaaacgagtaatctggagcaagttctcaagaccattgagaatcaagactgcaagcatgcctatattctggcaacttatactgccatgctggaatttcgtgaactgctggctagtcgtcagattgttagaaaggagatgaactaa

SEQ ID NO: 9515 - DNA, 783 bp, Streptococcus pneumoniae
  CDS (1)...(783)
atggtttatacttcactttcctcaaaagatagcaattacccctatcagctcaacattgcccacctctacggaaatctcatgaatacctacggggacaatggaaacatcctcatgctcaagtatgtggctgaaaaactgggagcccatgtgaccgttgacatcgtttctctccatgatgactttgatgaaaatcactacgacatcgcctttttcggtggtggtcaagactttgaacaaagtatcattgcagacgacctacctgctaaaaaagagagcattgacaactacatccaaaacgacggtgtagttctggctatctgcggtggtttccaactattgggtcaatattatgttgaagcttcaggaaaacgtatcgaagggctaggggtcatgggacactacacgctcaaccagaccaataaccgttttatcggtgacatcaagattcacaatgaagatttcgatgaaacctactatggatttgaaaatcaccaaggtcgtaccttcctctctgatgaccaaaaaccgctgggacaggttgtctatggaaatggaaacaacgaagaaaaggtcggtgaaggggttcattataagaatgtctttggttcctacttccacgggcctatcctctctcgtaatgccaatctggcttatcgcctagttactactgccctcaagaagaaatatggtcaggacatccaactccctgcctatgaggacattctcagccaagaaatcgctgaagagtacagtgacgtcaaaagcaaggctgacttttcttaa

SEQ ID NO: 9516 - DNA, 1053 bp, Streptococcus pneumoniae
  CDS (1)...(1053)
aacttagaaagaatgaacaaatatatgaatacagctgattttgatttccacttgccagaggaattgattgcccaaacgccccttgaaaaacgtgatgcctccaaactcctcatcgtcaaccgtgagacaggagaaatgcaagataaacacttccactctattattgatatgctggaacctggtgatgcccttgtcatgaacgacacccgagttctccctgcccgcctctatggtcaaaaagtggagacaggaggtcatgtggaacttctcctccttaagaacactagtggagacgagtgggaagttctggctaaacctgccaaacgcctcaaggtcggtactcgtatcagctttggtgatggccgcctcagcgctgtcgttacagaagaattgacccacgggggacgcattgtccgctttgaataccaaggaattttcctagaagtcttggaaagtctgggagaaatgcctctgccaccttatatccacgaaaaattagatgaccgtgaacgttatcaaaccgtctacgccaaggaaagcggctctgctgcagcaccgactgctggtcttcacttcaccaaagaactgctggcagaaatccaagctaagggtgttcatctagtctatctgactctccatgtcggactcggaacctttagacctgtttctgtggataatctggacgaacacgaaatgcactcagagttctatcaactttctgaggaagctgctgccacccttcgctctgtcaaagaaaatggtggtcgcgtcatcgctgtcggaaccacttctatccgcaccttggaaactattggttccaagtttgatgggcaaatccaagcagattctggttggaccaatatctttatcaaacctgggtatgagtggaaggtcgtggatgccttctcaaccaacttccatctgccaaaatcaactctggtcatgttggtttctgcctttgcaggccgtgaattagtcttagatgcctaccaccatgccatccaagaacactaccgcttcttcagttttggtgacgccatgtttatttattga

SEQ ID NO: 9517 - DNA, 486 bp, Streptococcus pneumoniae
  CDS (1)...(486)
atgaatttaaacgatattaaagacttgatgactcaatttgaccagtcaagtttgagagaattttcttataaaaatgggacggatgagttgcagtttagcaagaatgaagcgagacctgtgcctgaagttgcaactcaagtcgctccagcacccgttctagcaacaccgagtccagtagctcctacatctgctccagcagagactgtagcagaagaagttccagctccagctgaagcaagtgtggctactgagggaaatcttgtagagagtccacttgttggagtggtttacttggctgctggaccagataaacctgccttcgttacagttggtgatagtgtcaaaaaaggtcaaacattggtaattatcgaagccatgaaagtcatgaatgaaatcccagctcctaaggatggtgtggtaacggaaattctcgtctctaacgaagaaatggttgagtttggtaaaggattggtacgtatcaaatga

SEQ ID NO: 9518 - DNA, 423 bp, Streptococcus pneumoniae
  CDS (1)...(423)
atgatcgatattcaaggaatcaaagaagcccttccccaccgttatcctatgcttctagtggaccgtgtcttggaagtgagcgaggataccattgttgctatcaaaaatgtgaccattaacgaacctttctttaacggccactttcctcaatacccagttatgccaggtgttctgattatggaagccttggcgcaaactgccggtgtgttggagttatcaaaacctgaaaataaaggaaaactggtcttttacgctggtatggacaaggttaagttcaagaagcaagttgtaccaggcgaccaattggttatgacagcgacttttgtaaaacgtcgtggcaccatagctgtggttgaagcaaaggctgaagtggatggcaagcttgcagccagtggtacccttacttttgcaattgggaactaa

SEQ ID NO: 9519 - DNA, 1368 bp, Streptococcus pneumoniae
  CDS (1)...(1368)
atgtttcgaaaaattttaattgccaatcgtggtgaaattgcggttcgtattatccgtgcggcacgtgaattggggattgcgacggtagcggtttattcaactgctgataaggaagctcttcatacgcttttggcagatgaagcagtttgtattggtcctggcaaggcaacagagtcttatctcaatattaatgcagttctatcagctgcagtcttgactgaggcagaagctattcaccctggttttggatttctcagtgaaaattccaaatttgcgaccatgtgtgaagaagtaggtatcaagtttatcggtccatctggtcatgttatggatatgatgggggataagatcaatgcgcgtgctcagatgattaaagcaggtgtgcctgttataccaggttcagatggagaagtgcataactctgaagaagctttaattgttgctgaaaaaattggctatcctgttatgctcaaggcttcagcaggtggaggtggtaaagggattcgtaaggttgaaaaaccagatgacctcgtttctgcctttgaaactgcctctagtgaggccaaggccaattatggcaatggtgccatgtacatagaacgggttatctatccagctcggcacattgaggttcaaatcctaggtgatgagcatggacatgtgattcacttgggtgaacgggattgttctcttcaaaggaataaccaaaaggttttggaagaaagtccctcgattgcaatcggaaaaacgctgcgtcatgaaataggtgctgctgctgttcgagcggcagagtttgttggctatgagaatgcaggaaccattgaatttcttcttgatgaagcaagtagcaatttctatttcatggagatgaatactcgtgttcaggtagaacatccagtaacagagtttgtttcaggtgttgatatcgttaaggaacagatttgcattgcggcaggtcagcctttgtctgttaagcaagaagatattgtcctacgcggtcatgccatcgagtgtcgtatcaatgcagaaaacccagcctttaactttgctccaagtccaggtaagattactaatctctatctgccaagtggtggagttggcttgcgcgtggattcagcagtttatccaggttataccattccgccttattatgatagtatgattgccaaaatcatagtacacggcgaaaatcgttttgacgccttgatgaaaatgcaacgtgccctctatgaattagagattgaaggagtgcagaccaatgcagatttccagcttgacctcatttcagatcgcaatgtcattgctggggattatgatacttccttcttgatggaaaccttcttacctaaatatcaagaaaaagaataa

SEQ ID NO: 9520 - DNA, 867 bp, Streptococcus pneumoniae
  CDS (1)...(867)
atggctctatttagtaaaaaagataagtatattcgaatcaatcccaatcgttcggttagggaaaaacctcaagctaagccagaggttccagatgaattattttcccagtgtccaggctgtaagcataccatctatcagaaggatctgggaagtgaacgtatctgtccgcactgtagctatacctttcgtatttctgcccaagaacgcttggctttgacgattgatatgggaaccttcaaagaattgtttacagggattgaaagcaaggatcccttgcatttccctggttaccaaaagaaactggcatctatgcgtgaaaaaacaggtctgcatgaagccgttgtgacaggaactgctcttattaaaggtcagactgtggctcttgggattatggattctaactttatcatggcttctatgggtacggttgtaggtgaaaaaatcactcgtttgtttgagtatgcgactgtcgaaaaattgccagttgtcctattcacagcctctggtggagcccgtatgcaggaaggaatcatgagtctcatgcagatggctaagatctctgcggcggttaaacgtcattcaaatgctggtctcttttacctgactattttgacagatccaacgactggtggtgtgacagcttctttcgctatggaaggcgatatcattctggctgaaccacagagcttggttggttttgctgggcgtcgtgtgattgaaaatacggttcgtgaaagcttgcctgaggatttccaaaaggcagaattcctattagaacatggctttgtggatgctattgtcaaaagaagagacttaccagatacgattgctagcctagtcagattgcatggagggagtcctagatga

SEQ ID NO: 9521 - DNA, 768 bp, Streptococcus pneumoniae
  CDS (1)...(768)
atgaatattgcaaaaatagtcagagaagcgcgtgagcagagtcgcttgacaaccttggactttgcgacaggcatttttgatgaatttatccaattacatggtgaccgttcttttcgtgatgatggtgcagttgttggtggtattggttggcttggagaccaagctgtaacagtggttggtatccaaaaaggcaagagtttgcaagacaacctcaaacggaattttggccaaccacatccagaaggctaccgaaaggcactgcggttgatgaaacaggctgagaaatttggccgtccagttgtgacctttatcaatacagcaggtgcttatcctggtgtcggagcagaagaacgtggtcaaggggaagctatcgctcgcaatctcatggaaatgagtgacctgaaagttcctattatcgccattattatcggtgaaggtggttcaggcggggctctggctctagctgtcgcggaccgtgtctggatgctggaaaattctatctatgccattctcagtccagaaggctttgcttccattttatggaaggacggtactcgcgccatggaagcagcagaactgatgaaaatcacttcgcatgaactgttagaaatggacgtggtggataaggtgatttctgaagtaggactttctagtaaagaactgattaagagtgtcaaaaaagaactccaaacggagctggctagactttcacaaaaaccgctagaagagttgctggaagaacgctatcaacgatttagaaaatactaa

SEQ ID NO: 9522 - DNA, 318 bp, Streptococcus pneumoniae
  CDS (1)...(318)
atgaatagagaagaagtaacattgttaggttttgaaatcgtagcctatgctggcgatgctcgttcaaaactattggaagccttgaaggctgctgaagctggtgattttgaaaaagcggacgctctggtagaggaagctggtagctgtattgcagaggctcaccacgcgcaaacaagtctattgactaaggaagcttctggtgaggacttagcgtatagtgtgaccatgatgcatggtcaagatcacttgatgacaactatcttgttaaaagacctaatgcaccatttaattgaactttacaagagaggagttaaataa

SEQ ID NO: 9523 - DNA, 963 bp, Streptococcus pneumoniae
  CDS (1)...(963)
atggaaacttactacaaagccattaactggaatgccatcgaagatgtcatcgacaaatcaacttgggaaaaactgacggagcaattttggctcgatacacgtattcccttatcaaacgacttggatgactggagaaagctatctaacaaagagaaagacttggtcggaaaagtttttggtggtttaacccttcttgacactatgcaatctgaaactggggttcaagcccttcgcgcagacatccgtacaccacatgaggaagctgttttcaataacatccaatttatggaatctgtccacgctaaatcttactcatcaatcttttctaccttgaatactaaggctgagattgaagaaattttcgaatggaccaataccaatccttacctacaaaagaaggctgagattgtcaacgaaatctacctaaacggcagcccacttgaaaagaaagttgccagcgtcttcctcgaaaccttcctcttctactctggtttcttcactcccctctactatctcggtaacaacaaactagccaacgttgcagaaatcattaaattgattattcgtgacgagtctgttcacggaacctacattggttacaaattccaacttggtttcaatgaattgcctgaagaagagcaagaaaaactcaaagaatggatgtacgacctactctatactctttatgaaaatgaagaaggctacacagagagtctttatgacggtgttggttggactgaagaggttaaaaccttccttcgctacaatgccaataaagctctcatgaacatgggacaagatccacttttcccagattcagctgaagatgtcaacccaatcgttatgaacggtatttcaacaggaacttccaaccatgacttcttctctcaagtcggaaatggttaccttcttggcgaagttgaagccatgcaagatgatgactacaactacggtttggactaa

SEQ ID NO: 9524 - DNA, 744 bp, Streptococcus pneumoniae
  CDS (1)...(744)
atgcagcagtattttgtaaaaggcagtgctatctctcctgtcactatcgaggacaaggaaatcagtaagcatatgtttcaggttatgcgcttgaaagaagaggatgaggttaccttagtctttgatgatggcatcaagcgcttggcgcgcgtgctggatatggaaaatcgtcagtttgagttggtccaagaattaaatgacaatgtggaactaccagtccaagtgaccatcgcatctggatttcccaagggagacaagctggagttcatcgctcaaaaagtaaccgaactgggtgctagccaaatctgggcctttcctgcagactggtcagttgccaagtgggatggcaagaaattgggtaaaaaagttgaaaaactagaaaaaattgcccttggagcagccgagcaaagcaagcgtaatattgtaccaagtattaaacttttcgagaaaaaagcagattttctagctcagctggaccagtttgactctatcatagtagcctatgaagaatcagctaaagaaggagaagccgctgcgcttctgcaagcagtcactggtcttgaaacaggagccaaactgctctttatctttggtccagaaggtggtctctcacctgcagaaatcgaaagttttgaagctaaaggagcagttttggcaggcctaggtcctcgtattttgcgagcagaaacagcaccgctttacgccttatcagcccttagtgttttagtagaattagagaaataa

SEQ ID NO: 9525 - DNA, 957 bp, Streptococcus pneumoniae
  CDS (1)...(957)
atgaaggaaaatttaaaagttaatattctatggttactccttttgttagctggctatagcttgattagtgtactggtttcagtcggagtacttaatctattctatgtacagattttacaacaaattggaattaatattattttggctgttggtctcaacttaatcgttggtttttcaggacaattttcacttggtcatgctggtttcatggcaattggtgcctatgcagcagctattattggttctaaatcaccaacctacggtgccttctttggagctatgcttgtaggggctttgctttcaggagcagttgccttacttgtcggcattccaaccttgcgcttgaagggggactatcttgcggtagcaactctaggtgtttctgaaattatccgtatctttatcatcaatggtggaagccttacaaatggtgcggcaggtatcttagggattcctaactttacaacttggcaaatggtttacttctttgtcgtgattacaaccattgcaaccttgaacttcttgcgtagcccaattggtcgttcaaccctctctgttcgtgaagatgaaatcgctgctgagtcagttggggttaatacgactaaaattaaaatcatcgcttttgtctttggtgccattactgcaagtattgctgggtcacttcaggcaggatttatcgggtctgttgtaccgaaagattacaccttcatcaactcaatcaacgttttgattattgttgtatttggtggactcggttccattacaggtgcgattgtttcggctattgttctgggaattttgaatatgcttctccaagatgttgctagtgtgcgtatgattatttacgctttggccttggtattggtaatgattttcagaccaggtggactccttggaacatgggaactgagcctatcacgtttctttaaaaaatctaagaaggaggaacaaaactaa

SEQ ID NO: 9526 - DNA, 1287 bp, Streptococcus pneumoniae
  CDS (1)...(1287)
atgacaaaaacattaaaacgtcctgaggttttatcacctgcagggactttagagaagctaaaggtagctgttcagtatggagcagatgctgtctttatcggtggtcaggcctatggtcttcgtagccgtgcgggaaactttactttcgaacagatggaagaaggcgtgcagtttgcggccaagtatggtgccaaggtctatgtagcggctaatatggttatgcacgaaggaaatgaagctggtgctggtgagtggttccgtaaactgcgtgatatcgggattgcagcagttatcgtatctgacccagccttgattatgattgcagcgactgaagcaccaggccttgaaatccacctttctacccaagccagtgccactaactatgaaacccttgagttctggaaagagctaggcttgactcgtgtcgttttagcgcgtgaggtttcaatggaagaattagctgagatccgcaaacgtacagatgttgaaattgaagcctttgtccatggagctatgtgtatttcatactctggacgttgtactctttcaaaccacatgagtatgcgtgatgccaaccgtggtggatgttctcagtcatgccgttggaaatacgacctttacgatatgccatttgggaaagaacgtaagagtttgcagggtgagattccagaagaattttcaatgtcagccgttgacatgtctatgattgaccacattccagatatgattgaaaatggtgtggacagtctaaaaatcgaaggacgtatgaagtctattcactacgtatcaacagtaaccaactgctacaaggcggctgtggatgcctatcttgaaagtcctgaaaagtttgaagctatcaaacaagacttggtggacgagatgtggaaggttgcccaacgtgaattggcaacaggtttctactacggtataccatctgaaaatgagcagttgtttggtgctcgccgtaaaattcctgagtacaagtttgtcgctgaagtggtttcttatgatgatgcggtacaaacagcaaccattcgtcaacgaaacgtcattaacgaaggggaccaagttgagttttatggtccaggtttccgtcattttgaaacctatattgaagatttgcatgatgccaaaggaaataaaatcgaccgcgctccaaatccaatggaactattgactattaaagtcccacaacccgttcaatcaggagacatggttcgtgcattaaaagaaggactcatcaatttttataaggaagatggaaccagcgtcacagttcgagcttaa

SEQ ID NO: 9527 - DNA, 1776 bp, Streptococcus pneumoniae
  CDS (1)...(1776)
atgactcaagggaaaattactgcatctgcagcaatgcttaacgtattgaaaacatggggcgtagatacaatctacggtatcccatcaggaacactcagctcattgatggacgctttggctgaagacaaagatatccgcttcttacaagttcgccacgaagagacaggtgctcttgcagcggttatgcaagctaaattcggcggctcaatcggggttgcagttggttcaggtggtccaggtgcgactcacttgattaacggtgtttacgatgcagctatggataacactccattcctagcgatccttggatcacgtccagttaacgaattgaacatggatgctttccaagagcttaaccaaaacccaatgtacaacggtatcgctgtttacaacaaacgtgtagcttacgctgagcaattgccaaaagtaattgacgaagcctgccgtgctgcaatttctaaaaaaggtccagctgttgttgaaattccagtaaacttcggtttccaagaaatcgacgaaaactcatactacggttcaggttcatacgaacgctcattcatcgctcctgctttgaacgaagttgaaatcgacaaagctgttgaaatcttgaacaatgctgaacgcccagttatctatgctggatttggtggtgttaaagctggtgaagtgattactgaattgtcacgtaaaatcaaagcaccaatcatcacaactggtaaaaactttgaagctttcgaatggaactatgaaggtttgacaggttctgcttatcgtgttggttggaaaccagccaacgaagtggtctttgaagcagacacagttcttttccttggttcaaacttcccatttgctgaagtttacgaagcattcaagaacactgaaaaattcatccaagttgatatcgacccttacaaacttggtaaacgtcatgcccttgacgcttcaatccttggtgatgctggtcaagcagctaaagctatccttgacaaagtaaacccagttgaatcaactccatggtggcgtgcaaacgttaagaacaaccaaaactggcgtgattacatgaacaaactcgaaggtaaaactgagggtgaattgcaattgtatcaagtttacaatgcaatcaacaaacatgctgatcaagacgctatctactcaatcgacgtaggtaacactactcaaacatctactcgtcaccttcacatgacacctaagaacatgtggcgtacatctccactctttgcgacaatgggtattgcccttcctggtggtatcgctgctaagaaagacaatccagatcgccaagtatggaacatcatgggtgacggagcattcaacatgtgctacccagacgttatcacaaacgttcaatacgaccttccagttatcaaccttgtcttctcaaatgctgagtacggcttcatcaagaacaaatacgaagatacaaacaaacacttgtttggtgtagacttcacaaacgctgactacgctaaaattgcggaagctcaaggagctgttggattcacagttgaccgtatcgaagacatcgatgcagttgttgcagaagctgttaaattgaacaaagaaggtaaaactgttgtcatcgatgctcgcatcactcaacaccgtccacttccagtagaagtacttgaattggatccaaaacttcactcagaagaagctatcaaagccttcaaggaaaaatacgaagcagaagaactcgtaccattccgtctcttcttggaagaagaaggattgcaatcacgcgcaattaaataa

SEQ ID NO: 9528 - DNA, 945 bp, Streptococcus pneumoniae
  CDS (1)...(945)
atgtcagaaccattatttttacaatcagttatgcaagaaaaaatctggggtggagccaagctacgtgatgagtttggctacgacatcccaagtgaaaaaatcggagaatattgggccatctcagcccatccaaatggagtctctaaagttgccaatggtcgttacgagggaacagatcttgctactttgtatgcggaacaccgtgaattatttggcaatcgtccagaacctgtatttccacttttgaccaagatcctcgatgccaacgactggctcagtgtccaagttcacccagacgatgcttatggactcgagcatgaaggcgaactcggaaaaacagaatgctggtacattatcgcagcggatgaaggttcagagattatctacggtcacaatgccaagtcaaaagaagaactccgccagcaaatcgaggacaagaactgggatgacttgttgaccaaagtccctgttaaggctggagatttcttctatgtaccaagcgggactatgcacgctatcggggcgggtatcttaatccttgaaacccagcagtctagcgataccacctatcgcgtctatgactttgaccgcaaggatgacaaaggcaacttgcgtgaacttcatcttgaaaaatccatcgatgtcttgaacattggtgagccagcaaatagccgtcctgtaactgttaaagcagatgatttgcgttccactctccttgtatctaatgatttcttcgcagtttacaagtgggaaattactggaaaagttgactttgaaaagacagctgactacagcttattgagtgtcttagctggtcaaggtcagctaactgttgacgggaaaaattatccaattcaaaaagggagacactttatcctaccaagtgatgttgaagcttggactctggaagggcaaggtttggaattgattgttagccatccataa

SEQ ID NO: 9529 - DNA, 1536 bp, Streptococcus pneumoniae
  CDS (1)...(1536)
atggcacacgaaaatgtcattgagatgcgtgatattaccaaggtgtttggtggatttgttgccaacgacaaaatcaacttgcacctacgaaaaggtgaaattcatgcacttttaggagaaaatggggctggtaagtccacgctaatgaacatgttagcaggccttcttgaaccaaccagtggtgaaatcgcggtcaacggtcaagttgtcaatctcgactccccatctaaagcagctagcttgggaatcgggatggttcaccagcactttatgttggttgaagccttcacagtggctgaaaacatcattttaggtagtgaattgactaaaaatggtgtgctagatatcgctggagctagcaaagaaatcaaggctctttctgaacgttatggcttagctgttgacccttctgccaaggtagcagatatctcagttggagcccaacaacgtgtagaaattttaaaaacactttatcggggggctgatatccttatctttgacgaaccaacggctgttttgactccatcagaaattgatgagttgatggctattatgaaaaatcttgtcaaagaaggaaaatcaattatcttgattacccacaaattggatgaaattcgcgcagtttctgaccgtgttacagttatccgtcgtgggaaatcaattgaaaccgttgaaattgcaggggctaccaatgctgatttggcggaaatgatggtaggacgttctgtttcctttaaaacagagaagcaagcctctaaaccaaaagaagtggttttgtctatcaaagatttggtggtcaatgaaaaccgtggtgttccagctgttaaaaatctgtccttggatgttcgtgctggagagattgttggtattgcggggattgatggaaatggtcagtctgaactgattcaagccattacaggtcttcgtaaggttgaatctggtagcattgagctaaaaggagattcaattgtaggcttgcacccacgtcagattacagaactaagtgttgggcacgttccagaagaccgtcaccgtgatggcttgattttggaaatgatgatatctgaaaatattgcccttcaaacctactataaagaaccacatagtaaaaatggaattttgaattattcaaatattacttcttatgctaaaaagctgatggaagagtttgatgttcgcgctgccagtgaattagttcctgcagctgcactctcaggaggaaatcaacaaaaagcaattattgctcgtgaaattgatcgagatcctgatctccttatcgttagccagccaactcgtgggttggatgtcggtgccattgagtatatccacaaacgcttgattgaagagcgtgataatggcaaggctgtccttgttgtcagctttgaattggatgagattttaaacgtctcagaccgtattgccgttatccacgatggtaagattcaaggtattgtatcaccagaaacaaccaataaacaaggacttggtgtcttgatggctggtggaaacttgggaaaggagaagagtgatgtctaa

SEQ ID NO: 9530 - DNA, 1233 bp, Streptococcus pneumoniae
  CDS (1)...(1233)
atggcactaacaacactcacgaaagaagagtttcagacttattctgatcaggtttcttctcgttcctttatgcaatctgtccagatgggggatttgctagaaaaaagaggggctcgaattgtttatcttgctttgaaacaagaaggagaaattcaagttgcagctctggtttatagcttgcccatgctgggtggtctgcatatggaactcaattcggggccaatttatacccaacaagatgctcttccagttttttatgcagagttaaaagaatatgccaagcaaaatggtgtattagagttgcttgtaaaaccttatgaaacttatcaaacttttgatagccaaggtaatccaatagatgctgagaaaaaaagtattattcaaggtttgactgatttaggttatcaatttgatggcttaacaacaggttacccaggtggagaaccagattggttatactataaagatttaactgaattaactgaaaagagtttgcttaaaagttttagcaaaaagggtaaacccttggtgaaaaaggctgaaacctttggcattcggttgaaaaagttaaaacgtgaagaactatcgatttttaagaatataacaaaagaaacctctgaacgtagagaatatagtgataaaagtttagaatattatgagcatttttatgatacttttggagaacaagcggagtttctcatagcaagcttaaatttttcggactatatgagcaaattgcaaggtgaacaaagtaaactagaagaaaacttggacaagttgcgacttgatttgagtaaaaatcctcattctgagaaaaaacaaaatcaactgagagaatattctagtcaatttgaaacgtttgaagttcgaaaagcagaagcgcgagacttgattgaaaaatatggagaagaagatattgttttagctgggagtttatttgtttatatgcctcaggaaacgacttatctctttagtggttcctacactgagtttaataagttctatgcccctgccctgcttcaaaaatatgttatgttggaaagcataaaacgtggaatacctaaatacaacttcctaggcattcaagggatttttgatggaagtgatggtgttttgcgttttaaacagaattttaatggctatattgtacgcaaagcaggtactttccgttaccatccatctcctttaaaatacaaagctatccagttactcaaaaaaatagtaggacgttaa

SEQ ID NO: 9531 - DNA, 717 bp, Streptococcus pneumoniae; identical to SEQ ID NO: 9410
  CDS (1)...(717)

SEQ ID NO: 9532 - DNA, 495 bp, Streptococcus pneumoniae
  CDS (1)...(495)
atgcacgtaacagtaggtgaattaattggtaattttattttaatcactggctcttttattcttttgctagtcttgattaaaaaatttgcatggtctaatattacaggcattttcgaagaaagagctgaaaaaattgcttcagatattgacagagctgaagaagcccgtcaaaaagcagaagtattggctcaaaaacgcgaagatgaattggctggtagccgtaaagaagctaagacaatcattgaaaatgcaaaggaaacagctgagcaaagtaaggctaatatcttagcagatgctaaactagaagcaggacacttaaaagaaaaagccaatcaagaaattgctcaaaataaagtagaagctttacagagtgttaagggtgaggtcgcagatttgaccatcagcttagctggtaaaatcatctcacaaaaccttgacagtcatgcccataaagcactcattgatcagtatatcgatcagctaggagaagcttaa

SEQ ID NO: 9533 - DNA, 1434 bp, Streptococcus pneumoniae
  CDS (1)...(1434)
gtgactgaaacaggtgttgtaacctatatcggggacggtatcgcgcgtgctcacggccttgaaaatgtcatgagtggagagttgttgaattttgaaaacggctcttatggtatggctcaaaacttggagtcaacagacgttggtattatcatcctaggtgactttacagatatccgtgaaggcgatacaatccgccgtacagggaaaatcatggaagtccctgtaggtgaaagtctgattggtcgtgttgtggatccgcttggtcgtccagttgacggtcttggagaaatccacactgataaaactcgtccagtagaagcaccagctcctggtgttatgcaacgtaagtctgtttcagaaccattgcaaactggtttgaaagctattgacgcccttgtaccgattggtcgtggtcaacgtgagttgattatcggtgaccgtcagacagggaaaacaaccattgcgattgatacaatcttgaaccaaaaagatcaagatatgatctgtatctacgtcgcgattggacaaaaagaatcaacagttcgtacgcaagtagaaacacttcgtcagtacggtgccttggactacacaatcgttgtgacagcctctgcttcacaaccatctccattgctcttcctagctccttatactggggtcgctatggcggaagaatttatgtatcaaggtaagcatgttttgattgtatacgatgatctatcaaaacaagcggtagcttatcgtgaactgtcgctcttgcttcgtcgtcctccaggtcgtgaagccttcccaggggatgttttctatctccacagccgtttgcttgagcgctcagctaaagtttctgatgaacttggtggtggatcaattacagccctaccatttatcgagacacaagcaggagatatctcagcctatatcgcaaccaacgtgatttctatcactgatggacaaatcttccttggcgatggcctcttcaatgcaggtattcgtccagccatcgatgcgggttcatctgtatctcgtgtaggtggttctgcacaaatcaaagccatgaagaaggttgctggtacacttcgtatcgaccttgcttcataccgtgagttggaagcctttactaagtttggttctgacttggacgcagcaacacaggctaagttgaaccgtggacgtcgtaccgttgaggtcttgaaacaacctgttcacaaaccattacctgttgagaaacaagtaaccattctttatgctttgacacatggtttcttggatactgttccagtagatgatattgttcgtttcgaggaagagttccatgccttctttgatgctcaacatccagagattttggaaaccattcgtgatacaaaagacttgccagaagaagcagtcttggatgctgcgattacagagtttctcaatcaatctagcttccaataa

SEQ ID NO: 9534 - DNA, 1173 bp, Streptococcus pneumoniae
  CDS (1)...(1173)
atggtagttatgaatagaataagagtcagcaaaagggttgaaaagaagcttgctaaggggctagttttactagaagccagtgatcttgagaatgtcaatcttaaggatcaggaagtagaggtgcagggtcaggaaggaaactttcttgggactgcctacctttctcagcaaaacaagggcttgggctggtttgtcagcaaagacaaggtggccttcaatcaaactttctttgaaacgttgtttagaaaagccaaagaaaagagaaacgcctactatcaagatgatttgacaactgcctttcgtctctttaatcaagagggagatggctttgggggtctgacagtggacctttatggcgactacgccgtcttttcttggtataactcttatgtttatcagattcgtcagactatatcagaagcctttagacaggttttccctgaggttttaggggcttatgagaaaatccgctttaagggttttgactatgaatctgcccatgtttatggtcaagaagcacctgactttttcactgttttagaaaatggtgtcctgtatcaagtctttatgaatgatggcttgatgacaggaattttcctagaccagcatgaggttcgcggtagtttagttgacggcttggctatgggtaaatccttgctcaatatgttttcctacacagcggctttttcagtagctgcggccatgggaggagctagccagacaacttctgttgatctagccaaacgttcacgagaattgtctcaagcgcattttcaggcaaatgggctcagcacagacgagcatcgttttatagtcatggatgtctttgagtatttcaaatatgccaaacgcaaagacttgacctacgatgtgattgtcctagatccgcctagctttgctcggaataaaaaacaaactttctctgtggccaaggattatcacaagttgatttcccagagtcttgagattttaaatccgggagggattatcattgccagtaccaatgctgccaatgtttcccgtcagaaatttacagaacaaattgataaaggctttgcaggaagaagttaccagattttaaacaaatatggtcttccagcagattttgcctataataaaaaagatgaaagtagtaattacctcaaggtgattagtatgaaggttagtaaatga

SEQ ID NO: 9535 - DNA, 1353 bp, Streptococcus pneumoniae
  CDS (1)...(1353)
atgaaagtaatagatcaatttaaaaataagaaagttcttgttttaggtttggccaagtctggtgaatctgcggctcgtttgttggacaagttaggtgccattgtgacagtaaatgatgggaaaccattcgaggacaatccagctgcccaatgtttgctggaagaagggatcaaggtcattacaggtggccatcctttggaactcttggatgaagagtttgccctcatggtaaaaaatccaggtatcccctacagcaatcccatgattgaaaaggctttggccaagggaattccagtcttgactgaggtggaattggcttatttgatttcagaagcaccgattattggtatcacaggatcgaacggtaagacaaccacaacgactatgattggggaagttttgactgctgctgggcaacatggtcttttatcagggaatatcggctatcctgccagtcaggttgctcaaatagcatcagataaggacacgcttgttatggaactttcttctttccaactcatgggtgttcaagaattccatccagagattgcggttattaccaacctcatgccaactcatatcgactaccatgggtcattttctgaatatgtagcagccaagtggaatatccagaacaagatgacagcagctgatttccttgtcttgaactttaatcaagacttggcaaaagacttgacttccaagacagaagccactgttgtaccattttcaacacttgaaaaggttgatggagcttatctggaagatggtcaactctacttccgtggtgaagtagtcatggcagcgaatgaaatcggtgttccaggtagccacaatgtggaaaatgcccttgcgactattgctgtagccaagcttcgtgatgtggacaatcaaaccatcaaggaaactctttcagccttcggtggtgtcaaacaccgtctccagtttgtggatgacatcaagggtgttaaattctataacgacagtaaatcaactaatatcttggctactcaaaaagccttatcaggatttgacaacagcaaggtcgtcttgattgcaggtggtttggaccgtggcaatgagtttgacgaattggtgccagacattactggactcaagaagatggtcatcctgggtcaatctgcagaacgtgtcaaacgggcagcagacaaggctggtgtcgcttatgtggaggcgacagatattgcagatgcgacccgcaaggcctatgagcttgcgactcaaggagatgtggttcttcttagtcctgccaatgccagctgggatatgtatgctaactttgaagtacgtggcgacctctttatcgacacagtagcggagttaaaagaataa

SEQ ID NO: 9536 - DNA, 1059 bp, Streptococcus pneumoniae
  CDS (1)...(1059)
atgaaaaaaattgtctttacaggtggggggacggttggacacgttaccctcaatcttttgttaatgcccaagttcatcgaagatggttgggaagtccactatatcggggacaagcgtggtatcgaacaccaagaaatccttaagtcaggtttggatgtcaccttccactccattgcgactgggaaattgcgtcgctatttctcttggcaaaatatgctggacgtcttcaaagttggctggggaatcgtccaatcgctctttatcatgttgcgacttcgtccacagatccttttttcaaaggggggctttgtctcagtaccgcctgttatcgcagcgcgtgtgtcaggagtgcctgtctttattcacgaatctgacctgtctatgggcttggccaataaaatcgcctataaatttgcgactaagatgtattcaacctttgagcaagcttcgagtttgtctaaggttgagcatgtgggagcagtgaccaaggtttcagatcaaaaaaatccagaaccagatgaattggtggatattcaaacccactttaatcataaattgccgactgtattgtttgttggcggttctgcaggtgctcgtgtctttaaccaattggtgacagaccataagaaagaactaacagagcgctacaatattatcaatctaactggagattctagcctgaatgagttgagccaaaatctttttcgtgttgactatgtgaccgatctctatcaacccttgttggaattggctgatattgttgtgacacgaggtggtgccaatacgatttttgagctcttggcgatagcaaaattgcatgtcattgtgccgcttggtcgtgaagctagtcgtggtgaccagattgaaaatgcagcttactttgtaaaaaaaggctatgcagaagaccttcaagaaagcgatttgaccttggatagtttggaagagaagctttctcacttactaagtcacaaggaagattaccaagctaagatgaaagcttctaaggaattgaaatctctagcagatttttatcaattgttgaaaaaagatttatcataa

SEQ ID NO: 9537 - DNA, 1020 bp, Streptococcus pneumoniae; identical to SEQ ID NO: 9137
  CDS (1)...(1020)

SEQ ID NO: 9538 - DNA, 2433 bp, Streptococcus pneumoniae
  CDS (1)...(2433)
atgaactattcaaaagcattgaatgaatgtatcgaaagtgcctacatggttgctggacattttggagctcgttatctagagtcttggcacttgttgattgccatgtctaatcacagttatagtgtagcaggggcaactttaaatgattatccgtatgagatggaccgtttagaagaggtggctttggaactgactgaaacggactatagccaggatgaaacctttacggaattgccgttctcccgtcgtttgcaggttctttttgacgaagcagagtatgtagcgtcagtggtccatgctaaggtgctagggacagagcacgtcttctatgcgattttgcatgatggcaatgccttggcaactcgtatcttggagagggctggtttttcttatgaagacaagaaagatcaggtcaagattgctgctcttcgtcgaaatttagaagaacgggcaggctggactcgtgaagatctcaaggctttacgccaacgccatcgtacagtagctgacaagcaaaattctatggccaatatgatgggcatgccgcagactcctagtggtggtctcgaggattatacgcatgatttgacagagcaagcgcgttctggcaagttagaaccagtcatcggtcgggacaaggaaatctcacgtatgattcaaatcttgagccggaagactaagaacaaccctgtcttggttggggatgctggtgtcgggaaaacagctctggcgcttggtcttgcccagcgtattgctagtggtgacgtgcctgcggaaatggctaagatgcgcgtgttagaacttgatttgatgaatgtcgttgcagggacacgcttccgtggtgactttgaagaacgcatgaataatatcatcaaggatattgaagaagatggccaagtcatcctctttatcgatgaactccacaccatcatgggttctggtagcggaattgattcgactctggatgcggccaatatcttgaaaccagccttggcgcgtggaactttgagaacggttggtgccaccactcaggaagaatatcaaaaacatatcgaaaaagatgcggctctttctcgtcgtttcgctaaagtgacgattgaagaaccaagtgtggcagatagtatgactattttacaaggtttgaaggcgacttatgagaaacatcaccgtgtacaaatcacagatgaagcggttgaaacagcggttaagatggctcatcgttatttaaccagtcgtcacttgccagactctgctatcgacctcttggacgaagcagcagcaacagtgcaaaataaggcaaagcatgtaaaagcagacgattcagatttgagtccagctgacaaggccctgatggatggcaagtggaaacaggcagcccagctaatcgcaaaagaagaggaagtacctgtctacaaagacttggtgacagagtctgatattttgaccaccttgagtcgcttgtcaggaatcccagttcaaaaactgactcaaacggatgctaagaagtatttaaatcttgaagcagaactccataaacgtgtcatcggtcaagatcaagctgtttcaagtattagtcgtgccattcgccgtaatcagtcaggaattcgcagtcacaagcgtccgatcggttcctttatgttcctaggacccacaggtgtcggtaagaccgagttggccaaggctttggcagaagttctctttgatgacgaatcagcccttatccgctttgatatgagtgagtatatggagaaattcgcagccagccgtctaaatggagctcctccaggctatgtgggttacgaagaaggtggggagctgacagagaaggttcgcaataaaccctattccgttctcctctttgatgaggtagagaaggcccacccagatatctttaatgttctcttgcaggttctggatgacggtgtcttgacagatagcaagggacgcaaggtcgatttttcaaataccattatcattatgacatcgaatctaggtgcgactgcccttcgtgatgataagactgttggttttggggctaaggatattcgttttgaccaggaaaatatggaaaaacgcatgtttgaagaactgaaaaaagcttatagaccggaattcatcaaccgtattgatgagaaggtggtcttccatagcctatctagtgaccatatgcaggaagtggtgaagattatggtcaagcctttagtggcaagtttggctgaaaaaggcattgacttgaaattacaagcttcagctctgaaattgttagcaaatcaaggatatgacccagagatgggagctcgcccacttcgcagaaccctgcaaacagaagtggaggacaagttggcagaacttcttcttaagggagatttagtggcaggcagcatacttaagattggtgtcaaagcaggccagttaaaatttgatattgcataa

SEQ ID NO: 9539 - DNA, 2001 bp, Streptococcus pneumoniae
  CDS (1)...(2001)
atgactttgatggatcattgtgagctatcattatatgaattatctgttaaggtgagcttacctataaaggaagtcaaagaaggaatagattatttagtgccttatctagctaataaagggatagtgctggataaaaaacaaggtcgctatagtttatcaaatcgtacgaagcagtctttgacagatattattaagtcggatgaattggttttaccaaagtcgactcgcttagctttaatctatctttacactttttgccgattagattttatatcgaataatcattaccaagactttttgaaagtaagtaagaatacaaccttatctgatattcaatcattaagaaagattatgttagataatgatttggagctagggtacagtagagcaaaaggttatactttacacggttcagagtggaataagcaccgcttagcttttcaaatggttagtgagttgctggaatcctccatagggatttggggtttggattatgttttatccagttgggggtattcattaacttatgatttgataaatcaggtagttaaagattattatgagaagctacagctagtacctattgttaatcaattaaaagtttaccttttcggtttagtattcattctgtgtaggtatcaaagggatgttgaaagagtatgtctttcagagacattagtatctcctgttattcaagatataaccactattttattggatacagtggttgatttgggaattatagatacggtgttttctgaggatgattatcgctatatcaccgttttattatcaagttgctttgaaggtgaagtagatgttgctccggtttactttaatcaattaacagaggctattataagtagaatggaagatatttctttgttacattttaaacaaagggaaggattgagagaaaatcttcgccgccaccttataccggcttactatagattaaagttcggcctacctagttcaaatgaatatgtattgcatgttaaagaacattatcctgatttatttgaattagtcaaagattctttgatgcccttgatggacgctattgacaatcccatacctgatagtgaaacagcatattttgttatccatttcggaggttatttaaagaaagcagatactttgcctcaaaaatgctataaagcagcaatcatttgtcctaatggtgttagttcttcattgatgttaaaagagaatctattagcattatttcctcaaattgagtttataggaacctcaaagattgatgatttacaggtgaaagttagtagtgactatgatatggttttttctaccataaaggtggagacagaaaagccaaattatctagtttcggttatgatgactgaagagcaagcaatacaactagtagaactagtgttaaaagattttccgaatttagagtatggagattttgagattgaacaaatcctgaatattgtcaaaagatatggaattattacacaagaattggaattaagattggcgttaaagaattatctttatcaaaaaaatgatagaaaggaaattgtaccagtgctagaacaacttattaccaaagaaacctatcaggttagttcgcaaaaattaggatggaaggaggcgattcgtttagcagctaaaccgcttttggatcaagataagataactgagaactaccctgaggcaatgattcaaaaagtagaagagtttggaccttttattaatttagggaagggagtagcaattcctcacgctcggccagatgaaggtgtgaatgaaataggaatgtcaatgttagttttggaagaaccgatttatttattggataatccagaacaagaggtaagattgttgatttgtattgcagccattgataatgagagtcatttaaaggctttgtcacatttaacaacaattttaagagataaaaatcatgttcaaactttaatatcatcaaaaaactatgatgacattaaaatgataattaaacaggaggattag

SEQ ID NO: 9540 - DNA, 954 bp, Streptococcus pneumoniae
  CDS (1)...(954)
atgtctattagccaacgtacgaccaagctcatcttagctacctgtcttgcctgcctgtttgcttattttctcaatctttcgtcagcagtttcggctggaattatcgctctcttgagcctatctgatacgcgtagaagtactttaaaactggctcgcaatcgtcttttttctatgcttctagctctggctatcggtgttctagcttttcacttgagcggatttcatatctggagtctcggcctctatctggccttctacgttcctttagcctacaagatgggctgggaaattggcatcacaccaagcacggttttggttagccatctcttggttcaagagtcaacctctccagacctcctagtcaacgaattccttctctttgctatcggtacaggatttgctttactggtcaatctctacatgccttcacgagaaaagaaaatccagcactaccacacgctggtggaagaaaagttaaaagatatcctccagcgcttcaaatactatttatccagaggagacggacgcaaccgagcacagctggtagcagaattagacacgcttttgaaagaagccctcagactggtctatttggatcactctgaccacctctttcaccagaccgactaccatatccactactttgagatgagacaacgacaaagtcgtatcctgagaaacatggcccaacagattaacacttgtcaccttgccgccagtgaaagcctgatcttagcgcaactcttttcaaaaattgcaggtcaactgagccagaccaatcctgcttctgatttgctagatgaaattgaacgttatctggaagtcttccggaaccgcagtctgcccaaaacaagagaagagtttgaaacccgcgccacccttcttcaactcctacgtgaagccaaaaccttcatccaagtaaaagttgatttttaccaaaaatatagacagtaa

SEQ ID NO: 9541 - DNA, 1296 bp, Streptococcus pneumoniae
  CDS (1)...(1296)
atgaaaaactcaaaatttatagatcaatttgccacctttgctggtaaactagggaaccaaattcatttaaaaaccctaagagatgcattcgtaacagtaatgccattatatattttggcaggtttaatcgttcttttgaacaacacggtatttaagtggattttccaaggggatacattaacaagattccaatattggggaataacaattgcaaacggtactttaagtatttcaggtatgattattgctgtaatggttggttatttcttagctaaaaacagagatttcgaaaacccgttagcagcatcaatgctatcattagtttctttaattgtgatgatgccaaatacagtttctgtagttcctgacggagcaaaagatgcggtaaacatttcaggtgttctttcattcaacaacacaggtacaggcgcaatgttcgccggggttatcgtagcgattattgcaacagaattattcattgaattatcaaacgttaaagctttacaaatgaaccttggtgaaaatattccaccagctgttagtagatcatttagcgtattacttccagtcatgaccgtcatctccttatttggggttgtttcagcattattattcaatataactggaatgaacttaatctcaatcattacaatctttattcaagaaccaattcgtcatattggtacaagcttaatcggggtcattattatttactctttaggaaatatgttatggctatttggtattcaccaagcagttatttacagtgccatcctagaaccattactattaattaacattactgaaaacatcactgcagcaaataatggacaagccattccacacatcatcaacttatcacaaatacaaacattcgctttaatgggtggtagtggatctacattatgtttattaatagcaacattcttagtaagtcgcaatgctgtttctaaaaacgtggctaaattatcttttggacctggtatcttcaatatcaatgaaccagtattattcggttacccaatcgtttataacatttcattagctattccatttatcacagttccagtacttggtattttaatcagctacttagcaacagttacaggattcatgagtcctgcatttatacaagttccttggactacaccagtattcttaaatgcatggttagcaacagcaggggacgtgagagcagttctagttcaattcatcatctttgcacttggagttcttctatacattccatttatcaaagttaatgacaaagttgttgaacaagaaatggaaggttaa

SEQ ID NO: 9542 - DNA, 1284 bp, Streptococcus pneumoniae
  CDS (1)...(1284)
atgacaaaggttgtttttgaagaaaaatactatccagctgtaaaagaaaaggtttatcgaactcgtttggccaacggattgacagttgctcttttgcctaaaaaggaatttaaagaggtttacgggagtgtcactgtacagtttggttcggtagatacgtttgtcacagaagttgacggagatgtaaaacaatatcctggaggaattgctcattttcttgaacataaattatttgagagagaagattctagtgatttgatgtcggcttttacgagtctaggtgcagatagtaatgcctttacaagctttacaaaaacaaactatcttttttcagcaacggattattttttagaaaatttagatttacttgatgaattggtaacatcagcacactttactgaagcttccattctgacagagcaggatattattcagcaagaacgagaaatgtaccaagatgatccagattcgtgtttattcttttcaactttagcgaatttgtatcctggtacacctttagcaactgatatagttggaagtgaggagtccatttcccaaatcaatctaactaatttgcaagaaaattttacaaagttttacaaacctgtaaacatgtctctgtttttagttggtaattttgatgtggagcgagtacaggactattttgaaagcaaagaactgaaagattcagattttcaggaagtagcaagagaaaagttgtttttacagcctgtaaagccaacagatagtatgagaatggaagtatcttctcccaaactagcgattggagttagaggtaagcgagaagtttctgaagcggattgctatcgacatcatattttattaaaattattgtttgcaatgatgtttggttggacttcggatcgttttcaaaaatgttatgaatcaggtaaaattgatgcatccttatctctggaagttgaagtaacaagtcgctttcattttgtcatgttgacaatggatacgaaagagccagttgctttgtctcatcaatttaggaaggctattcgtaattttacaaaggatttagatattacagaggaacatttagatattatcaaaagagagatgtttggcgaatttttcagtagcatgaactctcttgaatttattgcaacgcaatatgatgcttttgaaaatggtgagacaatttttgatttgccgaaaattttacaggaaattactttagaggatgtccttgatgctggacatcatttaatagatgatggtgacatagttgattttacaatattcccatcgtag

SEQ ID NO: 9543 - DNA, 918 bp, Streptococcus pneumoniae
  CDS (1)...(918)
atgtctaagaaattgactttccaggaaatcatccttactttgcaacaattttggaatgaccaaggttgtatgcttatgcaggcttatgataatgaaaaaggtgcgggaacaatgagtccttacactttccttcgtgctatcggacctgagccatggaatgcagcttatgtagagccatcacgtcgtcctgctgacggtcgttatggggaaaaccctaaccgtctctaccaacaccaccaattccaggtggtcatgaagccttctccatcaaatatccaagaactttaccttgagtctttggaaaaattgggaatcaatcctttggagcacgatattcgttttgttgaggacaactgggaaaacccatcaactggttcagctggtcttggttgggaagtttggcttgacggaatggaaatcactcagttcacttatttccaacaagtcggtggattggcaactagccctgtgactgcggaagttacctatggtttggagcgcttggcttcttacattcaagaagtagactctgtctatgatatcgagtgggctgatggtgtaaaatacggagaaatctttatccagcctgagtatgagcactcaaaatattcatttgaaatttcggaccaagaaatgttgcttgaaaattttgataagtttgaaaaagaagctggtcgtgcattagaagaaggcttggtacaccctgcctatgactatgttctcaaatgttcacatacctttaatctgcttgacgcgcgtggtgccgtatctgtaacagagcgtgcaggctatatcgctcgtatccgtaacttggcccgtgttgtagccaaaacctttgttgcagaacgcaaacgcctaggttacccacttttggatgaagaaacacgagttaaacttttagcagaagacgcagaatag

SEQ ID NO: 9544 - DNA, 1311 bp, Streptococcus pneumoniae
  CDS (1)...(1311)
atgagtatgtttttagatacagctaagattaaggtcaaggctggtaatggtggcgatggtatggttgcctttcgtcgtgaaaaatatgtccctaatggaggcccttggggtggtgatggtggtcgtggaggcaatgtggtcttcgttgtagacgaaggactacgtaccttgatggatttccgctacaatcgtcatttcaaggctgattctggtgaaaaagggatgaccaaagggatgcatggtcgtggtgctgaggaccttagagttcgagtaccacaaggtacgactgttcgtgatgcggagactggcaaggttttaacagatttgattgaacatgggcaagaatttatcgttgcccacggtggtcgtggtggacgtggaaatattcgtttcgcgacaccaaaaaatcctgcaccggaaatctctgaaaatggagaaccaggtcaggaacgtgagttacaattggaactaaaaatcttggcagatgtcggtttagtaggattcccatctgtagggaagtcaacacttttaagtgttattacctcagctaagcctaaaattggtgcctaccactttaccactattgtaccaaatttaggtatggttcgcacccaatcaggtgaatcctttgcagtagccgacttgccaggtttgattgaaggggctagtcaaggtgttggtttgggaactcagttcctccgtcacatcgagcgtacacgtgttatccttcacatcattgatatgtcagctagcgaaggccgtgatccatatgaggattacctagctatcaataaagagctggagtcttacaatcttcgcctcatggagcgtccacagattattgtagctaataagatggacatgcctgagagtcaggaaaatcttgaagaatttaagaaaaaattgtctgaaaattatgatgaatttgaagagttaccagctatcttcccaatttctggattgaccaagcaaggtctggcaacacttttagatgctacagctgaattgttagacaagacaccagaatttttgctctacgacgagtccgatatggaagaagaagcttactatggatttgacgaagaagaaaaagcctttgaaattagtcgtgatgacgatgcgacatgggtactttctggtgaaaaactcatgaaactctttaatatgaccaactttgatcgtgatgaatctgtcatgaaatttgcccgtcagcttcgtggtatgggggttgatgaagcccttcgtgcgcgtggagctaaagatggggatttggtccgcattggtaaatttgagtttgaatttgtagactag

SEQ ID NO: 9545 - DNA, 2292 bp, Streptococcus pneumoniae
  CDS (1)...(2292)
atgaacgcattattaaatggaatgaatgaccgtcaggctgaggcggtgcaaacgacagaaggtcccttgctaatcatggcaggggctggttctggaaagactcgtgttttaacccaccgtatcgcttatttgattgatgaaaagctggtcaatccttggaatatcttggccattacctttaccaacaaggctgcgcgtgagatgaaagagcgtgcttatagcctcaatccagctactcaggactgtctgattgcgaccttccactccatgtgtgtgcgtattttgcgtcgcgatgcggaccatattggctacaatcgtaattttacaattgtggatcctggtgaacagcgaacgctcatgaaacgtattctcaaacagttgaacttggatcctaaaaaatggaatgaacgaactattttggggaccatttccaatgctaagaataatttgattgatgatgttgcttatgctgcccaagctggcgatatgtatacgcaaattgtggcccagtgttatacagcctatcaaaaagaacttcgtcagtctgaatccgttgactttgatgatttgattatgctgaccttgcgtctctttgatcaaaatcctgatgttttgacctactaccagcaaaaattccaatacatccacgttgatgagtaccaagataccaaccacgctcagtaccaattggtcaaactcttggcttcccgttttaaaaatatctgtgtggttggggatgcggaccagtctatctacggttggcgtggtgctgatatgcagaatatcttggactttgaaaaggattaccccaaagccaaggttgttttgttggaggaaaattaccgctcaaccaaaaccattctccaagcggccaacgaggttattaaaaataataaaaatcgccgtcctaaaaatctctggactcaaaacgctgatggggagcaaatcgtttactatcgtgccgatgatgagctggatgaggctgtatttgtagccagaaccatcgatgaacttagtcgcagtcaaaacttccttcataaggattttgcagttctctatcggactaatgcccagtcccgtacaattgaggaagccctgctcaagtctaacattccttataccatggttggcggaaccaaattctacagccgtaaggaaattcgcgatattattgcttatctcaaccttattgctaatttgagtgacaatattagttttgagcgtattatcaacgagcctaaacgtggaattggtctaggtacagttgagaaaatccgtgattttgcaaatttgcaaaatatgtctatgctggatgcttctgctaatattatgttgtctggtatcaagggtaaggcagcccaatctatctgggattttgccaatatgatgcttgatttgcgggagcagctagaccacttaagcattacagagttggttgagtccgtcctagaaaaaacaggttatgtcgatattcttaacgcccaagcgactctagaaagcaaggcacgggttgaaaatatcgaagagtttctttctgttacgaagaactttgatgacaccacggatgtgacagaagaggaaactggtctggacaaactgagtcgtttcttaaatgacttggctttgattgccgacacagattcaggtagtcaggagacatcagaagtgaccttgatgaccctgcatgctgccaaaggtctcgaatttccagttgtctttttgattgggatggaagaaaatgtctttccacttagtcgtgcgactgaagattcagatgaattagaagaagagcgccgtctagcctatgtaggtatcacgcgtgcagagaaaattctctatctgaccaatgccaactcacgcttgctttttggtcgtaccaattataaccgtccgactcgttttattaacgaaatcagttcagacttgcttgagtatcaaggtctggctcgtcctgcaaatacaagctttaaggcatcatatagcagtggtagtatttcctttggtcaaggtatgagtttggctcaggctcttcaagaccgtaaacgcggtgctgccccaaaatcaatccagtcaagcggtcttccatttggtcaatttacagctggcgcaaaaccagcatctagcgaggcaaattggtccattggtgatattgctctccacaagaaatggggagagggaaccgttctggaagtttcaggtagcggtgctaggcaggaattgaaaatcaatttcccagaagtaggtttgaaaaaacttttagccagtgtggctccaattgagaaaaaaatctaa

SEQ ID NO: 9546 - DNA, 1551 bp, Streptococcus pneumoniae
  CDS (1)...(1551)
gtgtcaaataaaccaatagcagatatgattgaaaccattgagcattttgctcagacacagcctagctatcctgtctataatgttttggggcaggaacacacttatggcgatttaaaggctgattcggatagtttggctgcagtcattgaccaactaggcttgcctgagaagtctcctgtggttgtttttggtggccaagaatatgaaatgttggcaacctttgtagcgctgactaagtcaggtcatgcctacattccaattgatagccattcggccttggagcgagtttcagctattttagaagtagcagagccaagcttgattattgccatttcagcctttcccttggagcaggtttctacaccaatgataaatctagctcaggttcaagaagcctttgcccaagggaacaactatgaaatcacgcatccagtcaagggagatgataattactacattatctttacttctggtacgactggtaagcctaagggagtgcagatttcacatgataatctcctcagctttacaaactggatgattacggataaggaatttgcgacaccgagtcgtccgcaaatgctggcacagccaccttattcttttgacttgtctgtcatgtattgggcaccgaccttggcacttggtggtacgcttttcactcttccttcagtcatcactcaggactttaagcaactctttgcggctatcttttcattgccaatcgctatctggacatcaacaccatcctttgcagatatggccatgttgtctgaatacttcaacagtgagaaaatgcctggaatcacgcatttctactttgatggtgaagaattgacggtcaaaacagctcaaaaactgcgcgagcgtttcccaaatgcccgtatcatcaatgcttacggcccaacagaagcgacagtagctctgtcagcagttgccgtgacagacgagatgttagcgactctcaaacgcctaccaatcggctataccaaggctgattctccaacctttatcattgacgaggaaggaaataaactgccaaatggcgaacagggagaaatcattgtttctgggccagctgtttcaaaaggttatatgaaaaatcctgaaaaaacagcagaagccttctttgagtttgaaggtctgccagcctatcacacaggcgatgtgggaaccatgacagatgagggcttgcttctctacggcggacgcatggacttccagattaagtttaacggttaccgcattgagttagaagatgtctctcaaaacctcaacaagtctcgctttatcgaatctgctgtcgcagtaccgcgctataacaaggaccacaaggtacaaaatctattggcttatgtcatcttaaaagacggtgttcgtgagcagtttgagcgagatatcgatattaccaaggccatcaaggaagacctgacagacatcatgatgtcctatatgatgccatctaaattcctttaccgagacagtttgccactaactccaaatggaaagattgacatcaaaggattgattaacgaggtgaataagagatga

SEQ ID NO: 9547 - DNA, 1017 bp, Streptococcus pneumoniae; identical to SEQ ID NO: 9359
  CDS (1)...(1017)

SEQ ID NO: 9548 - DNA, 3678 bp, Streptococcus pneumoniae
  CDS (1)...(3678)
gtggttgatgtaaatcgttttaaaagtatgcaaatcaccctagcttctccaagtaaagtccgttcatggtcttatggagaagtcaaaaaacctgaaacaatcaattatcgtaccttgaaaccagaacgtgaaggactctttgatgaagtgatctttggtcctacaaaagactgggaatgtgcttgtggtaagtacaaacgcattcgttacagaggaattgtttgtgaccgctgtggggttgaagtaacgcgtacgaaagttcgtcgtgagcgtatgggacatatcgaattgaaagctcctgtatctcacatctggtacttcaaggggattccaagccgtatgggcttgacccttgatatgagccctcgtgccctcgaggaagttatctactttgcggcttatgtggtgattgatcctaaggatacaccacttgagcacaagtctatcatgacagagcgcgaataccgagagcgcttgcgcgaatatggttatggttcatttgttgctaagatgggtgcggaagccatccaagaccttttgaagcaagtagatcttgaaaaagaaattgctgaactcaaagaagaattgaaaactgctactggacaaaaacgtgtcaaagccatccgtcgtttggatgttttggatgccttttacaagtctggaaacaaacctgaatggatgattcttaacatccttccggttatcccaccagatcttcgtccaatgttgcagttggatggtggccgttttgcctcatctgacttgaatgacctttaccgccgtgttatcaaccgtaacaaccgtttggctcgtttgcttgagttaaatgcaccaggtatcatcgttcaaaatgagaagcgtatgcttcaagaagcagttgacgctttgattgacaatggtcgtcgtggtcgtccaatcacaggaccaggtagccgtccattgaaatcattgagccacatgcttaaaggtaaacaaggacgcttccgtcaaaacttgctcggtaaacgtgttgacttctcaggacgttccgttatcgccgttggtccaactcttaagatgtaccaatgtggtgtgccacgtgaaatggcgattgaactctttaaaccatttgtcatgcgtgaaatcgttgcccgtgatatcgtgcaaaacgtcaaagcagctaaacgcttggtggaacgcggagatgagcgtatctgggatatccttgaagaagtgattaaagaacacccagtgcttttgaaccgcgcaccgacccttcaccgtttgggtatccaagccttcgagccagtcttgattgatggtaaggctcttcgcttgcacccacttgtctgtgaagcctacaatgctgactttgacggggaccaaatggccatccacgtaccactttcagaagaagcacaagcagaagctcgtatcctcatgctagctgctgagcacatcttgaacccgaaagatgggaaaccggtagttactccatctcaggacatggttttgggtaactactacttgaccatggaagaagctggtcgcgaaggtgaaggaatggtcttcaaagaccgtgacgaagcggttatggcttaccgcaatggttatgttcacctccactcacgtgttggtatcgcaacagacagcctcaacaagccttggacagaagagcaaagacataaggtcttgcttacaacagttggtaaaattctcttcaacgatatcatgccagaggggctaccatacttgcaagaaccaaacaatgccaacttgacagaaggtgttccagctaaatacttcttgccacttggtggagctatcaaggaagctatcagcaatcttgagctcaaccctccattcaagaagaaaaacctcggaaatatcatcgctgaaatcttcaaacgtttccgtacgacagaaacttctgccctacttgaccgcatgaagaacctcggttaccaccactcaactcttgcaggattgacagtgggtattgccgatatcccagtcgttgatgacaaggctgaaatcattgaagaatcacacaaacgtgtcgaacaaatcaccaaacaattccgtcgtggtatgatcacagacgacgagcgttacaatgctgttacagctgaatggcgtgctgcccgtgaaaaacttgagaaacgcttgattgctaatcaagatcctaagaacccaatcgttatgatgatggactctggagcccgtggtaacatctcaaacttctcacagcttgccggtatgcgtggtctgatggctgctccgaatggacgtatcatggaattgccaatcctttcaaacttccgcgaaggtttgtcggtattggaaatgttcttctcaactcacggtgctcgtaaaggtatgaccgatacggcccttaagacagccgactcaggttacttgactcgtcgtttggtcgacgttgcccaagacgttatcatccgtgaggacgactgtggaactgaccgtggtctcttgatccgttctatcgcagaaggaaaagagatgatcgagtctctcgaagagcgtctcaacggtcgttacactaagaaaactgttaaacatccagaaactggtgcagtgattattggtccaaatgaattgattacagaagacaaggcgcgtgaaattgtcaatgctggtgtggaagaagtgactatccgttctgtatttacatgtaacactcgtcacggtgtctgccgtcactgttacggtatcaacttggcgactggtgatgcggttgaagttggtgaagcagttggtacaatcgctgcccaatctatcggggaacctggtacacagcttacaatgcgtaccttccacacaggtggggttgcctcaaataccgatatcactcagggtcttcctcgtgtccaagaaatctttgaagcccgcaatcctaaaggggaagcggttattacagaggttaaaggacaagttactgctatcgaagaagatgcatcaactcgtaccaagaaagtctttgttaagggtgaaactggcgaaggtgaatatgtcgttccatttacagctcgtatgcgtgtcgaagttgggggccaagtagcgcgtggtgctgctctgacagaaggttctatccaaccaaaacgtctccttgcagttcgtgatgtcttgtcagttgaaacgtaccttctcggtgaagtacaaaaagtttaccgtagccaaggggtagaaatcggtgacaaacacatcgaggtaatggttcgtcaaatgatccgtaaagtccgtgtcatggatccaggtgatacagatcttctcatgggtaccctcatggatatcaatgactttacagatgccaacaaagatgtccttatcgcaggtggagttccagcgacaggtcgcccagtccttatgggaattaccaaagcctcacttgaaacaaacagtttcttgtcagcggcttccttccaggaaacaactcgtgtccttactgacgcagctatccgtggtaagaaagaccatctccttggacttaaagaaaatgttatcatcggtaagatcatcccagctggtactggtatggcccgttaccgtaaccttgaaccacatgctgtcaacgaagaagaataccttaatcctccagtagaggaagaaggaaatgaagaaacaacagaagtagttgtggatactgccgttgaaactgtggaagaaacagtagaataa

SEQ ID NO: 9549 - DNA, 951 bp, Streptococcus pneumoniae
  CDS (1)...(951)
atgacaaaagaatttcatcatgtaacggtcttactccacgaaacgattgatatgcttgacgtaaaacctgacggtatctacgttgatgcgactttgggtggagcaggccatagcgagtatttattaagtaaattaagtgaaaaaggccatctctatgcctttgaccaggatcagaatgccattgacaatgcgcaaaaacgcttggcaccttacattgagaagggaatggtgacctttatcaaggacaacttccgtcatttacaggcacgtttgcgcgaaactggtgttcaggaaattgatggaatttgttatgacttgggagtgtctagtcctcaattagaccagcgtgagcgtggtttttcttataaaaaggatgcgccactggacatgcggatgaatcaggatgctagtctgacagcctatgaagtggtgaacaattatgactatcatgacttggttcgtattttcttcaagtatggagaggacaaattctctaaacagattgcgcgtaagattgagcaagcgcgtgaagtgaagccgattgagacaacgactgagttagcagagattatcaagttggtcaaacctgccaaggaactcaagaagaagggtcatcctgctaagcagattttccaggctattcgaattgaagtcaatgatgaactgggagcggcagatgagtccatccagcaggctatggatatgttggctctggatggtagaatttcagtgattacctttcattccttagaagaccgcttgaccaagcaattgttcaaggaagcttcaacagttgaagttccaaaaggcttgcctttcatcccagatgatctcaagcccaagatggaattggtgtcccgtaagccaatcttgccaagtgcggaagagttagaagccaataaccgctcgcactcagccaagttgcgcgtggtcagaaaaattcacaagtaa

SEQ ID NO: 9550 - DNA, 2514 bp, Streptococcus pneumoniae
  CDS (1)...(2514)
atggctaatattttaaaaacaattatcgaaaatgataaaggagaaatccgtcgtctggaaaagatggctgacaaggttttcaaatacgaagaccaaatggctgctttgactgacgaccaactaaaagcaaaaacagttgaatttaaggaacgttatcaaaatggagaatcactggattcattgctttacgaagcatttgcggttgtccgtgaaggtgccaaacgtgtcctaggtctcttcccttataaggttcaggtcatgggggggattgttcttcaccatggtgacgtgccagagatgcgtacaggggaagggaaaaccttaactgcgaccatgccggtatacctcaatgccctttcaggtaaaggggttcacgtagttacggttaatgaatacctgtcagaacgtgacgcgactgagatgggtgaattgtactcttggcttggtttgtcagtagggattaacttggctaccaaatctccaatggagaaaaaagaagcctatgagtgtgatattacttactcaactaactcagaaatcggatttgactaccttcgtgacaacatggtcgttcgcgctgaaaacatggtacaacgtccgcttaactatgccttggtcgatgaggttgactctatcttgattgacgaggctcgtacacctttgattgtatcaggtgccaatgcggttgaaaccagtcagttgtatcacatggcagaccactatgtaaaatctttgaacaaagatgactacatcatcgatgtgcagtctaagactattggtttgtctgattcagggattgacagggctgaaagctacttcaaacttgaaaacctctatgacatcgaaaacgtggctttgacccactttatcgataacgcccttcgtgccaactacatcatgcttctcgatattgactatgtggtgagcgaagagcaagaaatcttgattgtcgaccaatttacaggtcgtaccatggaaggtcgtcgttattctgatggattgcaccaagctattgaagccaaagaaggtgtgccaatccaggatgaaaccaagacatctgcctcaatcacgtaccaaaaccttttccgtatgtacaaaaaattgtctggtatgacgggtacaggtaagactgaggaagaagaatttcgtgaaatctacaacattcgtgttattccaatcccaacaaaccgtcctgttcaacgtattgaccactcagaccttctttatgcaagtatcgaatctaagtttaaagcggttgtcgaagacgttaaggctcgttaccaaaagggtcaacctgtcttggttggtacagtagcggttgaaactagtgactacatttctaagaaattggttgcagctggtgttcctcacgaagtcttgaatgccaaaaaccactatagagaagcccaaatcatcatgaatgctggtcaacgtggtgccgttaccatcgcaaccaacatggcgggtcgtggtaccgacatcaagcttggtgaaggtgttcgtgaacttggaggactttgtgttattggtacagaacgtcatgaaagtcgtcgtatcgataaccagcttcgtggacgttcaggtcgtcaaggagatccaggtgagtcacaattctacctatctcttgaagatgatttgatgaaacgttttggttctgaacgcttgaagggaatctttgaacgtctcaacatgtctgaagaggccattgagtctcgcatgttgacgcgtcaggttgaagcagctcagaaacgtgtcgaaggaaataactacgatacccgtaaacaagtccttcaatacgatgatgtcatgcgtgaacaacgtgagattatctatgctcaacgttacgatgtcatcactgcagatcgtgacttggcacctgaaattcagtctatgatcaaacgcacgattgaacgtgtcgttgatggtcatgcgcgtgccaaacaagatgaaaaactagaggcaattttgaactttgctaagtacaacttgcttcctgaagattctattacgatggaagacttgtcaggcttgtctgataaggccatcaaggaagagcttttccaacgttccttgaaggtttacgatagtcaggtttcaaaactacgcgatgaagaagcagttaaagaattccaaaaagttttgattctacgagtggtggataacaagtggacagatcatatcgatgcccttgatcaattgcgtaacgcggttggacttcgtggctatgctcagaacaaccctgttgttgagtatcaggcagaaggtttccgtatgtttaatgatatgattggttcgattgagtttgatgtgacacgcttgatgatgaaagcacaaattcatgaacaagaaagaccacaggcagaacgtcatatcagtacaacagcgactcgcaatatcgctgctcaccaagcaagtatgccagaagatttggatttgagccagattggacgcaatgaactttgcccatgtggttctggtaagaaatttaaaaactgtcacggtaaaagacaataa

SEQ ID NO: 9551 - DNA, 369 bp, Streptococcus pneumoniae; identical to SEQ ID NO: 9374
  CDS (1)...(369)

SEQ ID NO: 9552 - DNA, 1125 bp, Streptococcus pneumoniae
  CDS (1)...(1125)
gtgtcattttggaggaaaatcatgaaagctagtccacatagaccaaccaaggctctgattcatctgggagctattcgacaaaatattcagcaaatgggggctcatatccctcaaggaacgctcaagttggctgtggttaaggccaatgcttatggtcatggagctgttgccgttgccaaggcaattcaagatgatgttgatggcttttgcgtttccaatatcgatgaagccattgaactcagacaagctggactcagcaagccaatcctcattttaggagtttctgaaatcgaagctgttgctctagctaaagaatatgacttcaccttgacagtggctggactggagtggattcaagcactcttagataaggaagtggacctaactggattgacagtccacctcaagattgattcagggatgggacggattggttttagagaggcaagtgaggttgagcaggctcaagatttgctccaacaacacggtgtttgtgttgaaggaatctttacccactttgctactgctgatgaggaatcagatgactattttaatgcccagttagaacggtttaaaactattttagctagtatgaaggaagttccagagctggttcatgctagcaattctgcaacgactctttggcatgtagagactattttcaatgcggttcgtatgggagatgccatgtatggcctcaatccaagtggagcggtcttggatttgccttatgatttgataccggccttgaccttggagtctgctctggttcatgtcaagacagttccagctggagcttgcatgggctatggagcaacttatcaagcggatagcgagcaagtcatcgcgaccgtgccaatcgggtatgcagatggatggacaagagacatgcaaaatttctctgtcttggtagatggccaagcttgcccaattgtcggcagggtttcgatggaccaaatcactattcgattgcctaagctttatccgctaggaaccaaggtaaccttgattggctccaatggggataaggaaatcactgcaactcaggtagcgacctaccgcgtaaccattaactatgaggtggtttgcctcctcagcgaccgtattccgagagaatattattag

SEQ ID NO: 9553 - DNA, 1107 bp, Streptococcus pneumoniae
  CDS (1)...(1107)
atggaagaaattctctgtattggttgtggagcaaccattcagacgacagataaagctggtcttggttttaccccccagtcggcacttgaaaaaggtttggagactggcgaagtctattgccaacgctgtttccgtctccgccactacaatgaaatcacagatgtccagttgacggacgatgatttcctcaagctcttgcacgaggtgggagacagtgatgccttagtggtcaatgtcattgatatctttgattttaatggatctgtcatcccaggtttaccacgtttcgtctcgggcaatgatgtcctcttggtaggaaataaaaaagatatccttcctaagtcagttaagtctggtaagattagccagtggctcatgaaacgtgcccgtgaagaaggtcttcgtccagtcgatgtggtcctaacttcagcacaaaataaacatgccattaaggaagtcattgataagattgaacactaccgtaagggccgcgatgtctatgtggtcggtgtgaccaacgttggaaaatcaactctaatcaatgctattatccaagaaatcacgggtgatcagaatgtcatcactacttcacgcttcccagggacaaccttggacaaaatagagattccgcttgacgacggatcttatatttacgatacaccgggaattatccaccgccaccagatggctcactacttgacggccaaaaacctcaagtatgtcagtcctaaaaaggaaatcaagcctaagacctatcagcttaatcctgagcaaaccctatttttaggtggtttgggacgctttgactttatagcaggagaaaagcaaggatttactgctttctttgataatgaactcaaactccatcgtagcaagcttgaaggagctagtgctttctacgataagcacctgggaactcttctgacaccaccaaatagcaaggaaaaagaagatttcccaaggctagtccagcatgtctttaccattaaagataagacagacctagtcatctcaggcctaggctggattcgtgtaacaggcacagcaaaagtcgccgtttgggcaccagaaggcgtcgccgtcgtcacacgaaaagcaattatttaa

SEQ ID NO: 9554 - DNA, 1095 bp, Streptococcus pneumoniae
  CDS (1)...(1095)
atgagcaaggaattacacattaacacaattttagcacaagcagggatcaagtctgatgaggcaacaggtgctttggtgacaccacttcatttttcaacgacctatcagcatccagagtttggtcgatctactgggtttgactatacgcgcactaaaaatccaactcgtagtaaggctgaggaagtcttggcggctattgagtcagcagactatgccctagcgactagctcagggatgtcagctattgtactggcctttagcgtctttccagtaggaagtaaggtcttggcagtgcgtgatctttacggtggttcttttcgctggtttaaccaagtggagcaggaaggtcatttccattttacctatgccaatacagaagaagagttgattgccgagttagaaaaggatgtggatgttctctatatcgaaaccccaaccaatcccttgatgttggaatttgatatcgaaaaactagcaaaattggctcatgctaagggtgccaaagtggtggtggacaataccttctatagccctatctaccaacgtccgattgaagatggagcagatatcgttctccattcagcaaccaagtatctagcaggccacaatgatgtcttggctggagtggttgtgaccaatagtttagaactatacgagaagcttttttacaatcttaatacaacaggggcagtcttgtctccatttgacagctaccagttgcttcgtggtctcaagaccttgtctcttcgtatggagcgctcaacagctaacgcccaagaagtggttgcctttttgaaggattctccagcagttaaggaagttctctacactggtcgtggaggcatgatttcctttaaagtagccgatgaaacacgcattcctcatattttgaacagtctcaaggtcttctcttttgcggaaagtttgggtggagtggaaagtcttattacttatccaacgactcaaactcatgctgatattccagcagaagtacgccattcttatggtttgacagatgacctcttgcgtttgtctattgggattgaggatgctagagatttgattgcagatttgcgccaagccttagaaggataa

SEQ ID NO: 9555 - DNA, 1080 bp, Streptococcus pneumoniae
  CDS (1)...(1080)
aaaaaaacggaggagtgctttatgaaagcctatacttatgttaaaccaggacttgcttcttttgttgatgtagacaaaccagttattcgcaagccaacagacgctattgtgcgtattgtaaaaaccactatttgtggaacagacctccatattatcaaaggggatgttcctacttgccaaagtggtaccattcttggccacgaagggattgggattgttgaagaagttggggaaggagtttccaacttcaaaaaaggcgacaaggtcttgatttcttgcgtctgtgcctgtggtaaatgctactactgtaaaaaaggaatttatgcccactgtgaagacgaagggggctggattttcggtcacttgattgatggtatgcaggctgaatatctacgtgtccctcatgcagataatactctttaccatactccagaagacttgtcagatgaagctttggttatgctgtcagacattctgcctactggatatgaaattggtgtcttaaaagggaaagtagaacctggttgcagcgtagccattattggttcaggtccagttggattggctgctcttttaacagcccaattctattcaccagctaaattgattatggtagacctagacgataaccgcttggaaactgccctatcattcggtgcgactcataaggttaattcttcagaccctgaaaaagccattaaagaaatttatgatttgacagatggtcgtggtgtggatgtcgctatcgaagctgttggtattcctgcaacatttgatttctgtcaaaagattatcggtgtagacggaacggttgccaactgtggtgtgcatggtaaaccagttgaattcgatttagataaactttggattcgcaacatcaatgtaacaactggtttggtatctacaaatacgactccacaattgttgaaagcacttgaaagtcataagattgaaccagaaaaattggtaactcactatttcaaactcagtgaaattgaaaaagcctatgaagtcttcagtaaggcagcagaccaccatgccattaaggtcattatcgaaaacgatatctcagaagcctaa

SEQ ID NO: 9556 - DNA, 954 bp, Streptococcus pneumoniae
  CDS (1)...(954)
atggattttgaaaaaattgaacaagcttatacctatttactagagaatgtccaagtcatccaaagtgatttggcgaccaacttttatgacgccttggtggagcaaaatagcatctatctggatggtgaaactgagttaaaccaggtcaaagacaacaatcaaacccttaagcgtttagcactacgcaaagaagaatggctcaagacctaccagtttctcttgatgaaggctgggcaaacagaacccttgcaggccaatcaccagtttacaccggatgctattgctttgcttttggtgtttattgtggaagagttgtttaaagaggaggaaattactatcctcgaaatgggttctgggatgggaattctaggcgctactttcttgacctcgcttgataaaaaggtggattacttgggaatggaagtggatgatttgctgattgatctggcagctagcatggcagatgtaattggtttgcaggctggctttgtccaaggagatgccgttcgcccacaaatgctcaaagaaagcgatgtggtcatcagtgacttgcctgtcggctattatcctgatgatgccgttgcgtcgcgtcatcaagttgcttctagccaagaacatacttacgctcatcacttgctcatggaacaagggtttaagtaccttaagtcagatggatatgctatttttctagctccgagtgatttgttgaccagtcctcaaagtgatttgttgaaagtctggttgaaagaggaggcaagtctggttgctatgattagtttacctgaaaatctctttgctaatgctaaacaatctaagactatttttatcctacagaagaaaagtgaaatagcagtggagccttttgtttatccacttgctagcttgcaagatgcaagtgttttaatgaaatttaaagaaaattttcaaaaatggactcaaggtactgaaatataa

SEQ ID NO: 9557 - DNA, 861 bp, Streptococcus pneumoniae
  CDS (1)...(861)
atgaattgtgaagcagttgcccttgggtcgttttgcgagttgaagtcaagaagaggaaaaaaacaaaaaggagaaatactcatggcagtaatttcaatgaaacaacttcttgaggctggtgtacactttggtcaccaaactcgtcgctggaatcctaagatggctaagtacatctttactgaacgtaacggaatccacgttatcgacttgcaacaaactgtaaaatacgctgaccaagcatacgacttcatgcgtgatgcagcagctaacgatgcagttgtattgttcgttggtactaagaaacaagcagctgatgcagttgctgaagaagcagtacgttcaggtcaatacttcatcaaccaccgttggttgggtggaactcttacaaactggggaacaatccaaaaacgtatcgctcgtttgaaagaaattaaacgtatggaagaagatggaactttcgaagttcttcctaagaaagaagttgcacttcttaacaaacaacgtgcgcgtcttgaaaaattcttgggcggtatcgaagatatgcctcgtatcccagatgtgatgtacgtagttgacccacataaagagcaaatcgctgttaaagaagctaaaaaattgggaatcccagttgtagcgatggttgacaccaatactgatccagatgatatcgatgtaatcatcccagctaacgatgacgctatccgtgctgttaaattgatcacagctaaattggctgacgctattatcgaaggacgtcaaggtgaggatgcagtagcagttgaagcagaatttgcagcttcagaaactcaagcagattcaattgaagaaatcgttgaagttgtagaaggtgacaacgcttaa

SEQ ID NO: 9558 - DNA, 1041 bp, Streptococcus pneumoniae
  CDS (1)...(1041)
atggcagaaattacagctaaacttgtaaaagagttgcgtgaaaaatctggtgccggtgttatggacgctaaaaaagcgcttgtagaaacagacggtgacatcgaaaaagcgattgaattgcttcgtgaaaaaggtatggctaaggcagctaagaaagctgaccgtgttgctgcagaaggtttgactggtgtttatgttaacggtaatgttgcagcagttattgaagtaaacgctgaaactgacttcgttgcaaaaaacgctcaattcgttgaattggtaaatactacagctaaagtcattgctgaaggaaaacctgctaacaatgaagaagctcttgctttgataatgccttcaggtgaaactcttgaagctgcatacgtatctgcaacagcaactatcggagagaaaatctcattccgtcgctttgcattgattgaaaaaacagacgcacaacactttggagcataccaacataacggtggacgtatcggtgttatttcagttgttgaaggtggagacgaagcacttgctaaacaattgtcaatgcacatcgcagcgatgaaaccaacagttctttcttacaaagaattggatgagcaattcgttaaagatgagttggcacaattgaatcacgttatcgaccaagacaacgaaagccgtgcaatggttaataaaccagctcttccacacttgaagtatggatcaaaagctcaattaactgatgatgttattgctcaagctgaagctgacatcaaagctgaattggctgcagaaggcaaaccagaaaaaatctgggacaaaattattccaggtaaaatggatcgcttcatgcttgataacactaaagttgaccaagcttacacacttcttgcacaagtttacatcatggatgacagcaagacagttgaagcataccttgaatcagttaacgcttcggtagttgagtttgctcgctttgaagttggtgaaggtatcgagaaagctgcaaacgacttcgaagctgaagttgcagctacaatggcagcagccttgaataactaa

SEQ ID NO: 9559 - DNA, 921 bp, Streptococcus pneumoniae
  CDS (1)...(921)
atgtctatttataacaacattactgaattaatcggtcaaacaccaattgttaaacttaacaacatcgtgccagaaggtgctgcagacgtctatataaagcttgaagcatttaatcctggttcatctgtaaaagaccgtattgcccttagcatgattgaaaaagctgaacaagatggtattctgaaacctggttctactattgttgaagcaacaagtggaaacactggtattggactttcatgggtaggtgctgctaaagggtataaagtcgtcatcgttatgcctgaaactatgagtgtagaacgacgtaaaattatccaagcttatggtgctgaactcgtcctaactcctggtagcgagggaatgaaaggtgctattgctaaggctcaagaaatcgctgctgaacgtgatggtttccttcctcttcaatttgacaatccagctaatccagaagtacacgaaagaacaacaggagctgagatactagctgctttcggtaaagatggattagatgcctttgttgctggagtaggtaccggtggaacgatttctggtgtttctcatgcactcaaatcagaaaattctaacattcaagtttttgcagtagaagcagatgaatctgctattctatctggtgaaaaacctggtcctcacaaaattcaaggtatctcagctggatttattcctgatacacttgatactaaagcctatgatggtatcgttcgtgtaacatcagatgacgctcttgcactcggacgtgaaattggtggaaaagaaggcttccttgtagggatttcctcagctgcagctatctacggagccattgaggttgccaaaaaattaggtacaggtaaaaaagtccttgccctagcaccagataacggtgaacgttatctctctacagcactttatgaattgtaa

SEQ ID NO: 9560 - DNA, 1008 bp, Streptococcus pneumoniae
  CDS (1)...(1008)
atgaaaaggacctggaggaactcattcgtgacaaatcttaatacaccttttatgattggcaatgttgagattcccaatcgtaccgttttagcgcctatggctggcgtgaccaactcagcctttcgtaccattgcaaaagagctcggagctggactcgttgtaatggaaatggtctctgacaagggaatccaatacaacaacgaaaaaaccctgcacatgcttcatatcgatgagggcgaaaaccctgtctctatccaactttttggtagcgatgaagacagcctagcacgcgcagcagaatttatccaagaaaacactaagaccgatatcgtcgatatcaacatgggctgccctgtcaacaaaatcgtgaagaacgaagctggtgctatgtggctcaaggatcctgacaagatctactctatcatcaacaaggtccagtctgtccttgatatcccacttactgtcaaaatgcgtaccggctgggcggacccatctctggcagtagagaatgccctcgctgctgaggctgcaggtgtttctgccctcgccatgcatggccgtacccgtgaacaaatgtatactggccacgcagaccttgagaccctttacaaggttgcccaagctctaaccaagattccattcatcgccaacggtgatatccgtactgtccaagaagccaagcaacgcatcgaagaagttggtgctgacgcagtcatgattggccgagctgccatgggaaatccttacctcttcaaccaaatcaaccattactttgaaacaggagaaatcctacctgatttgacctttgaagacaagatgaagatcgcctacgaacacttgaaacgattgattaacctcaaaggagaaaacgtcgcagttcgtgaattccgcggcctcgctcctcactacctccgtggaacatctggcgctgccaaactccgtggagccatttcgcaagctagcaccctggcagagattgaagccctcttgcaattggagaaggcttaa

SEQ ID NO: 9561 - DNA, 873 bp, Streptococcus pneumoniae
  CDS (1)...(873)
atggataaaattattaaaactatatcagaaagcggagcctttcgtgcttttgtccttgatagcactgaaaccgtccgcactgctcaagaaaaacatcaaacccaagctagctcaactgtagcgcttggtcgaactcttatcgccagccagattctcgcagccaatgaaaaaggaaataccaaacttacagttaaggtgttgggctctagctctctaggtgctattatcaccgtcgctgataccaaggggaacgtcaaaggctatgttcaaaatcctggtgttgacatcaaaaagactgcgactggtgaagtcctagtcggaccttttgttggaaatggtcaattccttgttatcacagactacggtactggaaatccttacaactctataactcccctcatctctggagaaatcggtgaagaccttgccttttaccttactgaaagccaacaaacgccttcagcggtcggcctcaatgtccttttggacgaggaagacaaggtcaaggttgcaggtggtttcctagttcaagtcttgccaggagccaagaaagaagagattgctcgctttgaaaaacgcatccaagaaatgccagctatctctactcttctcgaaagcgacgaccatatcgaagccctcctcaaggctatctacggtgacgaggcctacaagcgtctttctgaagaagaaatccgtttccaatgtgactgtagccatgaacgctttatgaacgctcttgccagccttccaagctcagacttacaggaaatgaaagaggaagaccacggggcagaaatcacttgtcaattctgccaaactacttacaactttgatgaaaaggacctggaggaactcattcgtgacaaatcttaa

SEQ ID NO: 9562 - DNA, 1509 bp, Streptococcus pneumoniae
  CDS (1)...(1509)
atgtcacaagaaaaatacatcatggccattgaccagggaactacaagttctcgtgccatcattttcaacaaaaaaggggaaaaggttagctcgagtcaaaaagagtttacccagattttccctcaggcaggttgggttgagcacaatgccaatgaaatttggaactctgttcagtcagttattgcgggtgctttcatcgaaagtggtgtcaagccaaatcaaatcgaggcaatcgggattaccaaccaacgtgaaacaacggttgtctgggataagaaaacaggacttcctatctacaatgctatcgtttggcagtcacgccagacagcacctttggctgagcaactaaaaaaccaaggttatgtggaaaaattccatgaaaagactggtttgattattgatgcttacttctctgctaccaaggttcgttggattttggatcatgtagaaggcgctcaagagcgagcagaaaaaggggaattgctctttggtactatcgatacttggttggtttggaaattgactgacggtgcggctcacgtgactgactactcaaatgcagctcgtaccatgctttataacattaaagaactcaaatgggatgatgaaattttggaaatccttaacattccgaaggctatacttccagaagttcgttctaactccgaaatctacggcaagacagctccattccatttctacggtggagaggtgccaatctcaggtatggctggggaccaacaagcagccctctttggacagttggcttttgagccaggtatggttaagaatacttatggaacaggctctttcatcatcatgaatactggggaagagatgcagttgtctgaaaacaacctcttgacaaccattggttacggaatcaacggtaaggtttattatgccttggaaggttctatcttcatcgcaggaagtgctattcagtggcttcgtgacggtcttcgcatggttgaaaattcaccagaatctgaaaaatacgctcgtgattctcacaacaacgatgaagtttatgtcgttccagcctttacaggtctaggcgctccatactggaaccaaaatgctcgtggttccgtctttggtttgactcgtggaacaagcaaagaagactttatcaaggcgactttgcaatctattgcttatcaagtgcgtgacatcatcgacaccatgcaagtggatactcagaccgccattcaagtactgaaggtggatggtggtgcagccatgaacaacttcctcatgcaattccaggcggatattttaggcattgacattgcacgtgctaaaaacttggaaacaacagctctaggagcggccttcctagcaggtttgtcagtagggtactggaaagacttggacgagttgaaactcttgaacgagacaggagaactctttgagccatctatgaatgaatctcgcaaggaacaactctacaagggctggaagaaggctgtgaaagcaactcaagtctttgcggaagtagacgactaa

SEQ ID NO: 9563 - DNA, 2259 bp, Streptococcus pneumoniae
  CDS (1)...(2259)
atgctttgtcaaaactgtaaaattaacgactcaacaattcatctttacaccaatctcaatggaaaacaaaaacaaattgacctctgtcaaaactgctataagattatcaaaacagatcctaacaatagcctcttcaaaggtatgacggatctgaacaatcgtgacttcgatccctttggtgatttcttcaatgatctaaacaatttcagaccttctagcaatactcctcctattcccccaacccaatcaggtggaggttacggtggaaacggcggttatggttcccaaaatcgtggatctgctcaaactccgccacctagccaagaaaaaggcctgctggaagaatttggtattaatgtaactgaaattgcccgtcgtggagacattgaccccgttattgggcgcgacgatgagattatccgtgtcatcgagattctcaatcgtagaaccaagaataatcctgtccttatcggtgaacctggtgtcggaaaaacggccgttgtcgaaggtctagctcagaaaattgtcgatggcgatgtgccacataaactccaaggtaaacaagtcatccgtctggatgtggttagcttagttcaaggaacggggattcgaggacaatttgaagaacgcatgcaaaaactcatggaagaaattcgcaaacgtgaagacatcatcctctttatcgatgaaatccatgaaattgttggtgctggttctgcgagtgatggtaatatggacgcaggaaatatcctcaagccagcccttgctcgtggagaactgcaactagtcggtgctactaccctcaatgaataccgtatcattgaaaaggatgctgccctcgagcgtcgtatgcagcctgttaaagtcgatgaaccaacggtggatgaaacaatcactattctcaaagggattcaaaagaaatacgaagattaccaccacgttcaatataccgatgctgcgattgaagcagctgcaactctttccaatcgctacatccaagatcgcttcttgcctgacaaggccattgacctcctagatgaagctggttctaagatgaacttgaccttgaattttgtggatcctaaagtaattgatcagcgcttgattgaggctgaaaatctcaagtctcaagctacacgagaagaagattttgagaaggcggcctacttccgcgaccagattgccaagtataaggaaatgcaaaagaaaaagatcacagaccaggatactcctatcatcagcgagaaaactattgagcacattatcgagcagaaaaccaatatccctgttggtgatttgaaagagaaagaacaatctcaactcatccatctagccgaagatctcaagtctcatgttattggccaagatgatgcagtcgataagattgccaaggctattcgccgtaatcgtgtcggacttggtacccctaaccgcccaatcggaagcttcctcttcgttggaccaactggtgtcggtaagacagaactttccaaacaactggctatcgaactttttggttctgctgatagtatgattcgctttgatatgagtgaatacatggaaaaacatagtgtggctaagttggtcggcgctcctccaggttatgttggctatgatgaggctggtcaattaactgaaaaagttcgccacaatccgtattctctcatccttctcgatgaagtggaaaaagctcacccagatgttatgcacatgtttcttcaagtcttggacgatggtcgtttgacagacgggcaaggacgcaccgttagcttcaaggatgccatcattatcatgacctcaaatgcaggtacaggaaagaccgaagctagcgttggatttggtgctgctagagaaggacgtaccaattctgtcctcggtgaactcggtaacttctttagcccagagtttatgaaccgttttgatggcattatcgaatttaaggctctcagcaaggataacctccttcagattgtcgagctcatgctagcagatgttaacaagcgcctctctagcaacaacattcgtttggatgtaactgataaggtcaaggaaaagttggttgacctaggttatgatccaaaaatgggagcacgcccacttcgtcggactattcaagactatattgaggacacaatcactgactactaccttgaaaatccaagcgaaaaagatctcaaagcagttatgactagcaagggaaacattcagattaaatctgccaaaaaagctgaagttaaaagttctgaaaaagaaaaataa

SEQ ID NO: 9564 - DNA, 1137 bp, Streptococcus pneumoniae
  CDS (1)...(1137)
atgagtaaagaaatgctagaggccttccgcattttggaagaagacaagggaatcaaaaaagaagatatcatcgacgcagtagtagagtcgcttcgttccgcttatcgcagacgctatggtcagtcagacagcgtagctattgacttcaacgaaaaaacaggtgactttacagtttatactgtccgtgaagttgttgatgaagtatttgatagccgtttggaaatcagcttgaaagatgctcttgccattaattcagcttatgaacttggagacaaaatcaagtttgaagaagcaccagctgagtttggtcgtgtagcagcccagtctgccaaacaaaccatcatggaaaaaatgcgcaagcaaacacgtgccatcacttacaatacttacaaagaacatgagcaagaaatcatgtctggtacagtagaacgctttgacaaccgctttatctatgtcaaccttggtagcatcgaagcccaattgtcaaaacaagaccaaattcctggagaagtttttgcttctcatgatcgtatcgaagtttatgtttacaaggttgaagacaaccctcgtggtgtgaacgtctttgttagccgtagtcatccagaaatgatcaaacgtttaatggagcaagaaattccagaagtttatgatggaactgttgaaatcatgagcgtggctcgtgaagcaggtgaccgtacgaaggttgctgttcgtagccacaatccaaacgtggatgctatcggtacaatcgttggacgtggtggtgctaatatcaagaagattactagcaaattccacccagctcgttacgatgctaaaaatgaccgcatggtaccaatcgaagaaaatatcgatgttatcgagtgggtagcagatccagctgaatttatctacaatgccatcgctcctgctgaggttgaccaagttatctttgatgaaaacgacagcaaacgtgccttggtggttgttccagataacaagctttctcttgccattggtcgtcgtggacaaaacgtgcgcttggcggctcacttgactggttaccgtatcgatatcaagtctgctagcgaatttgaagccatggaagacgctgcttcagtagagttggaagtagaaaacgatactgtagaagaataa

SEQ ID NO: 9565 - DNA, 2703 bp, Streptococcus pneumoniae
  CDS (1)...(2703)
gtgaaaagccactcatcaagtgtggaagaagctgtcgctgcaaaaattgctgccagctttaagcctgcagctgctccgaaagtagaagcaaaacctgcagcaccaaaagtaagtgcagaaaagaaagccgaaaaatctgagccagctaaaccagctgtagctaaggaagaggcaaaaccggctgagccagttgctccgaaaacagaaaaagtagcagtgaaaccgcaaagtcgtaatttcaaggctgagcgtgaagcccgtgctaaagagcaggcagaacgacgcaagcaaaataagggcaataaccgtgaccaacaacaaaacggaaaccgtcagaaaaacgacggccgtaatggtggaaaacaaggtcaaagcaaccgcgacaatcgtcgctttaatgaccaagctaagaagcagcaaggtcagcaaaaacgtagaaatgagcgccgtcagcaagaggataaacgttcaaatcaagcggctccacgtattgactttaaagcccgtgcagcagccctaaaagcagagcaaaatgcagagtacgctcgttcaagtgaggaacgcttcaagcagtatcaggctgctaaagaagccttggctcaagctaacaaacgcaaggaaccagaggaaatctttgaagaagcggctaagttagctgaacaagcacagcaagttcaagcagtggttgaagtcgtccctgagaaaaaagaacctgcagtggatacacgtcgtaaaaaacaagctcgaccagacaaaaatcgtgacgattatgatcatgaagaagatggtcctagaaaacaacaaaagaatcgaagtagtcaaaatcaagtgagaaatcaaaagaatagtaactggaataacaacaaaaagaacaaaaaaggcaataacaagaacaaccgtaatcagactccaaaacctgttacggagcgtaaattccatgaattgccaacagaatttgaatatacagatggtatgaccgttgcggaaatcgcaaaacgtatcaaacgtgaaccagctgaaattgttaagaaacttttcatgatgggtgtcatggccacacaaaaccaatccttggatggggaaacaattgaactcctcatggtggattacggtatcgaagccaaacaaaaggttgaagtggataatgctgacatcgaacgtttctttgtcgaagatggttatctcaatgaagatgaattggttgagcgtccaccagttgttactatcatgggacacgttgaccacggtaaaacaacccttttggatactcttcgtaactcacgtgttgcgacaggtgaagcaggtggtattactcagcatatcggtgcctaccaaatcgtggaaaatggtaagaagattaccttccttgatacaccaggacacgcggcctttacatcaatgcgtgcgcgtggtgcttctgttaccgatattacgatcttggtcgtagcggcagatgacggggttatgcctcagactattgaagccatcaaccactcaaaagcagctaacgttccaatcatcgtagctattaacaagattgataaaccaggtgctaacccagaacgcgttatcggtgaattggcagagcatggtgtgatgtcaaccgcttggggtggagattctgaatttgttgaaatctcagctaaattcaaccaaaatatcgaagaattgttggaaacagtccttcttgtagctgaaatccaagaactcaaggcagacccaacagtgcgtgcaatcggtacggttatcgaagcgcgcttggataaaggaaaaggtgcggtcgcaacccttcttgtacaacaaggtaccttgaatgttcaagatccaatcgttgtcggaaataccttcggtcgtgtccgtgctatgaccaacgaccttggtcgtcgtgttaaagttgctggaccatcaacaccagtctctatcacaggtttgaacgaagcaccgatggcgggtgaccactttgccgtttacgaggatgaaaaatctgcgcgtgcagcaggtgaagagcgtgccaaacgtgccctcatgaaacaacgtcaagctacccaacgtgttagccttgaaaacctctttgatacccttaaagctggggaactcaaatctgttaatgttatcatcaaggctgatgtacaaggttctgttgaagccctttctgcctcacttcaaaagattgacgtggaaggtgtcaaagtgactatcgtccactcagcggtcggtgctatcaacgaatcagacgtgacccttgccgaagcttcaaatgcctttatcgttggtttcaacgtacgccctacaccacaagctcgtcaacaagcagaagctgacgatgtggaaatccgtcttcacagcattatctacaaggttatcgaagagatggaagaagctatgaaagggatgcttgattcagaatttgaagaaaaagttattggtgaagcggttatccgtgaaaccttcaaggtgtctaaagtgggaactatcggtggatttatggttatcaacggtaaggttgcccgtgactctaaagtccgtgttatccgtgatggtgtcgttatctatgatggcgaactcgcaagcttgaaacactacaaagacgacgtgaaagaagtgacaaacggtcgtgaaggtggattgatgatcgacggctacaatgatattaagatggatgatgtgattgaggcgtatgtcatggaagaaatcaagagataa

SEQ ID NO: 9566 - DNA, 672 bp, Streptococcus pneumoniae
  CDS (1)...(672)
atgaatgtaaaagaaaatacagaacttgtttttcgagaagttgcagaggctagtctgagtgctcatcgagagagtggttcggtctctgtcattgcagttaccaagtatgtagatgtaccgacagcggaagccttgcttccgctaggtgttcatcatatcggtgaaaatcgtgtagataagtttctggaaaaatatgaagctttaaaagatcgagatgtgacttggcatttgattggtaccttgcaaagacgtaaggtgaaagatgtcattcaatacgttgattatttccatgcattggactcagtaaagctagcaggggaaattcaaaaaagaagtgaccgagtcatcaagtgtttccttcaagtaaatatttctaaagaagaaagcaaacacggtttttcgagagaggaactgctggaaatcttgccagagttagccagactagataagattgaatatgttggtttaatgacgatggcaccttttgaggctagcagtgagcagttgaaagagattttcaaggcggcccaagatttacaaagagaaattcaagagaaacaaattccaaatatgcctatgaccgagttaagtatgggaatgagtcgtgattataaagaagcgattcaattcggttccacttttgttcgtataggtacatcattttttaagtag

SEQ ID NO: 9567 - DNA, 801 bp, Streptococcus pneumoniae
  CDS (1)...(801)
gtgaggaatagaatgccaattacatcattagaaataaaggacaagacttttggaactcgattcagaggttttgatccagaagaagtcgatgaatttttagatattgtggttcgtgattacgaagatcttgtgcgtgcgaatcatgataaaaatttgcgtattaagagtttagaagagcgtttgtcttactttgatgaaataaaagattcattgagccagtctgtattgattgctcaggatacagctgagagagtgaaacaggcggcgcatgaacgttcaaacaatatcattcatcaagcagagcaagatgcgcaacgcttgttggaagaagctaaatataaggcaaacgagattcttcgtcaagcaactgataatgctaagaaagtcgctgttgaaacagaagaattgaagaacaagagccgtgtcttccaccaacgtctcaaatctacaattgagagtcagttggctattgttgaatcttcagattgggaagatattctccgtccaacagctacttatcttcaaactagtgatgaagcctttaaagaagtggttagcgaagtacttggagaaccgattccagctccaattgaagaagaaccaattgatatgacacgtcagttctctcaagcagaaatggaagaattacaagctcgtattgaggtagccgataaagaattgtctgaatttgaagctcagattaaacaggaagtggaaactccaactcctgtagtgagtcctcaagttgaagaagagcctctgctcatccagttggcccaatgtatgaagaaccagaagtag

SEQ ID NO: 9568 - DNA, 1236 bp, Streptococcus pneumoniae
  CDS (1)...(1236)
atggattttagcagaaaggataatcagtcaatggaatatcgaaaaatacaagaagcattagaagcattgcagaagggacgacttgttcttgttatagacgacaaggatagagaaaatgaaggagacttaatttgttctgcacaagcagctacaacagaaaatgttaattttatggctacttatgccaaaggattaatttgtatgcctatgagcgaaagtttagctaatcaattaatgctttcacctatggttgaaaacaatacagataatcataagactgcttttacagtttcaattgattataaagaaacgaccacaggtatttctgccgaggaaagaggactgaccgcacgtatgtgtgtagctgaagatataacaccctctgattttcgcaggccaggacacatgtttcctttaattgcaaaaaaaggtggtgttctagaaagaaatggacacacagaagcaactgttgatttattaaaattagctggactaaaagagtgtggcctatgttgtgaaataatgaatcatgatggcaaaatgatgagaacagatgatttaattcagttctcgaagaaacacaacattccactaattaccatcaaagaattacaagaatatagaaaagtatatgatcagctggtagaacgagtttcaactgtcaatatgcctactagatacggtaatttcaaagcaattagctatatagataaactaaatggggaacatcatcttgctcttattatgggaaacatagaggatgaagccaatgtattatgtcgggtccactccgaatgtttaacaggagatgttttaggctctttacgttgcgattgtggacagcaattcgataaagctatgaaaatgattgttgagaatggttcgggtgtcttactttacttgcgacaggagggacgaggaattggacttatcaataaattaaaagcctatcatttacaagatcaaggcatggatacgcttgatgccaatcttgcattaggctttgaaggtgatttaagagaatatcatattggagcacaaatgcttaaagatctgggacttcagtcacttcatttactgacaaataatcctgacaaggttgaacagttagaaaaatatggaattaccatttccagtagaatatcaatcgaaatagaagccaatccttacgatagtttttatttagaaacaaagaaaaatcgaatgggtcacattttaaatatggaggaaaaataa

SEQ ID NO: 9569 - DNA, 1950 bp, Streptococcus pneumoniae
  CDS (1)...(1950)
atgtctcatattattgaattgccagagatgctggcaaaccaaatcgcagctggggaggtcattgaacgtcctgccagtgtggttaaagagttggtagaaaatgccattgacgcgggctctagtcagattatcattgagattgaggaagctggtctcaagaaggttcaaatcacggataacggtcatggaattgcccacgatgaggtggagttggccctgcgtcgccatgcgaccagtaagataaaaaatcaagcagatctctttcggattcggacgcttggttttcgtggtgaagccttgccttctattgcgtctgttagtgtcttgactctgttaacggcggtggatggtgctagtcatggaaccaagttagtcgcgcgtgggggtgaagttgaggaagtcatcccagcgactagtcctgtgggaaccaaggtttgtgtggaggatctctttttcaacacgcctgcccgtctcaagtatatgaagagccagcaagcggagttgtctcatatcattgatattgtcaaccgtctgggcttggcccatcctgagatttcttttagcttgattagtgatggcaaggaaatgacgcggacagcagggactggtcaattgcgccaagcaatcgcagggatttacggtttggtcagtgccaagaagatgattgaaattgagaactctgacctagatttcgaaatttcaggttttgtgtctttacctgagttgactcgggctaaccgcaattatatcagcctcttcatcaatggccgttatatcaagaacttcctgctcaatcgtgctattttggatggtttcggaagcaagcttatggttggacgttttccactggctgtcattcacatccatatcgacccttatctagcggatgtcaatgtgcatccaactaagcaagaggtgcggatttccaaggaaaaagaactgatgaccctggtttcagaagctattgcaaatagtctcaaggaacaaaccttgattccagatgccttggaaaatcttgccaaatcgaccgtgcgcaatcgtgagaaggtggagcaaactattctcccactcaaagaaaatacgctctactatgagaaaactgagccgtcaagacctagtcaaactgaagtagctgattatcaggtagaattgactgatgaagggcaggatttgaccctgtttgccaaggaaaccttggaccgattgaccaagccagcaaaactgcattttgcagagagaaagcctgctaactacgaccagctagaccatccagagttagatcttgctagcatcgataaggcttatgacaaactggagcgagaagaagcatccagcttcccagagttggagtttttcggacaaatgcacgggacttatctctttgcccaagggcgagatggactttacatcatagatcagcacgctgctcaggaacgggtcaagtacgaggagtaccgtgaaagcattggcaatgttgaccagagtcagcagcaactcctagtgccctatatctttgaatttcctgcggatgatgccctgcgtctcaaggaaagaatgcctctcttagaggaagtgggcgtctttctagcagagtacggagaaaatcaatttattctacgtgaacatcctatttggatggcagaagaagagattgaatcaggcatctatgagatgtgcgacatgctccttttgaccaaggaagtttctatcaagaaataccgagcagagctggctatcatgatgtcttgcaagcgatctatcaaggccaatcatcgtattgatgatcattcagctagacaactcctctatcagctttctcaatgtgacaatccctataactgtcctcacggacgtcctgttttggtgcattttaccaagtcggatatggaaaagatgttccgacgtattcaggaaaatcacaccagtctccgtgagttggggaaatattaa

SEQ ID NO: 9570 - DNA, 4377 bp, Streptococcus pneumoniae
  CDS (1)...(4377)
atgtcaaatagttttgaaattttgatgaatcaattggggatgcctgctgaaatgagacaggctcctgctttagcacaggccgatattgagcgagttgtggttcataaaattagtaaggtatgggagtttcatttcgtattttctaatattttaccgattgaaatctttttagaattaaagaagggtttgagggaagaattttctaagacagggaataaagctattttcgaaatcaaggttctgtctcaagaattttcaaatcaactcttacaagcctattatagagaggttttttctgaagggccgtgtgctagtcaaggctttaaatctctttatcagaatttgcaagttcgtgcggaggacaatcaactctttattgaaggctcagaggcgattgataaggaacactttaagaaaaatcatctgcctaatttagctaaacaacttgaaaaatttggttttccagcttttaactgtcaggtcgagaagaatgatgtgctgacccaagagcaggaagaggccttttatgctgaaaatgagcagattgttcaagctgccaacgaggaagcgctccgtgctatggagcaactggaacagatggcacctcctccagcggaagagaaaccagcctttgattttcaggccaaaaaagctgaagctaaaccaaagctggacaaggcggagattactcctatgatcgaagtgacgacggaggaaaatcgtctggtctttgaaggggttgtttttgatgtggagcaaaaagtgaccagaacagggcgtgttttgatcaactttaaaatgacggactacacttcaagtttttcgatgcaaaagtgggttaagaacgaggaagaggctcagaagtttgatttaatcaagaaaaactcttggcttcgagtccgtgggaatgtggagatgaataacttcacacgcgatttgactatgaatgtgcaggatgtgcaggaagttgttcactatgagcggaaggatttgatgccagaaggtgagcgccgggttgagtttcatgctcatactaatatgtcgaccatggatgctctaccagaggtagaagaaatcgttgcaacagctgctaagtggggacacaaggcggttgccatcacggaccatgggaatgtccagtccttcccacatggctataaggcggctaagaaagcgggaatccagctgatctatggtatggaagctaatatcgtggaggaccgtgtccctatcgtctataacgaagtagagatggacttgttagaagcgacctacgtggtctttgacgtggaaacgacggggctttcagccatctataatgacttgattcaggttgcggcttctaagatgtacaaggggaatgttattgccgaatttgatgaatttatcaatcctgggcatcccttgtcagcttttactactgagttgaccggaattacagatgatcatgtaaaaaatgctaaaccactagaacaagttttgcaagaattccaagaattctgcaaggatactgtcctagtcgcccacaatgcgacctttgacgttggctttatgaatgccaattatgagcgtcatggtctgccaaagattagtcagccagttattgatacacttgagtttgctagaaatctctatcctgagtataaacgtcatggtttggggcctttgaccaagcgttttggtgtggccttagaacatcaccacatggccaactacgatgcggaagctacaggtcgcctgcttttcatctttatcaaagaggtggcagaaaaacatggtgtgaccgatctagctagactcaacattgatttgattagtccagattcttataaaaaagctcgcatcaagcatgcgaccatttatgtcaagaatcaagtagggctaaaaaatatctttaagctggtttccttgtctaataccaagtactttgaaggagtgccacggattccaagaacggttctagatgctcatcgggaaggtttgattttaggttcagcttgctctgaaggtgaagtttttgatgcagtcgtttcccagggcgtggatgcggcggttgaggtggccaagtattatgactttatcgaggtcatgcccccagctatctatgctcccttgattgccaaggagcaggtcaaggatatggaggaactccagaccattatcaagagtttgatagaagttggagaccgtcttggtaaacccgttctggctaccggaaatgttcactatatcgaaccggaagaagagatttaccgtgaaattatcgtccgtagtttgggacagggggcgatgattaaccgaactattggtcatggcgaacatgcccaacccgctcctcttccaaaagctcattttagaacgactaatgaaatgttggatgaatttgccttcttgggagaggaattagctcgcaaattggttattgaaaataccaatgccttggcagatatctttgaacctgttgaggtagttaagggtgacttgtatacgcctttcatcgacaaggcggaagaaacggtcgctgaattgacctataagaaggcctttgagatttatggtaatccgctgccagatatcgttgatttgcggattgaaaaagaactaacctctattctggggaatggatttgctgtgatttatctggcctcgcagatgctggttcaacgttccaatgaacggggctacttggttggttctcgtgggtctgtcggatctagtttcgttgcgaccatgattgggattacagaggtcaatcctctctctcctcactatgtctgtggtcagtgtcagtacagcgagtttatcaccgatggttcttatggttcaggttttgatatgcccaataaggactgtccaaactgtggtcataaactcagcaaaaacggacaggatattcctttcgagaccttccttggttttgatggggataaggttcctgatattgacttgaacttctcgggagaagatcagcctagcgcccacttggatgtgcgtgatatctttggtgaagaatatgccttccgtgcaggaacggttggtacggtagctgctaaaactgcttatggctttgtaaagggctatgagcgagattatggcaagttttatcgtgatgcagaggtggaacgtcttgctcaaggtgcggctggtgtcaagcggacaacgggacaacacccggggggaatcgttgttattcctaactacatggatgtttacgattttacgcctgtccagtatccagcagatgacgtgacggctgaatggcagaccactcactttaactttcacgatatcgatgagaacgttctcaaactcgatgtgctggggcatgatgatccgaccatgattcggaaactgcaggatttgtctgggattgatcctaatgaaatccctatggatgatgaaggtgtgatggctctcttttctgggactgacgtgcttggggtaacacctgaacaaatcggaacgccaacgggcatgctgggaattccagagtttggaaccaactttgtacgtgggatggtagatgagacgcatccgacgacctttgcggagttgcttcagctgtctggattatcccatggtaccgatgtctggttgggaaatgctcaggatttaatcaagcaagggattgcggatctatcgaccgttatcggttgtcgggacgacatcatggtttacctcatgcatgctggtctagaacctaagatggcctttactatcatggaacgggtacgtaagggcttgtggttgaagatttcagaagaggaacgaaatggctatatcgaagccatgaaagctaacaaggtgccagagtggtatatcgaatcctgtgggaaaatcaagtatatgttccctaaagcccatgcggcagcctacgttatgatggccttgcgtgtggcctacttcaaggttcaccatcccatttattactactgtgcttacttctcaatccgcgccaaggcttttgatatcaagaccatgggagcaggcttggatgctattaagcgtagaatggaagaaatctctgaaaaacggaagaacaatgaagcctctaatgtggaaattgacctctatacaacccttgagattgtcaatgaaatgtgggaacgcggtttcaagtttgggaagttagacctctaccgtagtgatgcgactgaattcatcattgacggagatacgctgattccaccatttgtagcaatggatggtctgggagagaacgttgccaagcaattggtgcgagcgcgagaagagggagaatttctctctaaaacagaactacgcaagcgtggtggactctcatcaaccttggttgaaaagatggatgaaatggggattctgggcaatatgccagaggacaatcagttgagtttgttt

SEQ ID NO: 9571 - DNA, 954 bp, Streptococcus pneumoniae
  CDS (1)...(954)
atggatagagagcctgtaacagtacgttcctacgcaaatattgctattatcaaatattggggaaagaaaaaagaaaaagagatggtgcctgctactagcagtatttctctaactttggaaaatatgtatacagagacgaccttgtcgcctttaccagccaatgtaacagctgacgaattttacatcaatggtcagctacaaaatgaggtcgagcatgccaagatgagtaagattattgaccgttatcgtccagctggtgagggctttgtccgtatcgatactcaaaacaatatgcctactgcagcgggcctgtcctcaagttctagtggtttgtccgccctggtcaaggcttgtaatgcttatttcaagcttggattggatagaagtcagttggcacaggaagccaaatttgcctcaggctcttcttctcggagtttttatggaccactaggagcctgggataaggatagtggagaaatttaccctgtagagacagacttgaaactagctatgattatgttggtgctagaggacaagaaaaaaccaatctctagccgtgacgggatgaaactttgtgtggaaacctcgacgacttttgacgactgggttcgtcagtctgagaaggactatcaggatatgctgatttatctcaaggaaaatgattttgccaagattggagaattaacggagaaaaatgccctggctatgcatgctacgacaaagactgctagtccagccttttcttatctgacggatgcctcttatgaggctatggactttgttcgccagcttcgtgagaaaggagaggcctgctactttaccatggatgctggtcccaatgttaaggtcttctgtcaggagaaagacttggagcatttatcagaaattttcggtcatcgttatcgcttgattgtgtcaaaaacaaaggatttgagtcaagatgattgctgttaa

SEQ ID NO: 9572 - DNA, 1008 bp, Streptococcus pneumoniae
  CDS (1)...(1008)
atgattgctgttaaaacttgcggaaaactctattgggcaggtgaatatgctattttagagccagggcagttagctttgataaaggatattcccatctatatgagggctgagattgctttttctgacagctaccgtatctattcagatatgtttgatttcgcagtggacttaaggcctaatcctgactacagcttgattcaagaaacgattgctttgatgggagacttcctcgctgttcgtggtcagaatttaagacctttttctctagaaatctgtggcaaaatggaacgagaagggaaaaagtttggtctaggttctagtggcagcgtcgttgtcttggttgtcaaggctttactggctctgtatgatgtttctgttgatcaggagctcttgttcaagctgactagcgctgtcttgctcaagcgaggagacaatggttccatgggcgaccttgcctgtattgtggcagaggatttggttctctaccagtcatttgatcgccagaaggtggctgcttggttagaagaagaaaacttggcgacagttctggagcgtgattggggcttttcaatttcacaagtgaaaccaactttagaatgtgatttcttagtgggatggaccaaggaagtggctgtatcgagtcacatggtccagcaaatcaagcaaaatatcaatcaaaattttttaagttcctcaaaagaaacggtggtttctttggtcgaagccttggaacaggggaaatcagaaaagattatcgagcaagtagaagtagccagcaagcttttagaaggcttgagtacagatatttacacgcctttgcttagacagttgaaagaagccagtcaagatttgcaggccgttgccaagagtagtggtgctggtggtggtgactgtggcatcgccctgagttttgatgcgcaatcaaccaaaaccttaaaaaatcgttgggccgatctggggattgagctcttatatcaagaaaggataggacatgacgacaaatcgtaa

SEQ ID NO: 9573 - DNA, 1011 bp, Streptococcus pneumoniae
  CDS (1)...(1011)
atgacgacaaatcgtaaggacgagcatatcctctatgcccttgagcagaaaagttcctataatagctttgatgaggtggagctgattcattcttccttgcctctttacaatctggatgaaatcgatctttcgacagagtttgctggtcgaaagtgggactttcctttttatatcaatgccatgactggtggaagtaataagggaagagaaatcaatcaaaagctggctcaggtggcggaatcctgtggtattttatttgtaacgggttcttatagcgcagccctcaaaaatccaacggatgattctttttctgtcaagtctagtcatcccaatctcctccttggaaccaatattggattggacaagcctgtcgagttaggacttcagactgtagaagagatgaatcctgttctattgcaagtgcatgtcaatgtcatgcaggaattactcatgcccgagggagaaaggaagtttagaagctggcaatcgcatctagcagattatagcaagcaaattcccgttcctattgtcctcaaggaagtgggctttggaatggatgccaagacaatcgaaagagcctatgaattcggtgttcgtacagtggacctatcgggtcgtggtggcaccagctttgcctatatcgaaaaccgtcgtagtggccagcgtgattacctcaatcaatggggtcagtctaccatgcaggcccttctcaatgcccaagaatggaaagataaggtcgaactcttggttagtggaggggttcggaatccgctggatatgattaagtgcttggtttttggtgctaaggctgtgggattgtcacgaaccgttctggaattggttgaaacctacacagttgaagaagtgattggcattgtccaaggctggaaagcagacctacgcttgattatgtgttcccttaactgtgccaccatagcagatctacaaaaagtagactatcttctttatggaaaattaaaagaagcaaaggatcagatgaaaaaggcgtaa

SEQ ID NO: 9574 - DNA, 471 bp, Streptococcus pneumoniae
  CDS (1)...(471)
atgccctacaaaagacaaaggagtttttcaatggcactttctaaactagatagcctttatatggcagtggtagcagaccattcgaaaaatccacatcaccaagggaagttagaagacgctgagcaaatcagtctcaacaatccgacttgtggagatgtcatcaatctctctgtcaagtttgatgcagaggaccgtttggaagatattgcttttctaaattcaggatgcacgatttcaactgcttctgctagtatgatgacagatgccgttttaggaaaaaccaaacaagaaattttagaactggcgactattttttctgaaatggttcaagggcaaaaagatgagcgtcaagaccaacttggagacgcggcattcttgtcaggtgttgccaaattccctcaaagaatcaagtgtgcaaccctagcttggaatgcccttaagaaaacaattgaaaatcaagaaaaacagtaa

SEQ ID NO: 9575 - DNA, 1959 bp, Streptococcus pneumoniae
  CDS (1)...(1959)
atgaataaaagaatgaatgagttagtcgctttgctcaatcgctatgcgactgagtactataccagcgataatccctcggttgcagacagtgagtatgaccgcctttaccgtgagttggtcgagttagaaactgcttatccagagcaagtgctagcagacagtccgactcatcgtgttggtggcaaggttttagatggttttgaaaaatacagtcatcagtatcctctttatagtttgcaggatgctttttcacgtgaggagctagatgcttttgatgcgcgtgttcgtaaggaagtggctcatccgacctatatttgtgagctgaaaatcgatggcttatctatctcgctgacttatgaaaaggggattttggttgctggggtaacacgtggagatggttcaattggtgaaaatatcacagaaaacctcaagcgtgttaaggacatccctttgactttgccagaagaactagatatcacagttcgtggggaatgttacatgccacgcgcttcctttgaccaagttaaccaagtgcgccaagaaaatggagagcctgaatttgctaatcctcgtaatgcggcagcaggaactctgcgtcagttggatacagcagtagttgccaagcgtaatcttgcaacgtttctctatcaagaagccagcccttcaactcgtgatagccaagaaaagggtttgaagtacctagaacaactaggttttgtggtcaatcctaagcgaatcttggctgaaaacatagatgaaatctggaattttatccaagaagtaggacaggaacgggaaaatctgccttacgatattgatggagtggtaatcaaggtcaacgacctagcaagtcaagaagaacttggttttacagttaaggctccaaagtgggcagtagcctacaagttccctgccgaagaaaaagaagctcaactcttatcagttgactggacagttggccgtaccggtgttgtaactccaactgctaatctaacaccagtacaacttgccggtacgactgttagccgtgcgaccctgcacaatgtagattatattgctgaaaaagatatccgaaaagacgatacggtcattgtatataaggctggtgacatcatccctgccgttttacgtgtggtagagtccaaacgggtttctgaagaaaaactagatatccctacaaactgtccaagttgtaactctgacttgttgcactttgaagatgaagtggccctacgttgtatcaatccgcgttgccctgctcaaatcatggaaggcttgattcactttgcttctcgtgatgctatgaatattacaggccttggtccatctattgttgagaagctttttgctgctaatttagtcaaggatgtggcggatatttatcgtttgcaagaagaggatttcctccttttagagggggttaaggaaaagtccgctgctaaactgtatcaggctatccaagcatcaaaggaaaattctgccgagaagctcttatttggtttgggaattcgtcatgtcggaagcaaggttagtcagcttttacttcaatatttccattcaattgaaaatctgtctcaggcagattcagaggaagtggctagtattgaaagtctaggtggcgtgattgccaaaagtcttcagacttattttgcgacagaaggctctgaaattctgctcagagaattgaaagaaactggggtcaatctggactataaaggacagacggtagtagcggatgcggccttgtcaggtttgaccgtggtattgacaggaaaattggaacgactcaagcgctcagaagctaaaagtaaactcgaaagtctgggtgccaaagtgacaggtagtatttctaaaaagaccgacctcgtcgtggtaggtgcagacgctggaagtaaactgcaaaaagcacaagaacttggtatccaggtcagagatgaggcatggctagaaagtttgtaa

SEQ ID NO: 9576 - DNA, 234 bp, Streptococcus pneumoniae
  CDS (1)...(234)
atgacagaaaaagaaatttttgaccgtattgtgaccattatccaagagcgacagggagaggactttgtcgtgacagaatccttgagtctgaaagacgatttggatgcggattctgttgacttgatggagtttatcttgactctggaagatgaatttagtatcgaaatcagcgatgaggaaattgaccaactccaaagtgtaggagatgtggttaaaatcattcaaggaaaatag

SEQ ID NO: 9577 - DNA, 1200 bp, Streptococcus pneumoniae
  CDS (1)...(1200)
gtgtctcaatcttatatcaatgttatcggtgctggtttggcaggttctgaagcagcttaccaaatcgcagagcgtggtattccagttaaactttatgaaatgcgtggtgtcaagtctacaccccagcataaaacagacaattttgctgagttggtttgttccaattctttgcgtggggatgctttgacaaatgcagttggtcttctcaaggaagaaatgcgtcgcttgggttctgttatcttggaatctgctgaggctacacgtgttcctgccggtggagcccttgcggtggatcgtgatggtttctctcaaatggtgaccgaaaaagtggtcaaccaccccttgattgaagtggtgcgtgatgaaattacagaattgccaacagatgttattacagttgtggcgactggtcccttgactagcgatgccctggctgaaaagattcatgcccttaataatggcgatggcttctatttctacgatgcagcagcgcctattatcgatgtcaacactatcgatatgagtaaggtctatctcaaatctcgttatgataagggagaagcagcctatctcaatgctccaatgaccaagcaagagtttatggatttccatgaagccttggtcaatgcggaagaagcaccgctcaattcttttgaaaaagaaaagtactttgaaggatgtatgccaatcgaagttatggccaaacgtggcattaaaactatgctttatggccctatgaagccagtcggtcttgagtatccggacgactacacaggacctcgtgatggagaatttaaaacaccttatgcggttgtgcaacttcgtcaggataatgcagctggtagcctatacaatattgttggtttccagacccacctcaaatggggagaacaaaagcgtgtcttccaaatgattccgggtcttgaaaatgcggagtttgtccgttatggtgtcatgcatcgcaattcttacatggattcaccaaatcttcttgagcagacttaccgttccaagaaacaaccaaatctcttctttgctggtcagatgacgggggtggaaggctatgttgagtcggcggcttcgggcttagttgcgggaattaacgcagctcgtctcttcaaggaagaaagcgaggttattttccccgagacgacagcgattggaagcttagctcattacattacccatgccgacagcaaa

SEQ ID NO: 9578 - DNA, 639 bp, Streptococcus pneumoniae
  CDS (1)...(639)
atgtcaaaaggatttttagtctctcttgagggaccagagggagcaggcaagaccagtgttttagaggctctgctaccaattttaaaggaaaaaggagtagaggtgttgacgacccgtgaacctggcggagtcttgattggggagaagattcgggaagtgattttggatccaagtcatactcagatggatgctaaaacagagctacttctctatattgccagtcgcagacagcatttggtggaaaaagttcttccagcccttgaagctggcaagttggtcatcatggatcgttttatcgatagttctgttgcctatcagggatttggtcgtggcttagatattgaagccattgactggctcaatcagtttgcgacagatggcctcaaacccgatttgacactctattttgacatcgaggtggaagaagggctggctcgtattgctgcgaatagtgaccgcgaggttaatcgtttggatttggaagggttggacttgcataaaaaagttcgtcaaggctacctttctcttctggataaagagggaaatcgcattgtcaagattgatgctagtctccctttggagcaagttgtggaaactaccaaggctgtcttgtttgacggaatgggcttggccaaatga

SEQ ID NO: 9579 - DNA, 891 bp, Streptococcus pneumoniae
  CDS (1)...(891)
atgaaacaagatcaactaaaggcttggcaaccagctcagtttgaccgttttgtccgtatcttagaacaagaccagctcaatcacgcctatctcttttcaggtttctttggaagcttggaaatggcgcaatttttagctaagagcctcttttgtacggataaagttggcgtcttaccatgtgagaaatgccgaagttgcaagctgattgaacaggaagagtttccagatgtcaccttgattaagccagtcaatcaggtcatcaagacagaacgcattcgggaattggtgggacagttttctcaagcagggattgaaagccagcaacaggtctttattatcgagcaagcggataaaatgcatcccaacgcagccaattctctgctcaaggtcatcgaagaaccccagagtgaagtttatattttcttcttgactagcgatgaggaaaagatgttaccgacaatccgaagtcggactcagatcttccactttaaaaagcaagaagaaaaacttatcttactcttagaacaaatgggacttgttaagaaaaaagcgactcttttagctaagtttagtcaatcgcgagctgaagcagaaaagttggctaatcaggcaagtttttggaccttggtcgatgaaagtgaacgcctgctgacttggttagtagctaagaaaaaagaaagttatctacaggttgccaaattagccaacttggcagatgataaggaaaaacaggatcaggttttacggattcttgaagttctctgtgggcaggacctcttgcaggtaagagtaagagtgattctacaagatttactagaagctagaaaaatgtggcaagctaatgtcagctttcaaaatgccatggaatatctggtcttgaaagaaatataa

SEQ ID NO: 9580 - DNA, 870 bp, Streptococcus pneumoniae
  CDS (1)...(870)
atgcaaattcaaaaaagttttaaggggcagtctccctatggcaagctgtatctagtggcaacgccgattggcaatctagatgatatgacttttcgtgctatccagaccttgaaagaagtggactggattgctgctgaggatacgcgcaatacagggcttttgctcaagcattttgacatttccaccaagcagatcagttttcatgagcacaatgccaaggaaaaaattcctgatttgattggtttcttgaaagcagggcaaagtattgctcaggtctctgatgccggtttgcctagcatttcagaccctggtcatgatttggttaaggcagctattgaggaagaaattgcagttgttacagttccaggtgcctctgcaggaatttccgccttgattgccagtggtttagcgccgcagccacatatcttttacggctttttaccgagaaaatcaggccagcaaaagcaatttttcgactcgaaaaaagactatcctgaaactcagattttttatgaatcgccccatcgtgtggcagatacattggaaaatatgctagaagtctacggtgaccgctccgttgtcttggtcagggaattgaccaaaatctatgaagaataccaaagaggtacaatttctgaattgctggaaagcattgctgaaacgtctctcaagggtgaatgtcttctgattgttgaaggtgccagtcaggatgtggaagaaaaaggcgaggaagacttgttcttagaaatccaagctcgtattcagcaaggtatgaagaaaaatcaagctattaaggaagtagctaagatttaccagtggaataagagtcaactctacgctgcctaccacgactgggaagaaaaacaataa

SEQ ID NO: 9581 - DNA, 816 bp, Streptococcus pneumoniae
  CDS (1)...(816)
atgacaaatacatcattctcaattgagcagttttctttaaaaggaaaaattgctctcatcaccggcgcttcttatggaattggatttgctattgccaaatcctacgctgaagccggcgctactattgtctttaacgatatcaatcaagatctggtcaataaagggattgaagcttatcgtgaagttggcatcgaagcccatggatatgtctgtgacgtgacagacgaggacggtatccaagccatggtcaagcaaatcgaacaagaggttggtgtcattgacatcctcgttaataacgctggtattatccgccgagttccaatgtgcgaaatgagcgccgctgatttccgtaaggtcatcgatattgacttaaacgcaccatttatcgtttcaaaggcagttattccttctatgataaagaaagggcatggaaagattatcaatatttgttcgatgatgagcgaactgggacgtgaaacagttagcgcttatgctgctgctaaagggggcttgaaaatgttgacccgcaacattgcgtctgaatacggtggagccaatatccaatgtaacggaattggaccgggttatattgccactcctcaaacagcacctcttcgtgagttgcaagaagatggttctcgccacccatttgaccagttcatcattgcaaaaacacctgctgcacgttggggaaatcctgaagatttgatgggccctgctgtctttctcgctagtgatgccagcaattttgtcaatggccacatcctatatgtagatggcggtatcttagcctacatcggaaaacaacctgagtaa

SEQ ID NO: 9582 - DNA, 393 bp, Streptococcus pneumoniae
  CDS (1)...(393)
atgtcacaagcacaatatgcaggtactggacgtcgtaaaaacgctgttgcacgcgttcgccttgttccaggaactggtaaaatcactgttaacaaaaaagatgttgaagagtacatcccacacgctgaccttcgtcttgtcatcaaccaaccattcgcagttacttcaactgtaggttcatacgacgttttcgttaacgttataggtggtggatacgctggtcaatcaggagctatccgtcacggtatcgctcgtgcccttcttcaagtagacccagacttccgcgattcattgaaacgcgcaggacttcttacacgtgactcacgtaaagttgaacgtaagaaaccaggtcttaagaaagctcgtaaagcatcacaatttagtaaacgttaa

SEQ ID NO: 9583 - DNA, 804 bp, Streptococcus pneumoniae
  CDS (1)...(804)
gtgaaaaggaaggatttcaatatgacaagtttaaaattattaaaagaaaaagcaccattggtcatttgtataaccaatgatgtagtaaaaaatttcacagcaaatggattagtagcactgggcgcctcaccagccatgagtgagtttccagcagatttagaggatttgttaaagtatgctggtggtttattaataaacataggaacattgacagatgaaaattggaaattataccaagctgctctgaaaattgcagagaaatataatgtcccagtagttttagatcctgtagcctgtggagcaggagaatatagaaaaaaagtagcagatgatttaatcaacaattacaaactagctgcgattagggggaatgctggagagattgcctctttagtaggaatagatgtggcatctaaaggagtagatagtgcgggagtagataatattgacgagattgctctagcagcaaatgagaagttcaatattccaatagtagtaacaggtgaagtggatgctattgcggtaaatggagaagtggtaacgattcataatggtagtgccatgatgccaaaagttattggaactggatgtttattaggggcagtggtagcaagctttatcggactagaaaaaggtcaagaattgaaatcattagaaacagcaatgttggtttacaatatcgctggagaaatggcagaaaaacgtccaaatggacatcttcctgggacatttaaagttgaatttataaatgccttatacgagattacagatgaagatgtaaaggaattcaaaagagtgaagtaa

SEQ ID NO: 9584 - DNA, 1824 bp, Streptococcus pneumoniae
  CDS (1)...(1824)
atgtctaaaattatcggtattgacttaggtacaacaaactcagcagttgcagttcttgaaggaactgaaagcaaaatcatcgcaaacccagaagggaatcgcacaactccatctgtagtctcattcaaaaacggagaaatcatcgttggtgatgctgcaaaacgtcaagcagtcacaaacccagatacagttatctctatcaaatctaagatgggaacttctgaaaaagtttctgcaaatggaaaagaatacactccacaagaaatctcagctatgatccttcaatacttgaaaggctacgctgaagactaccttggtgagaaagtaaccaaagctgttatcacagttccagcttacttcaacgacgctcaacgtcaagcaacaaaagacgctggtaaaattgctggtcttgaagtagaacgtattgttaacgaaccaactgcagcagctcttgcttatggtttggacaagactgacaaagaagaaaaaatcttggtatttgaccttggtggtggtacattcgacgtctctatccttgaattgggtgacggtgtcttcgacgtattgtcaactgcaggggacaacaaacttggtggtgacgactttgaccaaaaaatcattgaccacttggtagcagaattcaagaaagaaaacggtatcgacttgtctactgacaagatggcaatgcaacgtttgaaagatgcggctgaaaaagcgaagaaagacctttctggtgtaacttcaacacaaatcagcttgccatttatcactgcaggtgaggctggacctcttcacttggaaatgactttgactcgtgcgaaatttgatgatttgactcgtgaccttgttgaacgtacaaaagttccagttcgtcaagccctttcagatgcaggtttgagcttgtcagaaatcgacgaagttatccttgttggtggttcaactcgtatccctgccgttgttgaagctgttaaagctgaaactggtaaagaaccaaacaaatcagtaaaccctgatgaagtagttgctatgggtgcggctatccaaggtggtgtgattactggtgatgtcaaggacgttgtccttcttgatgtaacgccattgtcacttggtatcgaaacaatgggtggagtatttacaaaacttatcgatcgcaacactacaatcccaacatctaaatcacaagtcttctcaacagcagcagacaaccaaccagccgttgatatccatgttcttcaaggtgaacgcccaatggcagcagataacaagactcttggacgtttccaattgactgatatcccagctgcacctcgtggaattcctcaaatcgaagtaacatttgacatcgacaagaacggtatcgtgtctgttaaggccaaagaccttggaactcaaaaagaacaaactattgtcatccaatcgaactcaggtttgactgacgaagaaatcgaccgcatgatgaaagatgcagaagcaaacgctgaagccgataagaaacgtaaagaagaagtagaccttcgtaatgaagtagaccaagcaatctttgcgactgaaaagacaatcaaggaaactgaaggtaaaggcttcgacgcagaacgtgacgctgcccaagctgcccttgatgaccttaagaaagctcaagaagacaacaacttggacgacatgaaaacaaaacttgaagcattgaacgaaaaagctcaaggacttgctgttaaactctacgaacaagccgcagcagcgcaacaagctcaagaaggagcagaaggcgcacaagcaacagggaacgcaggcgatgacgtcgtagacggagagtttacggaaaagtaa

SEQ ID NO: 9585 - DNA, 1830 bp, Streptococcus pneumoniae
  CDS (1)...(1830)
atggtcatcactaaacactttgcgattcatggaaaaaattatcgtagcaaactagtcaaatatattttgaatccaagtaaaacaaaaaatctagcactagtttcagattttggtatgagaaattatttagattttcctagttataaagaactagtgaagatgtacaatgataattttttaagtaatgatggtctttatgaatttcgtcatgataggcaagaagtaaatcaacgaagaatttattctcatcatattattcagtctttttctccagatgatcatcttactcctgaacaaatcaatcggattggttatgagacagttaaagagttgacaggaggtagatttcgttttatcgtagcaacacatgtcgataaaggtcatatccacaatcacatcatcctaaattcaattgatcagaattctgataaaaagtttctatggaattataagtcagaacgtaatctacgaatggtttcagatcgtctctcaaaaattgcaggtgcaaagattatagaaaatcgttattcgcatcgtcagtatgaagtttatcgaaaaaccaattacaaatatgaaataaaacaacgggtatattttctaattgagaactcgaaaaattttgaagatttcaggaaaaaagcaaaagctttacatttaataattgattttagacacaagcatgttactttttttatgactgattcaaatatgaaacaagtcgtacgtgatgataaattgaatagaaaacaaccttataatgaaacttattttaagcaaaagtttgttcaaagggaaattataaacatcttagaatttctacttccgaaaatgaagaatatgaatgaattgattcaacaagcagaattttttgacttaaaaataattccgaaagaaaaacatgttctatttgaatttaatgggattaagctttcagaacaggaattgggaaaaatgaatcagtacagtgttagttattttcaagactattttaataacaaaaatgaaacttttgtcttagataataataatttaattgaactttacaataaagaaaagctaattaaagaaaaagagttgccgacagaagaggtggtatggaaatcctatcaagatttcaagagaaatagggatgctgttcatgagttagaagtagagttgaatcttaatcaaatagaagcagtagtagacgatggaatttacattaaggtacagtttggtatccgacaagaaggacttatttttgtaccaaatattcaaatcaatatggaagaagaaaaagttaaagtatttctcagagaaactagttcttactatgtatatcataaagattcagcagacaaaaatcgctttatgaaaggtaaaactttaattaggcaatttacgcttcagcatgaaccgcagcatatgtatagaagaatacctcttagcaaaattaaagaaaaaatagaacaattagattttcttatatctgcggaaaatagtccgaatgattttgaagatataacaaatgatttcattgcccaaatatcatatctagagaatatgattgaacaagtccaaaataaaattgatgatttaactaatttagaggaagtattgttgaataatacgacaaatagttctagcaatttagaaaatagtattcaaggtaaaagttcagtagatacgatagagaaggatttatacatatataaaggaaagattgaaacactgaaggaacaacatggagaagcaataaatttatttgaaatgtttaataaaacaataaagaaatataagaaaaaacaaaatatgaaatctattgaggaaaatgagatacatttagagtaa

SEQ ID NO: 9586 - DNA, 2652 bp, Streptococcus pneumoniae
  CDS (1)...(2652)
atgtctaaagaactttcatctaaatacaatccagccgaggttgaggctggtcgttaccaaaaatggcttgatgcggatgttttcaagccttcaggcgatcaaaaggctaagccttattcaatcgtgattccaccaccaaacgtaactgggaaacttcaccttggtcacgcttgggatacgactttgcaggatatcatcatccgtcaaaaacgcatgcagggctttgataccctttggcttccaggtatggaccacgctggtattgcgactcaggctaaggttgaggagcgcttacgtggtgagggtattacgcgttatgacctaggtcgtgagtctttcttgacgaaggtctgggaatggaaagacgaatatgccactaccatcaaggaacaatggggcaagatggggctttctgtagactattctcgtgagcgtttcactcttgacgaaggtttgtcaaaagctgttcgtaaggtctttgtggacctttacaagaaaggctggatctatcgtggtgagtttatcatcaactgggacccagcagctcgcacagccctttctgatattgaggtgattcacaaggatgtagaaggtgccttctaccacatgaattacatgctggaagatggttcacgcgcccttgaagttgctacaactcgtcctgagactatgtttggggacgttgcggttgcggttaatccagaagacccgcgctacaaggacttgattggtaaaaacgtcatccttccaatcgctaataaactcatcccaatcgttggagatgagcacgcagatcctgagtttggtactggtgtcgtgaaaatcacacctgcccacgatccaaatgacttcttggttggccaacgtcataacttgccacaagtcaacgtcatgaacgacgacggaactatgaatgagcttgcctttgaattttcaggcatggatcgttttgaagctcgtaaggcagtcgttgctaagttggaagaaatcggtgcccttgtcaaaatcgaaaaacgtgtccattcagtcggtcactcagaacggacaggtgtcgtagttgagccacgcttgtctactcaatggttcgtcaagatggaccaattggctaagaacgccattgccaaccaagacacagaggacaaggtcgaattctacccacctcgtttcaacgataccttccttcaatggatggaaaatgtccacgactgggttatctctcgtcagctttggtggggtcaccaaatccctgcctggtacaatgctgatggtgaaatgtatgtcggcgaagaagctccagaaggtgacggatggactcaggacgaagacgtcttggatacttggttcagttctgccctctggccattttcaaccatgggctggcctgaagtcgactcagaagactttaaacgttatttcccaacttcaaccttggtaacaggttacgacatcatcttcttctgggtgtctcgtatgatcttccagtcattggaattcacaggccgtcaaccattccaaaacgtccttatccacggtctcattcgtgacgagcaaggacgcaagatgtctaagtctctcggtaacgggattgacccaatggatgttatcgagaaatacggtgccgatgcccttcgatggttcctttcaaacggttctgcgccaggacaagacgtgcgtttctcttatgagaaaatggatgcttcatggaactttattaacaagatttggaacatttctcgctatatcttcatgaacaatggaggtttgacgctggatgtggcgcatgacaatgtcacaaaagttgcaacaggtgaggctggtaatgtgacggaccgctggattctccacaatctcaacgaaaccattgcaaaagttactgaaaactttgataagttcgagtttggtgtggctggtcatatcctttacaacttcatttgggaagaatttgccaactggtatgttgagttgaccaaggaagtcctttatagcgataacgaagaagagaaagtcatcacacgttctgttctactatacactttggacaagatccttcgtctccttcacccaatcatgccattcgtgacagaggaaatctttggacaaatctcagaaggttctatcgtgacagctgcatacccaactgttaatctagcctttgaagaccttgcggctcacactggtgtggaaagtctcaaagacttaattcgtgctgttcggaatgcgcgtgcggaagtaaatgtagcaccaagcaagcctatcaccatccttgttaagacaagcgatagtgacttggaagccttctttaacagcaatgtcaactatatcaaacgctttacaaatccagaacacttggaaatcgcatcaaccatccctgcacctgaactggctatgtcaagcgttattacaggagccgaaatcttcttgccactggccgatctcctcaatgttgaagaagaactagctcgtctcgacaaagaactcgctaaatggcaaaaagaactggacatggttggtaagaaactctctaacgaacgcttcgtcgccaacgctaaaccagaagttgtccaaaaagaaaaagacaaacaagccgactaccaagccaagtatgatgtgaccgtagcacgtattgatgagatgaagaagttggtgaaataa

SEQ ID NO: 9587 - DNA, 1368 bp, Streptococcus pneumoniae
  CDS (1)...(1368)
atgaatgaaaaaatattaagatcttcattggccataattcagagttttcttgttattttattgacttatctacttagtgctgtgagagaaacggagattgtttcaacaacagctattgcactttatatcctccattattttgtcttttatatcagtgattatggacaggatttctttaaaaggagatatttgattgaacttgtccagacattgaaatatatcctattctttgcactagcgattggtatttctaattttttcttagaggatcgatttagtatttccagacgaggcatgatttacttcctcacattacatgctctcttagtctatgtgctaaacctatttatcaagtggtattggaagcgggcttatcccaactttaaaggaagtaagaagattctcttacttacagcaacttctcgtgtcgaaaaggtactggatagattaatagaatcaaatgaggttgttgggaagttggtagccgtcagtgtcttagataaaccagattttcagcatgattgtttaaaggtagtagcagagggggagatagtaaactttgcgactcatgaggtggtcgatgaagtctttatcaatcttccaggtgaaaaatacaatattggagagcttgtctctcagtttgaaacgatgggaattgatgtaatagtcaatctaaatgcttttgatcgtagtttggcacgtaacaagcaaattcgtgagatggcagggttaaacgttgtgactttttctacaacattttataagactagtcatgtaattgctaagcggattattgatatcgtgggtgcattggtagggctgatactatgtggtttagtcagtattgtactggttcctttgattcgaaaggatgggggatctgctatttttgctcagacgcgtataggaaaaaatggtcgtcagttcactttttataagtttcgctctatgtgtgtagatgccgaggcgaaaaaaagagaactcatggaacaaaataccatgcaaggtggaatgtttaaggtggacgatgatcctcgtatcacgaaaattggttgttttatacggaagactagcttggacgagctaccacagttttataatgttctaaagggagatatgagtttggttggcacacggccaccaacagtggacgagtatgagcactataccccagaacaaaaacgccgactaagttttaaacctggcataacaggtttatggcaggtcagcggacgaagtgagatcaagaatttcgatgaagttgtcaaattagatgtggcctatattgatggttggacaatctggaaagatattgaaattttattgaagacagttaaagtagtatttatgagagatggagcgaagtaa

SEQ ID NO: 9588 - DNA, 1914 bp, Streptococcus pneumoniae
  CDS (1)...(1914)
atgacttatcattttactgaagaatacgatattattgtaattggtgcgggacacgctggggttgaggcttccttggccgctagccgtatgggctgtaaggtcctgcttgcgaccatcaatattgaaatgctggctttcatgccttgtaatccctctatcggtggttctgccaaggggattgtcgtgcgtgaagtcgatgccctcggtggcgagatggccaaaaccattgacaagacttacatccagatgaagatgctaaacacagggaaggggccagctgtccgtgcccttcgtgcgcaggctgacaaggaactttactctaaggagatgcgcaagacggttgaaaaccaagaaaatctgacccttcgtcaaaccatgattgatgagattttggtggaagatggcaaggttgtcggtgtgcgtacagccacccatcaagaatatgctgctaaggctgttattgtgacgacagggactgctctccgtggggaaattatcatcggagacctcaagtactcatcaggtcctaaccacagcttggcttctattaacctagctgacaatctcaaggaactgggcctcgaaatcggtcgtttcaagacaggaacccctccacgtgtcaaggcttcttctatcaattacgatgtgacagaaatccaaccaggagatgaagcacctaatcacttctcatacacttcacgtgatgaggattatgtcaaggaccaagtgccatgctggttgacctacaccaatggtaccagtcatgagattatccaaaacaacctccaccgtgcgcctatgtttacaggtgtggtcaagggagtgggacctcgttactgtccatcgattgaggacaagattgtgcgctttgcggacaaggaacgtcaccaactcttccttgagccagaaggacgcaatacagaggaggtctatgtccaaggactttcaaccagtctgcctgaggatgtccaacgtgacttggttcattccatcaaaggtctggaaaatgcagagatgatgcgaacaggttatgctattgagtatgacatgatcttgcctcaccagttgcgtgcgactttggaaaccaagaaaatctcaggacttttcactgctggtcagacaaatggaacatcaggttacgaagaggcagcaggccaagggattatcgcagggatcaatgcggctctgaaaatccaagataagcctgagttgattttgaagcgtagtgacggttacattggggtcatgattgatgatttggtgaccaagggaaccatcgaaccctaccgtctcttgaccagtcgtgctgaataccgtctcattctccgtcatgacaatgctgatatgcgcttgactgagatgggacgcgagattggccttgtggatgatgaacgctgggctcgttttgaaatcaagaaaaatcaatttgataatgagatgaaacgcctagacagtatcaaactcaagccagtcaaggaaaccaatgctaaggttgaggagatgggcttcaaacccttgacagatgcagtgacagccaaggaattccttcgccgtccagaagtttcttaccaagatgtggtagccttcatcggaccagctgcagaggatttggatgataagattatcgaattgattgaaacagaaatcaagtacgaaggctatatttcaaaagccatggatcaggttgccaagatgaaacgtatggaagaaaaacgcattccagccaatattgactgggatgacatcgattctattgcgacggaagctcgtcagaagttcaaactcatcaatccagaaaccatcggccaagccagccgtatttcgggggtaaacccagcagatatttctattttgatggtgtatctggaaggtaaaaatcgtagtatttctaaaactcttcaaaaatcaaaatga

SEQ ID NO: 9589 - DNA, 615 bp, Streptococcus pneumoniae
  CDS (1)...(615)
atgaatttatttaaaaatttcttaaaagagtggggattattcctcctgattctgtcattactagctttgagccgtatctttttttggagcaatgttcgcgtagaaggacattccatggatccgaccctagcggatggtgaaatcctctttgttgttaagcacctccctattgaccgttttgatatcgtggtggcccatgaggaagatggcaataaagacattgtcaaacgtgtcatcggaatgcctggcgataccatccgttacgaaaatgataaactttacatcaatgacaaagaaacggacgagccttatctagcagactatatcaaacgcttcaaggatgacaaactccaaagcacttactcaggcaagggctttgaaggaaataaaggaactttctttagaagtatcgctcaaaaagcccaagccttcacagttgatgtcaactacaacaccaactttagctttactgttccagaaggagaataccttctcctcggagatgaccgcttggtttcgagcgacagccgccacgtgggtaccttcaaagcaaaagatatcacaggggaagctaaattccgcttctggccaatcacccgtatcggaacattttaa

SEQ ID NO: 9590 - DNA, 1137 bp, Streptococcus pneumoniae
  CDS (1)...(1137)
atgaaacattctgttcattttggtgccggtaatatcggtcgtggttttataggtgaaattctatttaaaaatggtttccatattgattttgtggatgtcaataatcagataattcatgctctaaatgaaaagggcaagtatgaaattgaaattgcacagaaaggacagtctcgtatagaagtaactaatgtggctggcattaatagcaaagaacatcctgagcaagtcattgaagcgattcaaaagacggatattattactactgcaatcggacctaatatactcccttttatcgctgaacttctagccaaaggaatcgaagctcgccgagttgcaggaaatacacaggcattggatgttatggcctgtgaaaatatgattggcgggtctcaatttctttatcaagaagtcaagaaatatttaagtccggaaggtttgacatttgctgataactacataggttttccaaatgctgcagtagacaggattgttccaacacaaagtcacgaagattccctttttgttatggtcgagccctttaatgaatgggtcgtggaaaccaagcgtcttaaaaatccagatttacgtctagaagatgtgcattatgaagaagatttagaaccctttattgagcgaaaacttttttcagtcaattctggacatgcaacttcagcttacattggtgcgcattatggtgccaagacaattttggaagctcttcaaaatcctaatatcaaatctcggattgaatctgtattagctgaaattcggagtctcttgattgccaaatggaactttgataaaaaagaattggagaattatcacaaagtcattatagaacgatttgaaaaccctttcatagtggacgaggttagtcgcgtagctcgtactccaatccgaaaattaggctataatgaacgattcatccggccgatacgtgaattgaaagaactcagtttgtcatataaaaacctacttaaaacagttggctatgcctttgactatcgcgatgtaaatgatgaagaaagtattcgattaggtgaattgttggctaaacaatcagtcaaagatgttgttatacaagttacaggtttagacgaccaagaattgattgagcgaattgtagagtatatttaa

SEQ ID NO: 9591 - DNA, 2382 bp, Streptococcus pneumoniae
  CDS (1)...(2382)
atgcaaaggaattttatggaagtttatttttcaggaaccattgaacggattatttttgaaaatcccagcaatttttatcgcatcctcctcctagaaatcgacgatacggacgcagaggattttgatgattttgaaatcattgtcacaggaaccatggctgatgtaattgagggcgaagactatactttttgggggcaaattgtccagcactccaagtatggagaacaactgcaaatcagtcgttatgatcgcgcaaaaccaactagtaagggcttggtcaagtacttttcaagtagccatttcaaggggattggtctcaagacagctcagaaaatcgtggatacctatggcgaaaataccattgacgaaattttgcaacacccagaaaagttagaaggcatcgcaggactctctgccaaaaatcgcgaggctttcgtctccactctccgtctcaactacggaacggagatggttttgtccaaactagccaactacggcattcccaacaaactagcctttcagattcaagacttttacaaggaagaaacccttgatgtggttgaaaattatccctaccagctggttgaggatatcaagggtttgggctttaccattgctgaccaactagctgaggaactaggcatcgaaagtcaggctcctgaacgcttccgcgccggtctagttcacagtctttttcaggcctgtatggaaacaggggacacctatgttgaagcacgggatttgctggaacaaacccttactctccttgagtcttcccgtcccgtggaactagaccccagtcaagttgcccaagagctctcctacctgatcgaagaagacaaggttcagcagattgataccaagatctttgacaacagcctctttttcgctgaggaaggcatccgcagtcacttggttcgtatccttgaaaaaggagaacagaagagtcatcatttagaaaccattcaaaaacatatcactactatcgagcaagagctgggaattgagtatgataacattcaaaaacaggctatctgtgatgctatccagaataaggtctttatcctgacaggtggacctggtactggtaagacaactgttatcaatgggatcatcgctgtttacgccctgttagagggacttgacctcaggaagaaaagcaatctgcccattcttcttgctgctccaactggacgagccgctcgccgcatgaatgaattgacaggtttgcctagcgcgaccatacaccgccacttgggaatgacaggtgacgatgataccagtcatctggaagattacctagatgctgactttatcatcgtggatgaattctctatggtagatacttggctgtccaatcaactcttctccaatatctcttctaacagtaagatcctcatcgtaggtgacagtgatcagctaccttctgtcagtcctggacaggttctagcggatctgcttcatattcctttgattcctcagactcgcttggaaaaaatttatcgacaaagcaaagaatcaaccatcgtcaccctagctagtcagattcgacagggcatcttgccagctgatttcacccaaaaaaaagctgaccgttcctactttgaaattgctagtggccatattcctgccaccattgaaaaaatcttaggtgctgccctcagaaatggtattcctgcccgtgatatccaagttctggctcctatgtaccgagggacggcagggattgatgctatcaatcagctcatgcaagacctgctcaatcccccacaaaaagatcaactcagttttgaagctcctcagtgccactatcgtaagggagacaaggtcattcatttggttaacgatgctgaaatcaatgtctttaatggggatttaggagctatcacagacctgattcctggtaaatacaccgaatcgaaacaagacgagattgtcattgattttgatggtaatgaagtctcttacccccgtaacgaatggtacaagattcgcttggcctatgccatgagtattcataagtctcagggaagtgagttcccagttgtcatcctaccgattactagtgctagccgacgtatgctggagcgaaatctcatctacacagccattacacgtgccaaaagcaaactcatcttactaggcgaattacaagccttcgaccatgctatccaacacatcggaactgcccgaaaaacctatctgattgaacgcttcagtgatctactggagaatgttgaagaaaagcaacaagctgtctctgaaacagtcacatcaagtgcctctgaacaatcctacatcctaaccgaagaaaactggaaccgcatcccagccatgattgggattacagacacagacctcaaagagatttttggaaaatag

SEQ ID NO: 9592 - DNA, 816 bp, Streptococcus pneumoniae; identical to SEQ ID NO: 9252
  CDS (1)...(816)

SEQ ID NO: 9593 - DNA, 888 bp, Streptococcus pneumoniae
  CDS (1)...(888)
atggaaattaaaattgaaactggtggtctgcgtttggataaggctttgtcagatttgtcagaattatcacgtagtctcgcgaatgaacaaattaaatcaggccaggtcttggtcaatggtcaagtcaagaaagctaaatacacagtccaagagggtgatgtcgtcacttaccatgtgccagaaccagaggtattagagtatgtggctgaggatcttccgctagaaatagtctaccaagatgaggatgtggctgtcgttaacaaacctcagggaatggttgtgcacccgagtgctggtcataccagtggaaccctagtaaatgccctcatgtatcatattaaggacttgtcgggtatcaatggggttctgcgtccagggattgttcaccgtattgataaggatacgtcaggtcttctcatgattgctaaaaacgatgatgcgcatctagtacttgcccaagaactcaaagataaaaagtctctccgcaaatattgggcgattgttcatggaaatctgcctaatgatcgtggtgtaattgaagcgccgattggccggagtgaaaaagaccgtaagaaacaggctgtaactgctaaagggaagcctgcagtgacgcgttttcacgtcttggaacgctttggcgattatagcttagtagagttgcaactggagacagggcgcactcatcaaatccgtgtccacatggcttatatcggccattcagtcgctggtgatgaggtctatggtcctcgcaagactttgaaaggacatggacaatttcttcatgccaagactttaggttttactcatccgagaacaggtaagaccttggaatttaaagcagatatcccagagatttttaaggaaaccttggagagattgagaaagtaa

SEQ ID NO: 9594 - DNA, 1125 bp, Streptococcus pneumoniae
  CDS (1)...(1125)
atgagaaatatggctttgacagcaggtatcgttggtttgccaaacgttggtaaatcaacattatttaatgcaattacaaaagcaggagcagaggcagcaaactacccatttgcgactattgatccaaatgttggaatggtggaagttccagatgaacgcctacaaaaactaactgaaatgataactcctaaaaagacagttcccacaacatttgaatttacagatattgcagggattgtaaaaggagcttcaaaaggagaagggctagggaataaattcttggccaatattcgtgaagtagatgcgattgttcacgtagttcgtgcttttgatgatgaaaatgtgatgcgcgagcaaggacgtgaagacgcctttgtagatccacttgcagatattgatacaattaatctggaattgattcttgctgacttagaatcagtgaacaaacgatatgcgcgtgtagaaaagatggcacgtacgcaaaaagataaagaatcagtagcagaattcaatgttcttcaaaagattaaaccagtcctagaagacgggaaatcagctcgtaccattgaatttacagatgaggaacaaaaggttgtcaaaggtcttttccttttgacgactaaaccagttctttatgtagctaatgtggacgaggatgtggtttcagaacctgactctatcgactatgtcaaacaaattcgtgaatttgcagcgacagaaaatgctgaagtagtcgttatttctgcgcgtgctgaggaagaaatttctgaattggatgatgaagataaaaaagagtttcttgaagccattggtttgacagaatcaggtgtagataagttgacgcgtgcagcttaccacttgcttggattgggaacttacttcacagctggtgaaaaagaagttcgcgcttggactttcaaacgtggtatgaaggctcctcaagcagctggtattatccactcagactttgaaaaaggctttattcgtgcagtaaccatgtcatatgaagatctagtgaaatacggatctgaaaaggccgtaaaagaagctggacgcttgcgtgaagaaggaaaagaatatatcgttcaagatggcgatatcatggaattccgctttaatgtctaa

SEQ ID NO: 9595 - DNA, 3510 bp, Streptococcus pneumoniae
  CDS (1)...(3510)
atggtgaccttattagatttattctcagaaaatgatcagattaaaaaatggcatcaaaatttaacagataagaaaagacaactaatacttggtttatcaacatctactaaggctcttgcaattgcaagcagtttagaaaaagaagataggattgtgttattgacgtcaacttatggagaagcagaaggacttgttagtgatcttatatctatcttgggtgaggaactcgtctatccatttttggtagatgatgctcctatggtggagtttttgatgtcttcacaggaaaaaattatttcacgggttgaagccttgcgttttttgactgattcatctaagaaagggattttagtttgtaatatcgtagcaagtcgattgattttaccgtctcccaatgcattcaaagatagtattgtaaaaatctcagttggtgaagaatatgatcaacacgcgtttatccatcagttaaaggaaaatggctatcgaaaagttactcaagtacaaactcagggcgaatttagtcttcgaggagatattttagatatttttgaaatatcccagttagaaccttgtcgaattgagttttttggtgatgaaattgatggtatcaggtcatttgaagtagaaacacaattatcgaaagaaaataagacagaactcactatctttccagctagtgatatgcttttgagagaaaaggattatcaacgaggacagtcagctttagaaaaacaaatttcaaaaactttatcacctattttgaaatcatacctagaagaaattctttcaagttttcaccaaaaacaaagtcatgcagactctcggaagtttttatctttgtgctatgataagacatggactgtctttgattatattgaaaaagataccccaatattctttgatgattatcaaaaattgatgaatcagtatgaagtctttgaaagagacttagcgcagtactttacagaagaattacagaatagtaaagcattttctgatatgcagtatttttctgatattgaacaaatctataaaaaacaaagtccagtgacctttttctctaatcttcaaaagggtttaggaaatctcaaatttgacaaaatttatcaattcaatcaatatcctatgcaggaatttttcaatcagttttcttttctaaaagaagaaattgaacgatataaaaaaatggattacaccattattctgcagtctagcaattcaatgggaagtaaaacattggaggatatgttagaggaatatcagattaaattggattctagagataagacaaatatctgtaaagaatctgtaaacttaatagagggtaatctcagacatggttttcattttgtagatgaaaagattttattgataactgaacatgagatttttcaaaagaaattaaagcgtcgttttcgaagacaacatgtttcaaatgcagagagattaaaagattacaatgaacttgaaaaaggggactatgttgtccatcatatccatgggattggtcaatatctaggaattgaaaccattgaaatcaagggaattcatcgcgattatgtcagtgtccaataccaaaatggtgatcaaatttctatccccgtggaacagattcatctactgtccaaatatatttcaagtgatggtaaagctccaaaactcaataaattaaatgacggtcattttaaaaaggccaagcaaaaggttaagaaccaggtagaggatatagctgatgatttaatcaaactctactctgaacgtagtcagttgaagggttttgctttctcagctgatgatgatgatcaagatgcctttgatgatgctttcccttatgttgaaacggatgatcaacttcgtagtattgaggaaatcaagagggatatgcaggcttctcagccaatggatcgacttttagttggggatgttggttttggaaagactgaagttgctatgcgtgcagcctttaaagcagtcaatgatcacaaacaggttgtcattctagttccgacgacggttttagcgcaacagcactatacgaattttaaggaacgattccaaaattttgcagttaatattgatgtgttgagtcgctttagaagtaaaaaagagcagactgcaacacttgaaaaattgaaaaacggtcaagtcgatattttgattggaacacatcgtgttttgtcaaaagatgttgtgtttgctgatttgggcttgatgattattgatgaggaacagcgatttggtgtcaagcataaggaaactttgaaagaactgaagaaacaagtggatgtcctaaccttgaccgctacgccaatccctcgtaccctccatatgtctatgctgggaatcagagatttatctgttattgaaactccgccgactaatcgctatcctgttcagacctatgttttggaaaagaatgatagtgtcattcgtgatgctgtcttgcgtgaaatggagcgtggaggtcaagtttattatctttacaacaaagttgacacaattgttcagaaggtttcagaattacaggagttgattccggaggcttcgattggatatgttcatggtcgaatgagtgaagtccagttggaaaatactctattagactttattgagggacaatacgatatcttggtgacgactactattattgagacaggggtggacattccaaatgctaatactttatttattgaaaatgcggaccatatgggcttgtcaaccttatatcagttaagaggaagagtcggtcgtagtaatcgtattgcttatgcttatctcatgtatcgtccagaaaaatcaatcagtgaagtctctgaaaagagattagaagcgattaaaggatttacagaattgggctctggctttaagattgcaatgcgagatctttcgattcgtggagcaggaaatcttttaggaaaatcccagtctggtttcattgattctgttggttttgaattgtattcgcagttattagaggaagctattgctaaacgaaacggtaatgctaacgctaacacaagaaccaaagggaatgctgagttgattttgcaaattgatgcctatcttcctgatacttatatttctgatcaacgacataagattgaaatttacaagaaaattcgtcaaattgacaaccgtgtcaattatgaagagttacaagaggagttgatagaccgttttggagaatacccagatgtagtagcctatcttttagagattggtttggttaaatcatacttggacaaggtctttgttcaacgtgtggaaagaaaagataataaaattacaattcaatttgaaaaagtcactcaacggctgtttttagctcaagattattttaaagctttatccgtaacgaacttaaaagcaggcatcgctgagaataagggattaatggagcttgtatttgatgtccaaaataagaaagattatgaaattttagaaggtctgctgatttttggagaaagtttattagagataaaagagtttaaggaagaaaattccatttga

SEQ ID NO: 9596 - DNA, 267 bp, Streptococcus pneumoniae; identical to SEQ ID NO: 9351
  CDS (1)...(267)

SEQ ID NO: 9597 - DNA, 1959 bp, Streptococcus pneumoniae
  CDS (1)...(1959)
atgaaaaaacaaaataatggtttaattaaaaatccttttctatggttattatttatctttttccttgtgacaggattccagtatttctattctgggaataactcaggaggaagtcagcaaatcaactatactgagttggtacaagaaattaccgatggtaatgtaaaagaattaacttaccaaccaaatggtagtgttatcgaagtttctggtgtctataaaaatcctaaaacaagtaaagaaggaacaggtattcagtttttcacgccatctgttactaaggtagagaaatttaccagcactattcttcctgcagatactaccgtatcagaattgcaaaaacttgctactgaccataaagcagaagtaactgttaagcatgaaagttcaagtggtatatggattaatctactcgtatccattgtgccatttggaattctattcttcttcctattctctatgatgggaaatatgggaggaggcaatggccgtaatccaatgagttttggacgtagtaaggctaaagcagcaaataaagaagatattaaagtaagattttcagatgttgctggagctgaggaagaaaaacaagaactagttgaagttgttgagttcttaaaagatccaaaacgattcacaaaacttggagcccgtattccagcaggtgttcttttggagggacctccggggacaggtaagactttgcttgctaaggcagtcgctggagaagcaggtgttccattctttagtatctcaggttctgactttgtagaaatgtttgtcggagttggagctagtcgtgttcgctctctttttgaggatgccaaaaaagcagcaccagctatcatctttatcgatgaaattgatgctgttggacgtcaacgtggagtcggtctcggcggaggtaatgacgaacgtgaacaaaccttgaaccaacttttgattgagatggatggttttgagggaaatgaagggattatcgtcatcgctgcgacaaaccgttcagatgtacttgatcctgcccttttgcgtccaggacgttttgatagaaaagtattggttggccgtcctgatgttaaaggtcgtgaagcaatcttgaaagttcacgctaagaacaagcctttagcagaagatgttgatttgaaattagtggctcaacaaactccaggctttgttggtgctgatttagagaatgtcttgaatgaagcagctttagttgctgctcgtcgcaataaatcgataattgatgcttcagatattgatgaagcagaagatagagttattgctggaccttctaagaaagataagacagtttcacaaaaagaacgagaattggttgctcaccatgaggcaggacataccattgttggtctagtcttgtcgaatgctcgcgttgtccataaggttacaattgtaccacgcggccgtgcaggcggatacatgattgcacttcctaaagaggatcaaatgcttctatctaaagaagatatgaaagagcaattggctggcttaatgggtggacgtgtagctgaagaaattatctttaatgtccaaactacaggagcttcaaacgactttgaacaagcgacacaaatggcacgtgcaatggttacagagtacggtatgagtgaaaaacttggcccagtacaatatgaaggaaaccatgctatgcttggtgcacagagtcctcaaaaatcaatttcagaacaaacagcttatgaaattgatgaagaggttcgttcattattaaatgaggcacgaaataaagctgctgaaattattcagtcaaatcgtgaaactcacaagttaattgcagaagcattattgaaatacgaaacattggatagtacacaaattaaagctctttacgaaacaggaaagatgcctgaagcagtagaagaggaatctcatgcactatcctatgatgaagtaaagtcaaaaatgaatgacgaaaaataa

SEQ ID NO: 9598 - DNA, 1581 bp, Streptococcus pneumoniae
  CDS (1)...(1581)
atgtattattttattccagcttggtatgggtcagaaagaacatggcatgcagatatcactccatggtatttttctcattttcgtctagagtttgatgatacctttcaccagatccggctctttcaagagcaagatatagattctcgtctattagtattagcttaccagcctcatctacgttattttttatatagacatggtgtgttagaaacggatacttattccgtttttgatgttatgcaagattttcataatctccatacccaagttttaagcattagagatattgagtgggatgatgactgtgaatttatttatagtccctttacgattatcgttcaaaaaaatgggaagaaatttgctaaggttgaacatggagttgaaggcttcatcagtgatatacagtattttgaaccgaatggtcaaatacatatgcaccatatcatggatgatcgagggtttgtatcgagcattatcttttttgaagatgggcaagcagcctatcaagaatatttgaatcctaagggagtttggcaatttagagagcgtttaaaagaaggaggacaggtagaagtcaatccaattttgggttatcgctttaaaatgcttacctatcaaaatatgggagatctggtggcagaattttttgagaattatctgcaaacgtatgtgaaggatcaggatatttttatgcttccttctcattctcatcatgaccagttggtactagatcgtttacctagtactaatcctaaactgttgagtctgttcattggacgtaatcctcaagatacctttagggatttagatgtaacttttgaaaaatcggatttgattttggtggatagagaggatagtttacgattgttgcaggagttgtatcctgaacgaatgcatcaatgttatcatttatcatcttttgacacccgattacgattgggacgaagccaaactaagaaagaatccatcatttattttcaactggattttgagcaggggattgataatcaagctctgcttcaagtcttgtcctttgtcgctgaaaataaggatactgaggtgatttttggagcctttgctgctagtcaggagcaaatgaatgaggttgaagggattgttgagtctttcatccaagaaaacattcaatccgaaaatctgggaaaggcgattgattatggtgatgcagaaaatcctctggaagaaaatcaacaccaggacttacgcttacagtttgttaacttgaatgatgagttagatttgataaaaacactagaatttgtccgtttgattgtggatttaaatagacatcctcatctctacacacagattgctgggattagtgcaggaattcctcaaatcaacctagttgaaaccgtctatgttgaacatttaaaaaatggttatttgttagcagatgttacagaattttctaaggctgcacattattacacagataggttgaaggagtggaatgagtccttgatatattcaattgataagattaaggagcacacaggacaacaatttcttggaaaattagagaaatggatagaggaggttaaaaatgtcaaaggaacttaa

SEQ ID NO: 9599 - DNA, 1536 bp, Streptococcus pneumoniae
  CDS (1)...(1536)
atgtcaaaggaacttaatattttacagataggacttgccaattgggaaaatcactatgacatacctgaaaatatgagttggtatcatttttacccaaattcatcaaaagcccttcgtgaaataatcgaaaaagaggatattaaccgttttcatgcagttttaatagaagatggtcagtattccagagacttattttcctatgtaaaatattttgaaccttatactttgttctataaccagaatctacaaataaatgatagagaggttgtggattttctaaaaaaacgatgtgcacaagcaattgattttttaagtccccaacaactaatcaatgatttaagtaaatctctttttggcggtgggtatggtgataaactctttcctccgacgatacaagtcaatccaaattttacaggagctatttcttatcaaggattggattatgtcagtttggaaggtgagtttgggcaagattttgcccagcttgcctattgggcttataatattatggtgcaaaaaacactccctattgagttgtggcttgaatatgagaaggaaggcaattgtgactttcgtttggtcatccgtaaaatgtggagtgggtctgttgatgatttctttgaagaagtaatagtatctgaaaaagacttggagcaagcactttttatggatagtcgagacggagactactttctctcgatatctgttgaagcaagaggtcgtggaactatcaaactaggtaatcttcaccaacgatggagtcgaaaacaatttggtaagtttgtacttggtggaaatatcctacatgattccaagcgtgatgaaataaactatttcttccatccaggtgattttaaaccgcctttgactgtctattttgcaggttatcgacctgcagaaggattcgagggttactttatgatgaaaacgcttggatgtcccttcattttattttctgatccacgtttagaggggggagctttttatctcggaacggatgagctagagggaaaagtaaaggatatgatcactcactatcttgattatttaggctttgatcataaggatttgattttatcaggtctttctatgggaacgtttccggctctctattatggtgcttcttttgaaccccatgccatcatagttggtaagcccttggctaatttaggaaccatagctagtcgtggacgtttggacgcaccgggtgtctctaacttagcttttgattgtttaattcatcatacaggtgggacaagttctcaagatatgacggagttggatcagcgtttttggaaaatttttaaacaagcaaatttttcaaagacaacctttggtttatcctatatgaaagatgaagaaatggatccacaagcctatgaacaattagtgtcttatctgtgtaatacaggtgcgaagattttatctaaaggaactgctggacgacacaatgatgatacagataccaatatttcttggtttttgcacttttatagaatggtcttagagactggttttggaagggagaaaagatga

SEQ ID NO: 9600 - DNA, 3651 bp, Streptococcus pneumoniae
  CDS (1)...(3651)
atgaagcttattccctttttaagtgaggaggagattcaaaaactgcaagaagcagaagcaaattcgagcaaggaacaaaagaaaactgccgagcaaatcgaagctatctacacttctggccagaatatcctggtctcagcatcggctggttctggaaagacctttgtcatggcagagcgcattctgaaccaattggcgcgtggtgtcgaaatttctcaactctttatctcaacctttaccgtcaaggctgcaactgaacttaaagaacgtttagagaaaaaaatcagcaagaaaattcaagaaacagatgatgtcgacctcaaacaacacttgggacgccagttggcagacctaccaaacgctgccattggaaccatggactctttcacacaaaaattccttggcaaacatggttatctgcttgatattgcacctaatttccgtattttacaaaaccaaagcgagcaacttcttctcgaaaacgaagtctttcatgaggtctttgaagcgcattaccaaggtaaacagaaagagacctttagtcatttgctgaaaaactttgctgggcgtggcaaggacgaacggggtctgcgccagcaggtctataaaatctatgacttcctccaatccaccagtaatcctcaaaagtggttgagtgaatctttcctcaaaggctttgagaaagctgattttaccagtgaaaaagaaaaactgactgagcaaatcaaacaagccctttgggatttggaaagctttttccgttaccatctggataacgatgccaaggagtttgcaaaggctgcctatttagaaaatgttcagttaattctggatgaaattggctccctaaatcaggagtccgatagtcaggcttatcaggcagtgcttgcgcgtgttgtcgccatctctaaggagaaaaacggtcgagctctgactaatgccagtcgtaaggctgatttgaagcccctggctgatgcctacaacgaagagagaaagacccagtttgctaaactaggacaattatcagaccagataaccattctcgactatcaagaacgttatcatcaagacacatgggaactagctaaaaccttccaaacctttatgagtcattttgtggaggcttatcgtcagcgcaaacgccaggaaaatgcctttgaattcgctgatatcagccattacaccattgagattttagagaatttcccacaagttcgtgagtcttatcaggagcgcttccatgaagtcatggtcgatgagtatcaggataccaaccatattcaagaacggatgctggaattgttgtctaatggccacaatcgctttatggtgggagatatcaagcaatccatctatcgtttccgtcaggcagacccgcagattttcaatgagaaattccaacgctatgcgcaaaatccccaagaaggcaagctcattctcctcaaggcaaatttccgtagtagttcagaagtgctgtcagcaaccaatgatgtctttgaacgtctcatggaccaagaggtcggcgaaatcaactatgataacaagcaccagcttgtttttgccaataccaaactgactcccaatccagacaacaaggcagaatttctcctctacgacaaggacgatacaggtgaggaagaagagagtcaaacagaaacgaaactaacaggcgaaatgcgcttagttatcaaggagattctgaaacttcatcaagaaaaaggtgttgcctttaaggaaattgcccttctgacctccagccgcagtcgtaatgaccagattctcctcgccctgtctgagtacggaattcctgtcaaaactgacggagagcaaaacaattatctccaatccctagaagtgcaagtcatgctagacactcttcgtgtcattcacaatcccctgcaagactacgccttggttgcccttatgaagtctccaatgtttggttttgatgaggatgagctagcacgtttgtcccttcagaaagcagaggataaagtccacgaaaatctctatgagaaactggtcaatgcacaaaaaatggcaagtagtcaaaaaggcttgattcacacagctctagctgaaaaactaaagcaattcatggatatcctagcttcttggcgcttgtatgccaaaacccactctctctatgacttgatttggaagatttacaacgaccgtttttattatgactatgttggggctttgccgaatggtcctgctaggcaggccaatctctatgccctagcactgcgtgctgatcaatttgaaaagagcaatttcaaaggtttgtcgcgttttattcgtatgattgaccaagtcttagaagcccagcacgatttggcaagcgtggccgtcgcaccgccaaaagatgcagtagagctcatgaccatccacaagagtaaagggctggagtttccttacgtctttatcctcaatatggatcaagatttcaacaagcaagactctatgtcagaagtcattctcagtcgtcagaatggtcttggtgtcaaatatattgccaagatggagacaggggcagtagaagaccactatcctaaaaccatcaaactctccattcctagtctgacctataggcagaacgaagaggaattacagctagcaagctattctgagcagatgcgtttgctgtatgttgctatgacgcgggctgagaaaaagctctatcttgtcggcaagggttctcgtgaaaagctggaagtcaagcaatacccagcagccaaaaatgggaaactaaatagcaatactagactgcaagcacggaatttccaagattggctttgggctatcagtaaagtgtttactaaggacaagctcaactttagttatcgttttattggcgaagatcagttgaccagagaagctatcggagagttggaaaccaagagtcctctccaagatagctcccaagcagacaatcgtcagtcagataccatcaaagaagctctggaaatgctgaaggaggtggaagtttataatactcttcaccgcgcagctattgaacttcctagtgttcaaaccccaagtcaaatcaagaaattctacgaaccagttatggatatggaaggtgtcgagattgctggtcaaggtcagtcagtaggcaagaaaatcagcttcgatttgccagatttttcaaccaaagaaaaggtaactggagctgagattggtagtgctactcacgaactcatgcagagaattgacctcagccagcaactaacccttgctagcctaacagaaacactcaaacaagttcaaactagccaagctgtcagagacaagatcaatcttgataaaattcttgctttctttgacacagtactcggtcaggaaattcttgctaataccgaccatctctatcgcgagcaacctttctccatgctcaaacgagaccaaaagagtcaggaagactttgttgtccgtggtatccttgatggctatctgctttacgaaaacaaaattgttctgttcgactacaagacagaccgctatgatgaaccaagtcaactcgtagaccgctatcgtggtcagttagctctatacgaagaggctttatcacgagcctattcgattgaaaatattgaaaaatacttgattttactcggtaaagacgaggttcaagttgtaaaagtataa

SEQ ID NO: 9601 - DNA, 2214 bp, Streptococcus pneumoniae
  CDS (1)...(2214)
atggcaaaacaagtgtttcaaacgacttttgcgggtcgtgagttaattgtagaaactggtcaggttgctaagcaagcaaatggctctgttgtcgtacgttacggtgagtcaactgtcttgactgctgccgttatgtctaagaaaatggcaactggggatttcttcccactccaagtcaactacgaagaaaaaatgtatgcggctgggaagtttcctggtggctttatgaaacgtgaaggacgtccttcaacagatgcgaccttgacagcgcgtttgattgaccgtccgattcgtcctatgtttgcggaaggtttccgtaatgaagtccaagtcatcaatacagtgctttcttatgatgaaaatgcatctgcaccaatggctgctatgtttggttcatctttggcactgtctatttcagatattccatttgacggaccaattgctggggtacaagtgggatatgtagatggccaaatcatcatcaacccaagtcaagaacaagcagagcaatctcttcttgaattgacagtagctggaaccaagcacgctatcaacatggtagagtctggtgccaaagaattgtcagaagaaatcatgttggaagcgcttcttaaagggcacgaagctgtcaaagaattgattgccttccaagaagaaatcgttgctgctgtcggtaaagaaaaagcagaagtggaattgcttcacgtggatgctgaattgcaagctgaaatcattgcagcctacaacagtgacctccaaaaggcagttcaagtagaagagaaattggcccgtgaagctgcaactcaagcagtgaaagaccaagtgactgccgtttacgaagaaaaatatgcgaaccacgaagaatttgaccgtattatgcgtgatgtggctgaaatcttggaacaaatggaacacgcagaagtgcgacgtttaattacagaagacaaggtgcgtcctgatggtcgtaaggtcgatgaaatccgtcctttggatgcggttgttgacttccttcctcgtgtacatggttcaggtctctttactcgtgggcaaactcaagctctttcagtcttgaccttggctccgatgggagaaactcaaatcattgatggtttggatccagagtacaagaaacgctttatgcaccactataacttccctcaatattctgtaggggaaacaggtcgttacggtgcgccaggtcgtcgtgaaatcggtcacggtgcccttggtgagcgtgctcttgctcaagtcttgccaagcttggaagaattcccatacgctatccgtctagtagcagaagttttggaatcaaacggttcttcatctcaagcttctatctgtgcgggaactcttgcccttatgactggtggtgtgccaatcaaggcgccagtagctggtattgctatgggacttatctcagatggaaataactacacagtattgacagatatccaaggtttggaagatcactttggagatatggacttcaaggttgcaggtactcgtgatgggattacagcccttcaaatggatatcaagattcaagggattactgcagaaatcttgacggaggctcttgctcaagccaagaaagcgcgttttgaaatccttgatgtcattgaagcaaccattccagaagttcgtccagaattggctccaactgctccgaaaattgatacgatcaagattgatgtggacaagattaagattgtcatcggtaagggtggagaaaccatcgacaagattatcgctgaaacaggtgttaagattgatatagacgaagaaggaaatgtgtctatctactctagtgaccaagatgctattaaccgtgccaaagaaattattgctggtttggttcgtgaagccaaagtggatgaagtttaccgtgctaaagtcgttcgtatcgagaaatttggtgcctttgttaacctctttgataagacagatgcccttgttcatatctctgagatggcttggactcgtaccaatcgtgtagaggatttggtagaaatcggggatgaagttgatgttaaggttatcaagattgatgaaaaaggccgtatcgatgcctctatgaaggctcttctacctcgtccgccaaaacctgagcatgatgaaaaaggtgaaaagtctgagcgccctcaccgcccacgtcatcacaaggatcacaaacctaagaaagaatttacagaaacaccaaaagattcagagtaa

SEQ ID NO: 9602 - DNA, 1128 bp, Streptococcus pneumoniae; identical to SEQ ID NO: 9285
  CDS (1)...(1128)

SEQ ID NO: 9603 - DNA, 510 bp, Streptococcus pneumoniae
  CDS (1)...(510)
atgattagaaaagtagaaatggcagatgttgaggtgttggctaaaattgccaaacaagcctttcgtgaaacctttgcgtatgataatacggaagagcagttacaggaatactttgaagaggcttatagtctgaaaactttgtcaactgagttgggaaatcctgactctgaaacctatttcattatgcatgaggaggagatagctggttttctcaaagtcaactggggaagtgctcaaactgagagagaattagaggacgcttttgaaattcaacgcctctatgtgctacaaaaattccaaggatttggactaggtaagcaactgtttgaattcgcacttgaacttgctacaaaaaatagtttttcttgggcttggctaggtgtttgggagcataatacaaaagctcaagcgttttataatcgatatggttttgaaaaatttagccaacatcattttatggttggtcaaaaagtagatacggattggttactgagaaagaaattaaggtaa

SEQ ID NO: 9604 - DNA, 1329 bp, Streptococcus pneumoniae
  CDS (1)...(1329)
atgtatgtgagaaaggaagagcctgagggctcagacaagattatgacttcagttgttgttgtaggtacccaatggggtgatgaaggtaaagggaagattacagacttcctttcagcgaatgcagaagtgattgcacgttaccaaggtggtgataatgctggtcacacgattgtgattgacggtaagaaatttaagttgcacttgattccatctgggattttcttccctgaaaaaatatctgtcattgggaatggtatggttgtaaatcctaaatctcttgtaaaagagttgagctatcttcatgaggaaggtgtaacaactgataacttgcgtatttctgatcgtgcgcatgttattttgccttatcatatcgagttggatcgcttgcaagaagaagctaagggcgacaataagattggtacgacaattaagggaattggtccagcttatatggacaaggctgctcgtgttggaattcgtattgcagatcttttagataaagatattttccgtgagcgtttagaacgtaaccttgctgaaaagaatcgtctttttgaaaaattgtatgacagtaaagcgattgttttcgatgatatttttgaagaatattacgaatatggtcaacaaatcaagaaatacgtgatagatacatctgttatcttgaatgatgcgcttgataatggcaaacgtgtgctttttgaaggtgcacaaggtgttatgctagatatcgaccaaggtacttatccatttgttacgtcatcaaaccctgtagctggtggtgtgacaattggttctggtgtcggtccaagcaagattgacaaggttgtaggtgtatgtaaagcttatacgagtcgtgtaggagatggtcctttcccaactgagttgtttgatgaagtgggagaacgtatccgtgaagtgggtcatgaatatggtacaacaactggtcgtccacgtcgtgtaggttggtttgactcagttgtgatgcgtcatagccgtcgtgtttctggtattactaacctttctttgaactctattgatgttttgagcggtttggatactgtgaaaatctgtgtggcctatgatcttgacggtcaacgtattgactactatccagctagtcttgagcaattgaaacgttgcaagcctatctatgaagagttgccaggttggtcagaagatattaccggagttcgcaatttggaagatcttcctgagaatgcgcgtaactatgttcgtcgtgtgagtgaattggttggcgttcgtatttctactttctcagtaggtcctggtcgtgaacaaacaaatattttagaaagtgtttggtcctaa

SEQ ID NO: 9605 - DNA, 1473 bp, Salmonella typhi
  CDS (1)...(1473)
  misc_feature (1)...(1473): n = A,T,C or G
atggtacctgtggtcgcgcttgtcgggcgccctaacgtcggaaaatccacgctatttaaccgtctgacccgcacccgagatgcgttggttgcggatttcccgggtctgactcgtgaccgtaagtacggtcgtgcggaggttgaaggccgcgagtttatctgtatcgacaccggcggtattgacggcaccgaagacggcgtcgaaacgcggatggcggaacagtcgctgctggcgattgaagaagcggatgtggtgttattcatggtagatgcgcgcgctggtctgatgccggcggatgaagcgattgccaaacatctgcgctcccgtgaaaaaccgaccttcctggtggcgaataaaacggatggtctcgatcccgatcaggcggttgtcgatttttactcgctgggattaggcgaaatttatcctatcgccgcctcacatggtcgcggcgtattgagcctgctggaacatgtgcttctgccgtggatggatgatgtcgcaccgcaggaagaagtggatgaagacgcggaatactgggcgcagttcgaggcggaacaaaatggcgaagaagcgccggaagatgattttgacccgcaaagcctgccgataaagctagcgattgtcggtcgcccgaacgtaggtaagtccacactcactaaccgtattctcggcgaagagcgcgtggtggtatacgacatgccgggcaccactcgcgacagtatttatatcccgatggaacgcgacgaacgggaatatgtgctgattgacacggnnngggtgcgtaagcgcggaaaaatcaccgatgcggtagaaaagttctcggtgattaaaacgttacaggcgattgaagacgctaacgtcgtactgttggttatcgatgcgcgcgaggggatctctgaccaggatttgtctctgctgggctttatcctcaatagtgggcgctcactcgttatcgtagtcaacaaatgggatggcctgagccaggaagtcaaagagcaggtgaaagagacgctggatttccgtctgggctttattgattttgcccgcgtgcactttatctctgcgctgcacggcagcggtgtcgggaacctgtttgagtccgtacgcgaggcttacgacagttccactcgccgggtgagcactgcgatgctgacccgtatcatgacgatggcggtggaagatcatcagccgccgctagtgcgcggtcgccgtgtgaagctgaaatatgcccacactggcggctataacccgccgattgtggttattcacggcaaccaggtaaaagatctgccagactcctataagcgctatctgatgaactacttccgcaagtcgttggaagtgatgggtacgccgattcgcattcagtttaaagaaggggagaacccgtatgcgaacaagcgtaacacactgacgccaacgcaaatgcgcaaacgtaagcgtctgatgaagcatatcaagaaaagcaagtaa

SEQ ID NO: 9606 - DNA, 1275 bp, Salmonella typhi
  CDS (1)...(1275)
  misc_feature (1)...(1275): n = A,T,C or G
gtggcaaaaaacattcaagccattcgcggcatgaacgattatctgcctggcgaaaccgccatctggcagcgcattgaaggcacactcaaaaacgtgctcggcagctacggttacagtgaaatccgcttgccgattgtagagcagaccccgttattcaaacgcgcgatcggtgaagttactgacgtggttgaaaaagagatgtacacctttgaggatcgcaacggcgatagcctgacattgcgccctgaaggtacggcgggctgtgtacgcgccggcatcgaacatggtctcctgtacaatcaggaacagcgtttgtggtatatcgggccgatgttccgtcatgagcgtccgcaaaaaggccgctaccgtcagttccatcagctaggcgccgaagtctttggcttacaaggcccggatatcgacgcggaactgattatgctgaccgcacgctggtggcgcgcgctgggcatctctgaacacgttagcctggagctgaactctattggttccttagaggcgcgtgcgaactatcgcgatgcgctggtcgcgttcctcgaacagcatcaagagacgctggacgaagactgcaaacgccgtatgtataccaatccgctacgcgtgctggattcaaaaaatccggacgtgcaggcgctgctcaacgacgcgcctgttctcggcgactatctcgatgacgattcacgcgagcactttgccggcctgtgtaaattgctggacgcggcggggattgcctacaccgtcaaccagcgtctggtacgcggtctggattactacaaccgcaccgtatttgaatgggtaacaaacagtctggggtcacaaggcnccgtctgtgcgggtggtcgttatgatggtctggtggaacaactgggcggtcgcgctaccccggcagtgggctttgcgatgggcctggaacgacttgttttgttagttcaggcagttaatccggaatttattgcctctcctgttgtcgatatatacctggtagctgccggcgcacaaacgcagtctgcggcaatgacgctggcggagcggctgcgcgatgaaatgccaggcgtgaagctaatgacaaaccacggcggcggcaactttaagaaacagtttgcccgcgccgataagtggggcgcccgtattgcactggttcttggcgaatctgaagtcgccgatgggactgttgtagtgaaggatttgcgctccggtgagcaaacggcagtggcgcaggacagcgtcgccgcgcatttgcgcactttattgggctaa

SEQ ID NO: 9607 - DNA, 1359 bp, Salmonella typhi
  CDS (1)...(1359)
cccgctcacatgttatcctctcaaacttcctcaatttttaccgtaagccgccttaaccagacggttcgtctgctgttagaacaggagatgggacaggtatggatcagcggcgagatttctaatttcacgcagcctgcgtcgggccactggtactttacgctcaaagacgataccgctcaggtgcgctgtgcgatgttccgcaacagcaaccgccgggtgacgttccgcccgcagcacgggcagcaggtgctggtacgcgccaacattacgctgtacgagccgcgcggcgattatcaaatcatcgccgaaagtatgcagccggctggcgaaggcttgttgcagcagaagtatgagcagctaaaagccaaactccatgccgaaggcttgttcgatcagcagcataaacagccgttgccctccccggcccactgcgttggggtgatcacctcgaaaaccggcgcggcgctgcacgatatcctccacgtgttgaagcgtcgtgacccatccctgcccgttattatctatccaaccgcggtacagggcgacgatgcgccggggcagatcgttcgtgctatcgaactggcaaacacgcgcggcgagtgcgacgtgctgatcgtcggacgcggcggcggttcgctggaagatttgtggagttttaacgacgaacgcgtggcgcgggctatttttgccagccgtattccggtggtcagcgccgtcggtcacgaaaccgacgtcactatcgccgattttgtcgccgacctgcgcgcgccgacgccatcagcagcggcagaaattgtcagccgtaaccagcaggagttgttgcgtcagatccagtccgcccagcagcgtctgggcatggcgatggactactacctcgccaaccgcagccgtcgtttcacgcagatttttcaccgtctgcaacaacaacatccgcaactacgtctggcccgtcagcaaaccgcgctggaacgtctacgccaacggatgggatttgcgcttgaggccaggattaagcaggccactcagcgtcagcaacgcgtaagtcaacgcctgagccagcaaaatccgcagccgcgcattcaccgcgtgcagtcgcgcatccaacagctggaatatcgtctgacggagaatatccgctcacggttaagcgaacagcgcgagcgttttggcaacgcggtcacgcatctggaagcggtcagcccgttagccacgctggcgcgcggctatacggtttcgacgacaacggacggcaaggtgttgaaaaagatcaaacaggtcaaagcaggcgatatcatgaccacgcggctggaggacggctggcttgaaagtgaagtcaaatccgtcacgccgggaacgtaa

SEQ ID NO: 9608 - DNA, 678 bp, Salmonella typhi
  CDS (1)...(678)
  misc_feature (1)...(678): n = A,T,C or G
gtgcgtagcgccgaaccgatgctggcggactatgcgccgctgaacaaagtagatagcgcgcgacgttgcggcctttaccatggtcgtctggaaaagcagccgcagtttagtcttgaatcctggtgggccgagtacaatatcgacgggctgaccatcaaaacgttgccgggcgtattcagccgcgacggactggatgttggtagccaactgctgctgtctacgctgacgccgcacaccaaaggtaaagtgctggatgtcggctgcggcgctggcgtgctttccgccgcgctggccagccattcgccgaaagtgcgcctgacgctgtgtgacgtcagcgcgccggcggtggaagccagccgcgccacgcttgccgctaatggtcttgaaggcgaggtattcgccagcaacgtcttttcggaagtcaaaggacgttttgacatgatcatntccaacccgccgttccacgacggaangcaaaccagccttgatgcggcgcaaacgctcattcgcggcgcagtgcgcnatctgaacagcggcggagagttacgcatagtggcgaacgcctttctgccatatcctaagattctggatgagacatttgggttccatgaagtcatcgngcanaccgggcgctntaaggnttatcgtatngtgatgaccngtcaggngaagaactag

SEQ ID NO: 9609 - DNA, 1323 bp, Salmonella typhi
  CDS (1)...(1323)
gtgtttctcgcacaagaaattattcgtaaaaagcgtgatggtcatgcgttgagtgacgaagaaattcgtttctttatcaatggtattcgtgacaatactatctctgaagggcagattgccgccctggcgatgaccatcttcttccacgatatgaccatgccggagcgtgtttcgctgaccatggcgatgcgggattccggtactgtccttgactggaaaagcctgaatctcaatggcccgattgtcgataagcattcgaccggcggcgtaggggacgtgacgtctctgatgctggggccaatggtagcggcctgcggcggttatgtgccgatgatctccggtcgcggtctcggacataccggcggtacgctcgacaaactggaagcgatcccgggcttcgacatcttcccggacgacaaccgtttccgcgaaattattcaagacgtgggtgtggcgattattgggcaaaccagctcgcttgcaccggcggacaaacgtttttacgccacccgcgatattaccgcgacggtggactctattccgctgatcactggttccatcctcgccaagaaactggccgaagggctggatgcgctggtaatggacgtcaaagtcggcagtggcgcgtttatgccaacctatgaactttctgaagcccttgctgaagcgattgttggcgtggcaaacggcgcgggagttcgcactacggctttgttaaccgatatgaaccaggtgctggcttcgagcgccggtaacgcggtggaagtgcgtgaagccgtgcagttcctgaccggagaataccgcaatccgcgcttgtttgacgttaccatggcgctatgcgtggagatgctgatctccggccagctggcgaaagacgacgccgaagcgcgtgcgaaattacaggcggttctggataacggtaaagcggcagaagtctttggtcgtatggtggccgcgcagaaagggccgagcgatttcgttgagaactacgataaatacctgccgaccgccatgttgagcaaagcggtatatgctgataccgaagggtttatcagcgcaatggatacgcgtgcgctggggatggcggtcgtctcgatgggcggcggccgtcgtcaggcgtctgataccattgattacagcgttggctttaccgacatggcccgtctgggcgacagcatcgacgggcagcgcccgctggcggtgattcatgccaaagacgaagccagttggcaggaagcggcgaaggccgtcaaagcggcaattatccttgacgataaagcgccagcaagcacaccttcggtctatcgtcgaattactgaatag

SEQ ID NO: 9610 - DNA, 1383 bp, Salmonella typhi
  CDS (1)...(1383)
  misc_feature (1)...(1383): n = A,T,C or G
gtggcaaaagctcccaaacgcgcctttgtttgtaatgaatgtggtgccgattacccacgctggcaggggcagtgcagcgcctgccaggcctggaacaccattactgaggtgcgccttgccgcgtcgccgacggtggcgcgtaacgaacgtctgagcggatacgccggcagtgcgggcgtatcaaaagtgcagaaactgtctgacatcagtcttgaggaactgccgcgcttttctaccggttttaaagagtttgaccgcgtgctgggcggcggggtggtacccggcagcgccattttgattggcggtaaccccggcgcgggcaaatcaacgttgctgctgcaaacgctgtgcaaacttgccgagcagatgaaaacgctgtacgtcaccggcgaagagtcgctacagcaggtggcgatgcgcgcgcaccgtctcggcctgccgaccgctaatctgaatatgctctccgaaaccagcatcgagcagatctgcctgatagcggaagaagaacagccgaagctaatggtgatcgactccatacaggtgatgcatatggcggacatccagtcgtcgccgggcagcgtcgcccaggtccgcgaaacggcagcctacctgacgcgcttcgctaaaacgcgcggcgtggcgatcgtgatggtcggccacgtcaccaaagacgggtcgctggcggggccgaaagtgctggaacactgtattgattgctcagtattgctcgacggcgacgccgattctcgtttccgcacgctgcgcagccacaaaaaccgctttggcgcagtcaatgagctgggcgtcttcgctatgaccgaacaggggttgcgcgaagtgagcaatccgtccgccatctttttaagccgcggcgatgaggtcacttccggcagctcagtgatggtcgtctgggaaggtacgcgaccgttgctggtggagattcangcactggtcgatcactcgatgatggcgaaccccagacgcgtggcggtcggtctggaacaaaaccgtctggctatcctgctggcggtgctgcaccgacacggcggtctgcaaatgtcggatcaggacgtcttcgtcaacgtggtcggcggcgtgaaagtcaccgaaaccagcgcggatctggctttactgctggcgatggtctccagcctgcgtgacaggccgttgccgcaggatctggtggtgtttggcgaagtggggctggcaggcgagattcgtccggtgccgagcgggcaggagcgtatttccgaggcggcgaaacacggttttcgtcgggcgattgtgcctgccgccaacgtaccgaaaaagccgccggaaggaatgcaggtgttcggtgttaaaaagctcgcagatgcgttaagcgtgtttgacgacttataa

SEQ ID NO: 9611 - DNA, 1668 bp, Salmonella typhi
  CDS (1)...(1668)
  misc_feature (1)...(1668): n = A,T,C or G
gtggctcaattcgtttataccatgcatcgtgtcggcaaagtggttccgccgaaacgtcatattctgaaaaacatctcgctgagcttcttccctggcgccaaaatcggcgtgctgggccttaacggcgccggtaagtctaccctgctgcgcatcatggcgggtctcgataaagatatcgagggcgaagcgcgcccgcagcccggcattaagattggctacctgccgcaggaacctcagctaaacccggaacacacggtacgcgagtcgattgaagaggccgtttcggaagtggttaacgccctcaaacgtctggatgaagtgtacgcgctgtacgccgatccggatgccgacttcgacaagctggccgcagagcagggccggcttgaagagattatccaggcgcacgacggtcataacctgaacgtgcagcttgagcgtgctgctgacgccctgcgtctgccggactgggatgccaaagtcgaaaaactgtccggcggcgagcgccgccgcgtggcgctgtgccgtctgttgctggaaaagccggacatgctgctgctcgacgaacccaccaaccacctggatgncgaatctgttgcgtggctggaacgtttcctgcacgacttcgaaggcaccgtcgtggcgattacccacgaccgttacttcctcgataacgtcgccggctggattctggagcttgaccgcggcgnaggtattccgtgggaaggcaactactcctcctggctggagcagaaagatcagcgtctggcgcaggaagcgtctgccgaagcggcgcgccgtaaatccattgagaaagagctggagtgggtgcgtcagggcgcgaaaggccgtcagtcgaaaggtaaggcgcgtctggctcgctttgaagaactgaacagcgttgagtatcagaaacgtaacgaaaccaacgaactgtttattccaccaggaccgcgtctgggcgacaaagtcattgaagtcagcaacctgcgtaaatcctacggcgaccgcgtactgatcgacgacctgagcttctcggtaccgaaaggcgctatcgtcgggatcatcgggccaaacggcgtgggtaaatcgaccctgttccgcatgatgtccggtcaggagcagcctgatagcggcaccattacgctgggtgaaaccgtcaagctggcctcggtcgatcagttccgcgacgcgatggacaacagcaaaaccgtctgggaagaggtgtccggcgggctggatatcatgaagatcggcaacaccgaaatgccaagccgcgcctatgtaggccgctttaacttcaaaggcgtcgatcagggcaaacgcgttggcgaattgtccggcggtgagcgtggtcgtttgcatctggcgaagctgctgcaggtgggcggcaacgtcctgctgctcgacgaaccgacgaacgacctggatatcgaaaccctgcgcgcgctggaaaacgccctgctggagttccctggctgcgcgatggttatctcgcacgaccgttggttccttgaccgtatcgccacccacattctggattatcaggatgaaggtaaggtggaattcttcgaaggtaactttaccgaatacgaagagtacaagaaacgcactntgggcgccgaggcgctggagccgaagcgtatcaagtacaagcgtattgccaaataa

SEQ ID NO: 9612 - DNA, 648 bp, Salmonella typhi
  CDS (1)...(648)
  misc_feature (1)...(648): n = A,T,C or G
atgttacaggtataccttgttcgccacggtgaaacgcagtggaacgccgagcgacgtattcagggccaatcggacagtcccctgacggcaaaaggagagcagcaggccatgcaggtaggagaacgcgcccgcagcntcggcatcacccatatcatcagcagcgatttaggccgcacaaaacgcacggcggagattatcgcccaggcgtgcgggtgtgatattacctttgacttccgcctgcgcgagctggatatgggcgtgctggaaaagcgccagatcgattcgctgacggaagaagaagagggctggcgtcgtcagctggtcaacggcacgcaggatggccgcattcctggtggggaatcgatgcaggagttgagcgatcgcgttcatgccgcgctggcgtcctgtctggagctaccgcagggcagccgacctttattggtcagtcacggtatcgcgttgggctgtctggtcagtactatcctgggactacccgcctgggcggaacgccggttacgtttgcgcaactgctctatttcccgtatcgattaccaggaaagtcagtggctggcgtctggctgggtggtagaaaccgcaggggacgtttcgcatctggacacccctgcattggatgagctacagcgttaa

SEQ ID NO: 9613 - DNA, 930 bp, Salmonella typhi
  CDS (1)...(930)
atggtgaaagtgtatgccccggcttccagcgcgaacatgagcgtcggtttcgacgtgttgggcgcggccgtcacacccgttgacggcacgttgctgggcgatgtggtatccgttgaagcagcggatcatttccgtctgcataacctggggcgatttgccgataaactgccgccggagccgcgtgaaaatattgtttatcagtgctgggaacgtttttgccaggcattggggaaaaccatcccggtggcgatgacgctggaaaaaaatatgccgattggttccgggttagggtccagcgcctgttccgtcgtcgccgcgctggtcgcgatgaatgagcactgcggcaaaccgttaaacgacacgcgtctgttggcgctgatgggcgagctggaaggccgtatctccggcagcatccattacgataacgtcgcgccgtgctttcttggcggtatgcagttgatgattgaagaaaacggcattattagtcagcaggtgccgggctttgatgagtggctatgggtactggcttatccgggcattaaagtttccaccgcagaagcacgggccattttgcctgcgcagtatcgccgtcaggattgcattgcgcatggacggcatctggccggttttattcacgcctgttactcgcggcagccgcagcttgccgccgcgctgatgaaagatgttattgccgaaccataccgcgcgcgtttactgccgggctttagccaggcgcggcaggcggtgtcggagatcggcgcgctggcgagcgggatttccggatcggggccgacgctgtttgcgctatgcgataaaccggagacggcgcagcgcgtcgcggactggctgagcaaacattatctgcaaaatcaggaaggcttcgttcatatttgtcggctggatacggcgggcgcacgagtagtgggataa

SEQ ID NO: 9614 - DNA, 1458 bp, Salmonella typhi
  CDS (1)...(1458)
  misc_feature (1)...(1458): n = A,T,C or G
gtgtcggcatcaacaagagggacgttaatgcctgagtttttcagttttattaacgaaatactctggggctcggtaatgatttacctgctgctcggcgcaggatgttggtttacctggcgtaccggattcattcagtttcgttatattcgccaatttagccgcagtctgaaaggcagccttagcccgcagccaggcggcctgacgtcatttcaggcgctgtgtaccagcctcgcggcgcggattggcagcggtaatctggccggcgtggcgctggctatcgccgcaggcggtcccggcgcagtattctggatgtgggtctcggccatcattggtatggcgacctccttcgccgagtgttcgcttgcccagctttataaagaacgtgacccgacaggccagttccgcggcggcccggcgtggtatatggcgcgcgggctgggaatgcgctggatgggcgtggttttcgccctctttctgctcgtcgcctacgggttgatttttaatagcgtgcaggcgaatgccgtctcacgcgcgctccatttcgccttcaacattccgccgcttatctccggcattgctttggcgttctgtgccctgttaattatcatccgcggcataaaaggcgtcgcccgcntgatgcaatggctgattcccctcatcgcgttattgtgggtcgctggcagcgtattcatttgcctctggcatattgagcaaatgcctggcgttatcgcctcgatagtcaaaagcgcatttggctggcaggaagccgcggcaggcgcagccggatatacgctcacccaggctattaccagcggttttcagcgtgggatgttctctaatgaagcgggaatggggtcaacgcctaatgcggccgcagcggcaacgtcgtatccccctcaccctgtcgcgcaggggattgtgcaaatgattggcgtattcagcgacaccattatcatctgtaccgccagcgcgatgattatcctgctggcggggaatcacgcgtcccattcgtcaacagaaggcattcagcttctccaacatgcaatggtttcgttgaccggtgaatggggcgccagttttgtcgcgcttatcgtcattctgttcgcgttcagttctatcgtcgccaactatatttacgccgaaaacaatctcttttttctgcggttacataacgcaaaggccatctggctattacgtcttgcgacgcttggcatggtcatcgccggtacgcttatcagttttccgctgatatggcagctcgctgacatgatcatggcctgtatggccattaccaatctgacggcgattttgttgctctcaccggtggtgtataccctcgccggcgattatctgcgacaacggaaactgggcgtaagaccgcagttcgatccgcggcgcttcccggatatcgaaccacaactggcgccagatacctgggatgcggcatcgcgcgattaa

SEQ ID NO: 9615 - DNA, 1917 bp, Salmonella typhi
  CDS (1)...(1917)
atgggtaaaattattggtatcgacctgggtactaccaactcttgtgtagcgattatggatggaacgcaggcacgcgtgctggagaacgccgagggcgatcgcactacgccttctatcattgcttatacccaggatggtgaaactctggttggtcagccggctaaacgtcaggcagtgacaaacccgcaaaacaccctgtttgcgattaaacgcctgattggccgccgcttccaggacgaagaagttcaacgtgacgtttctatcatgccgtacaaaatcatcggcgccgacaacggcgacgcatggcttgatgtgaaaggtcagaaaatggcgccgccgcagatttctgccgaagtgctgaagaaaatgaagaaaacggctgaagattatctgggcgaaccggtaactgaagcggttatcaccgtaccggcttactttaacgatgcgcagcgtcaggctaccaaagatgctggtcgtatcgcggggctggaagttaaacgtatcatcaacgaaccgactgccgcagcgctggcttacggtctggataaagaagtcggcaaccgtactatcgcggtttacgacctcggtggtggtactttcgatatctctattatcgaaatcgacgaagttgatggcgaaaaaacctttgaagttctggcaaccaacggtgatacccacctgggtggtgaagacttcgatacccgcctgatcaactacctcgttgacgagtttaagaaagatcagggcatcgacctgcgtaacgatccgctggccatgcagcgcctgaaagaagccgcagaaaaagccaaaatcgagctgtcttctgcgcagcagaccgacgtgaacctgccgtacattaccgcagatgccaccggtccgaaacacatgaacatcaaagtgacccgtgcgaaactggaaagcctggttgaagatctggtgaaccgttctatcgagccgctgaaagtcgcactgcaggacgctggcctgtccgtgtctgatatcaacgacgtgatcctcgtcggcggtcagacccgtatgccaatggtgcagaaaaaagtggctgagttcttcggtaaagagccgcgtaaagacgttaacccggacgaagctgtggctatcggcgcagcggtacagggcggcgtattgaccggtgatgtgaaagacgtactgctgctggacgttaccccgctgtctctgggtatcgaaacgatgggtggcgtgatgactccgcttatcaccaaaaacaccaccatcccgaccaagcacagccaggtgttctctactgcggaagacaaccagtctgcggtaaccatccatgtgctgcagggtgagcgtaaacgtgcgtctgataacaaatctctgggtcagttcaacctggatggcatcaacccggcgccgcgcggtatgccgcagatcgaagtcaccttcgatatcgatgctgacggtatcctgcacgtctccgcgaaagataaaaatagcggtaaagagcagaagatcactatcaaggcgtcttctggtctgaacgaggaagaaattcagaaaatggttcgcgatgcagaagcgaacgctgaatccgaccgtaagttcgaagagctggttcagacccgtaaccagggtgaccatctgctgcacagcacccgtaagcaggttgaagaagcaggcgataaactgccggctgatgacaaaaccgctatcgagtctgcgctgagcgcgctggaaactgccctgaaaggcgaagataaagccgctatcgaagcgaaaatgcaggagctggcgcaggtttcccagaaactgatggaaatcgctcagcagcaacatgcgcagcagcaggctggctccgccgacgcttctgcaaacaatgcgaaagatgacgacgttgtcgacgctgagtttgaagaagtaaaagataaaaaataa

SEQ ID NO: 9616 - DNA, 564 bp, Salmonella typhi
  CDS (1)...(564)
atgtccttaattaacaccaaaatcaaacctttcaaaaaccaggcgttcaaaaacggtgaattcattgaagtcaccgagaaagataccgaaggccgctggagcgtcttcttcttctacccggccgattttacctttgtttgcccgactgaactgggtgacgttgccgaccattacgaagaactgcagaagctgggcgtagacgtttattccgtctcaaccgatactcactttacgcacaaagcatggcacagcagctctgaaactatcgcaaaaatcaaatatgcgatgatcggcgacccgactggcgccctgacccgtaacttcgacaacatgcgtgaagatgaaggcctggcagaccgtgcgacctttgttgttgacccgcagggtatcattcaggcgatcgaagttaccgctgaaggtatcggccgtgacgcgtctgacctgctgcgtaaaattaaagcagcacagtatgttgccgctcacccaggcgaagtatgcccggcgaaatggaaagaaggtgaagcgactctggctccatccttagacctggtcggtaaaatctaa

SEQ ID NO: 9617 - DNA, 354 bp, Salmonella typhi
  CDS (1)...(354)
gtgaaccatcaagagagagagcttatgtttggaaaaggcggtctgggcaatctgatgaagcaggcccagcagatgcaggaaaaaatgcagaaaatgcaggaagagattgcgcagctggaagtgaccggcgaatccggcgcgggtctggtgaaggttaccatcaacggtgcgcataactgccgccgtgtggaaattgacccaagcctgctggaagatgacaaagagatgctggaagatctggtcgctgcggccttcaacgatgcggcgcgccgcattgaagagacgcaaaaagagaagatggcttccgtctcttccggtatgcaactgccgccaggctttaagatgccattctga

SEQ ID NO: 9618 - DNA, 606 bp, Salmonella typhi
  CDS (1)...(606)
atgcaaaccagtccgctgttaactcagcttatggaagcgttgcgctgccttccgggcgtcggccctaagtcggcgcaacggatggcgtttaccctgttgcagcgcgatcgtagcggcggaatgcgcctggcgcaggcgctgacccgggcgatgtcggaaatcggccactgcgccgactgccgcacctttaccgagcaggatgtttgtaatatctgttcgaacccgcggcgccaggaaaacggccagatttgcgtggtggagagtcctgcggatatctacgccattgagcagaccgggcaattttccgggcggtatttcgtgctgatgggccacctgtcgccgctggacggcatcgggccggatgatatcggtctcgatcgtctggaacagcggctggcgtcagaaaaaatcagcgagctgatcctcgcgaccaacccgacggttgaaggggaggctaccgcgaactatattgccgagctgtgcgcggaggccggcgtcgaagccagtcgtatcgcccacggcgtgccggttggcggcgaactggagatggtcgacggtacgacgctgtcccactcgctggcgggacgccataagattattttctga

SEQ ID NO: 9619 - DNA, 645 bp, Salmonella typhi
  CDS (1)...(645)
atgcgtattattctgcttggcgctccgggcgcgggtaaaggaactcaggctcagttcatcatggagaaatatggtattccgcaaatctccactggcgatatgctgcgcgccgcagtgaaatcaggctccgagttgggcaaacaggcgaaagatatcatggacgccggtaaactggtgaccgatgaactggtgattgcgctggttaaagagcgtatcgcccaggaagactgccgtaacggttttctgctggacggtttcccgcgcacgatcccgcaggctgacgcgatgaaagaagcgggtattgtggtggattacgtgctggaattcgacgtaccggacgaactgatcgttgaccgtattgtgggtcgtcgcgtacacgccgcctctggccgcgtttaccacgttaagtttaatccgccgaaagtggaaggcaaagatgacgtcaccggcgaagatctgacgacccgtaaagacgatcaggaagagaccgttcgcaaacgtctggtggaatatcatcagatgaccgcgccgctgattggctactaccagaaagaagcggaagcgggcaacaccaaatacgctaaagttgacggtacgcaggccgttgccgacgtgcgcgcagcgctggaaaaaatcctcggttaa

SEQ ID NO: 9620 - DNA, 2529 bp, Salmonella typhi
  CDS (1)...(2529)
atgaccaatcataaaggagtttttactatgtctcaaactatcgacctgaccctggacggtttgtcctgcggtcattgcgttaaacgcgtgaaagaaagtcttgaacaacgtccggatgttgagctggcggacgttaccgtaaccgaagcgcacgttaccggtaccgccagtgcggacgcgttaattgaaaccatcaaacaagccgggtatggcgcgacgttaagccacccaaaggctaaaccgctgacggagtcatcaatcccgtcggaagcactggcagcggttcctcatgagcttccggtagcgacggccgatgaagaaagccaacagttgctgttaagcggcatgagctgcgccagttgtgtcacccgcgtacaacatgcgctacaaagcgtaccgggcgtcacgcaggcacgggtaaacctggcggaacgcactgcgctggtgatgggcagcgcgtccgccgctgatttagtgcaggcggtggaaaaagccggctacggcgcagaggcgattgaagatgacatcaaacgccgcgagcgccagcaggaaaccgccatcgccaccatgaaacgttttcgctggcaggccatcgtcgccctggcggtcggtataccggtcatggtctgggggatgatcggcgataacatgatggtgaccggcgacaaccgcagcctgtggctggctattggcctgatcacgcttgcggtgatggtttttgcgggcggtcacttttaccgtaacgcgtggaaaagcctgctgaacggcacggcgacgatggatacgctggtggcgctcggcaccggggtcgcctggctctactccatgagcgtcaacctgtggccgcagtggttcccgatggaagcacggcacctctattacgaagccagcgcgatgattatcggtctgattaatctcggacacatgctggaagcgcgcgcccgtcagcgttcctcaaaagcgctggaaaaattactcgatctcaccccgcccaccgcacgcgtcgtaacagaagacggcgaaaaaagcgtcccgctggcggacgttcagccagggatgctgctgcggctcactaccggcgatcgcgtgccggtggatggcgaaattacccagggcgaagcgtggcttgatgaagccatgctgaccggcgaacctattccgcagcaaaaaggcgaaggcgacagcgttcatgccggcaccgtcgtccaggacggcagcatcctgttccgcgccagcgcggtgggcagtcataccacgctgtcacgcattattcgcatggtacgccaggcgcagagcagtaaaccggaaattggccaactggccgataaaatctccgcggtattcgttcccgtagtggtggccattgcgctgttcagcgccgctatctggtatttcttcgggccggcaccgcaaattgtttatacgctggtcatcgccaccaccgtactgattatcgcctgcccttgcgcattaggcctggcgacgccaatgtcgattatttccggcgtaggccgcgcggccgaattcggcgtgctggtacgcgacgccgatgccctgcaacgcgccagtacgttggataccctcgtttttgataaaaccgggacgctgacggaaggcaagccgcaagtggtggcggtaaaaacctttaacggcgttgatgaagctcaggcattacgtctggcagccgcgctcgaacaaggctccagccacccgctggcccatgcgattctggaaaaagccggcgatgataaactgccgcaggtgaacggtttcagaacgctgcgcggactgggcgtcagcggtgaagcggaaggtcatcaactgcttctggggaaccaggcgttactgaacgaacagcacgtcgccacggatgatatgacggcggaaatcaccgcgcaggcctcgcaaggctcgactccagtcctgctggcgattgacggtaaagcggcggcgttactggcggtacgcgatccattgcgcagcgatagtattgccgcacttgaacgcctgcacaatgccggataccgtctggtaatgctcaccggggataacccaacgacggctaacgcgattgccaaagaagcgggtattgatgaagtgattgcgggcgttctgccggatggcaaagccgatgcgattaaacgcctgcaaagccagggtcgtcaggttgcgatggtcggcgatggtatcaacgatgcgcccgcgctggcgcaggcggacgtcggtatcgcgatgggcggtggcagcgatgtggcgattgaaaccgcggcgattacgctgatgcgccatagtctgatgggcgtggcggatgcgctggccatttcgcgcgcgacgttgcgcaatatgaaacaaaacctgcttggcgcatttatctacaacagcattggtatcccggtggccgccggtattctgtggccgtttaccggtaccttgttaaacccggtagtagcgggcgcggcaatggcgctgtcttccattaccgtcgtcagcaatgccaaccggctattgcgctttaaaccgaaagcgtaa

SEQ ID NO: 9621 - DNA, 3150 bp, Salmonella typhi
  CDS (1)...(3150)
atgcctaatttctttatcgatcgccctatatttgcgtgggtgatcgccatcatcatcatgttggcaggggggctcgcgatcctcaaattgccggtagcgcaatatccgacgattgcgccaccagcagtgacgatctccgcaacctaccctggcgctgatgcgaaaacggtacaggataccgtcacgcaggttatcgaacagaatatgaacggtatcgataacctgatgtatatgtcctccaacagtgactccacggggaccgtacagatcacgctgacctttgaatccggcaccgatgcggatatcgcgcaggttcaggttcagaacaagttgcaactggcaatgccgttacttccccaggaagtacagcaacagggcgtgagcgttgagaagtcctcaagtagcttcctgatggtagtgggcgtcattaacaccgacggcaccatgacccaggaggatatttcggattacgttgccgccaatatgaaagatccgatcagccgtacctctggggtgggcgacgtccagctgtttggttcgcagtatgcgatgcgtatctggatgaatccgacagagctgaccaaataccaactgacgccggtcgacgtgattaacgcgatcaaagcgcagaacgcccaggtcgcggcaggtcagctcggtggtacaccgccggtaaaaggccagcagcttaacgcatcgattattgcccaaacgcgtctgacctcaacggatgagtttggcaaaatcctgctgaaagtgaatcaggatggctctcaggttcgtctgcgggatgtagcgaaaattgagcttggcggcgaaaactacgacgtcatcgcgaaatttaacggtcagccagcgtcaggtcttggcatcaaactggctaccggcgccaacgcgctggataccgctaccgctattcgcgccgaactgaaaaaaatggaaccgttcttcccgccagggatgaaaatcgtctacccgtatgacaccacgccgttcgtgaagatctctattcatgaagtggtaaaaacgctggtcgaagcgattatcctcgtgttcttggtgatgtacctgttcctgcagaacttccgcgcgacgttgattccgactattgcggttccggtggtgttgttgggaacctttgccgtgcttgcggcattcggtttctcgataaacacgctgacgatgttcgggatggtgctcgccatcggcttgctggtggatgacgccatcgtggtggtcgagaacgtcgaacgtgttatgacggaagaaggccttccgccgaaggaagcgacgcgcaaatccatgggccagattcagggcgcattggtgggtatcgcgatggtactgtcggcggtatttattccgatggccttctttggcggctcaaccggggcaatttatcgtcagttctctatcaccatcgtatcggcgatggcgctgtcggtgctggtcgcgctgatcctgacgcccgcgctgtgcgcgacgatgctcaaacccgtcgccaaaggcgatcatggcgaagggaaaaaaggctttttcggctggtttaaccgcctgtttgataagagcacgcatcactacaccgatagcgtatggaatattctgcgcagcaccgggcgttatctgctgctctatctcattatcgtcgtcggtatggcttatctgttcgttcgtctgccaagctctttcttgccggatgaagaccagggcgtattcctgacaatggtccagctccccgccggcgcgacgcaagagcgcacgcaaaaagtgctggatgaggtcacggattactatctgaacaaagagaaagccaacgttgaatcggtattcgccgtcaacggcttcggttttgcagggcgcggtcagaataccggtattgcatttgtgtcgttgaaagactgggccgatcgtccaggcgaaaaaaacaaggttgaagcgattacccagcgggcaaccgcagcgttttcacaaattaaagatgcgatggtcttcgcctttaacctaccggcgattgttgaactgggcaccgcaaccgggtttgacttcgagttgattgaccaggcgggacttggtcacgaaaaactcacccaggcacgtaatcagttgttcggcgaggtggcgaaatatcctgatctgttggtcggcgttcgacctaacggtctggaagatacgccgcagtttaaaatcgatatcgaccaggaaaaagctcaggcgctgggcgtgtctattagcgacattaataccacgctgggcgcagcatggggcggcagctatgtaaacgactttatcgatcgcggtcgtgtgaagaaagtttacgtgatgtccgaagcgaaataccgcatgttgccggatgatattaacgactggtacgttcgtggtagcgatggtcagatggtgccgttctccgcattctcctcttcccgctgggaatatggttcgccgcgtctggaacgctataacggtctgccttcgatggaaattctgggtcaggcggcgccaggcaagagtactggtgaagcgatggcgatgatggaagaactggccagcaagctgccgtcaggcattgggtatgactggaccgggatgtcctaccaggagcggttgtccggcaaccaggcccctgccctgtatgctatctcgctaatcgtcgtcttcctgtgtctggcggcattgtatgagagctggtctatcccgttctccgtaatgctggttgttccgcttggggttatcggcgcgctgctggccgcgaccttccgcggactgactaacgacgtttacttccaggtgggcctgctcacaaccattgggttgtcggcgaagaacgcgatacttatcgtcgaattcgccaaagacttaatggataaagaagggaaaggtctggtagaagcgatgctggaggccgtccggatgcgtttgcgtccgattctgatgacctcgttagcgttcatgctgggggttatgccgctggttatcagttccggcgcgggttccggcgcgcagaatgcggtaggtactggcgtactgggcgggatggtaacggcaaccgtactggctattttcttcgtaccagtcttcttcgtggtggtacgccgccgctttagccgtaaaagcgaagatattgagcatagtcattcgacagaacatcgctga

SEQ ID NO: 9622 - DNA, 831 bp, Salmonella typhi
  CDS (1)...(831)
atgggattgcgtcagagtttacgcattgcggccagcacgctattactggcctgcggattacagtttgcccatgccgatggttccccgcaaacgatcgtatttggcgtcgcgccagggccgtatggcgacatggtgaagcaggcgattgcgccgacattaaaagaaaaagggtataaggtcgtggtgcgcgagtttagcgactatgtccagcccaatatggcgttagctaacggcagcatcgacgccaacctctttcaacataccctctattttgacaaattcaccgctgacaaagggctgaagctcagcaaacttattgtggtaccgaccgccgggatgggcttctattcacgtaaaatcaacagcctggatgcgcttaaaaaaggggacattattaccctctccaacgatccgaccaacctggcgcgcggccttcgcttcctgcaatcgttggggcttatcacgattaagcacaatatcgatccgaccaaagcctctgaacgagatatcgccagcaatccaaaaggactggttttcaaaccgctggaagccgcacagctaccgcgcacgctggacggcgtgaccggcgcgctggttaacgggaactttgcggtggcggcaggactcgatctctccagcgcgattaagcaggaacacctggatgagaatctgaaaaatatcattgcggtacgcagtgaagatgccgataagccgtttgccaaagatattgtcgaggcggtgaaatcgccggcttatcgcgcggtcatcgacgatccaaagaatatttatagcgccttccagaaaccggaatggatgaccgcgacaccctga

SEQ ID NO: 9623 - DNA, 894 bp, Salmonella typhi
  CDS (1)...(894)
  misc_feature (1)...(894): n = A,T,C or G
gtgaatatgattgaaatagaaaaagtctgcgtcgattttaccgccggtcgcggtacccccacgcgcgcggtggatgatgtgagcctgcatatcgccgcgggcgagatttttggcattgtcggtaccagcggcgcaggaaaaagcactctgctgcgtaccctgaacgccttaacgcgtcccagtcaggggcgcgtcaacgtcaacggcgtggaaatttctgcgctggacggaaaagcgttacgccaggcgcggcagcgtattggtatgattttccagcattttaacttaatgcatacccggacagtggcgaaaaacgtggcgtttagcctgaaagcggctggctgggaacgcagcaaaatcgcgccgcgggtggcggaaattttaacgctggtgggccttgccgataaagcgaactgttttccggtacagctcagcggcgggcaaaaacagcgggtggggatagcccgcgccatcgctaaccatccggatgttttgctgtgtgacgaaccgacttccgctctggatctggaaacttccgccacgattctggccctgctcagacagatcaacgcgcagctcgggattactattgtgctgatcacccatgaaatgaacgtgatcaaatctatttgcgatcgcgtggcggtgatgtcgggcggtaagattgtggaatcgggcgaggtgtttgatgtgnttgcccacccgcaacacgctttcacacagcanctggtgtctcatacccnnaatttgaccctgccggnaacgcttacnggaacacctgcccgggcagttgctgaaaattttgtttatcggcgattcggcggagcagccggtactgtcggaggtggcgatcaagtttggcgtcgcggtcaatatcctgcatggcaagattga

SEQ ID NO: 9624 - DNA, 660 bp, Salmonella typhi
  CDS (1)...(660)
  misc_feature (1)...(660): n = A,T,C or G
gtggatgatttattgccggatttaacgctggcgtncaatgaaactttccagatgttgagtatttcaacggtgctggcgattcttggcggtctaccgctcggttttctgatttttgtcaccgatcgtcatctgttctggcagaaccgttttatttatcttgtcgcctcggttctggtgaatattatccgctcggtgccatttgttattttactggtgctgttactgccgctaacgcagcttttgctgggcaatacgataggcccgattgcagcctccgtcccgctgtcggtggccgcaatcgcgttttatgcacgcctggtagatagcgcgctccgtgaagtcgataaagggattattgaggcggcgctggcattcggcgctagtccgatgcgtattatctgtaccgtactgttgccggaagccagcgcagggctgctgcgcggcctgacgattacgctggtaagcttaatcggctactcggcgatggccgggattgtcggcggcggcggggtaggcgacctggcgattcgctatggctactaccgttacgaaaccgaagtgatggttgttaccgtagtggcgctgattgtgctggttcaggtcgttcagatgctgggcgactggctggcaaaacgtgccgacaagcgcgacagacactaa

SEQ ID NO: 9625 - DNA, 1413 bp, Salmonella typhi
  CDS (1)...(1413)
atgaagtgtgcactatttaaaaactatctgtatccatacaaggagtttgttatgtcttttgatttaattattaagaacggtactgtcatcttagaaaacgaagcgagagttatcgatatcgccgtccagggcggaaaaatcgccgcgattggcgagaacctgggggaagcgaaaaacgtgctggatgcgacgggattgatcgtttcgccgggcatggttgacgcgcatacccacatttctgaaccgggccgtacccactgggaaggctatgaaaccggtacgcgcgcggcggcgaaaggcggtattaccacgatgattgagatgccgctcaatcagctgccggcgacggtcgatcgtgagacgattgaactcaagtttgacgcggcaaaaggtaaattgaccatcgacgccgcgcagttgggcggtttggtctcttataacctggatcggctgcatgagctggacgaagtgggcgttgtcggcttcaagtgctttgtcgccacctgcggcgatcgtggcatcgataatgattttcgcgacgttaatgactggcagttttacaaaggcgcgcaaaaactgggagagatggaccagacggtactggtacattgcgaaaatgctctgatttgcgatgagctgggcgaagaagctaaacgcgaaggtcgcgtaacggcgcatgattatgtcgcctcacgtccggtatttactgaagtggaagccattcgtcgcgtgctgtatctggcgaaagcggcaggttgccgtctgcacgtttgtcatatcagcagcccggagggggtagaggaagtaacgcgtgcgcgtcaggaaggccaggatgtcacctgtgaatcgtgcccgcactattttgtcctcgataccgatcagttcgaagagattggcaccctggcaaaatgttctccgccaattcgcgaccaggaaaaccagaaagggatgtgggaaaaactgtttaacggcgaaatcgactgcctggtatccgaccactctccatgtcctccggaaatgaaagcaggcaatatcatgcaagcatggggtggaattgccggactgcaaaactgcatggacgtcatgtttgatgaagcggtgcaaaaacgcggtatgtcgttgccgatgtttggcaaattaatggcgaccaacgccgccgatatttttggtctgaaacataaaggacgtattgcccccggcaaagatgctgacctggtctttattcagcctgacagcagctatgttctgaaaaatgaagatctggaatatcgccataaagtcagtccgtatgttggccgtactattggcgcgcgtattaccaaaacgattttgcgcggcgatgttatttatgacatcgagcatggcttccctgtgccgccaaaaggtcagtttatccttaaacatcagcagtaa

SEQ ID NO: 9626 - DNA, 3885 bp, Salmonella typhi
  CDS (1)...(3885)
  misc_feature (1)...(3885): n = A,T,C or G
atgacgcagcgtntaccgttagtcgccgcccagccggggatctggatggcggaaaaactctctgatttaccctccgcctggagcgtggcgcactatgtggaactgaatggcgagctggatgcccccttgctggcaaaagcggtagcggtagggatgcaacaggcggatacgctacggatgcgttttaccgaagagaacggcgaggtctggcaatggatagatcctgagcacaccttcggcgaacccccgattgccgatttacgcgaccagcccgatccgcatctcgcggcgctggcgttaatgcaggcggatttacggcaaaacctgcgcgcagatagcggtaagccgctggcgtttcaccagttaatccgcattgatgatacccgctggtattggtatcagcgctatcaccatttgctggtggatggctttagcttcccggcgataactcgccagattgcggcgatttatcgcgcctggcagagcgacgcccctacgccggagtcgccttttaccccctttgtggatgtggttgaggaatatcagcgctatcgccagagcgaggcctggcagcgtgacggcgccttctgggcgcagcagcgccgcgagctgccgccgccggcgtcaatgtctgccgcgccgttgccggggcggtcggcgagcgcggatattctgcgtatgaaattgagcgcgccggcgggggcgtttcgccaactggcggcgcacatgcctgagataccgcgagcggatcttgccctggcgctggtgacgttgtggctgggacgattatgtgggcgtatggattatgccgccggatttatctttatgcggcggatgggctcagcggcgttaacggcgaccgggcctgtccttaacgtgttgccgctggcggttaaccttcatgcgacggaagatctgccaacgctggcgaagcgtcttgcggcgcagttaaagaagatgcgccgccaccagcgttacgacgccgaacagattgtacgcgatagcgggcgagccgcaggggaaacgccgctatttggcccggtgctcaacataaaagtatttgattatcatctggattttcctggcatacaggcgcaaacccataccctggcgacggggccggttaacgatcttgaactggcgctttttccggatgaaaacggcggtctggatattgaattgctggcgaatgcgcagcgttacgatgacgccacgctttcccgccatgccttacggttgatggcgcttatcacgcagtttgctgataacccggcgctgcgctgcggcgatgcgcaaatgctgctggcggaagaacaaacgcaattaacacaccttaataatacggcggtaacgattcccgccgccacgcttagcgatttggtggcgcagcaggcgcaaaaaacgccagaggcttccgcgttggcagatgcgcattatcactttacctaccgtgaaatgcgcgaacaggttgtggcgctggcatacgcgctgcgggaacgcggcgttcagcctggcgatagcgtggcggtggcgttgccgcggtcggtttttctgaccttagcgctgcacggcattgtcgaagcgggcgccgcctggctgccgctggataccggttatcctgacgatcggctgcgaatgatgctggaagatgcgcagccgaaactgttaattacgactcangcgcagctggcgcgctttcacgatattccggggatggaatatttgtgttatagccaaccgctaccggtcagtgacgccactccgctggggctgtcgctaccgcatcataccgcttacatcattttcacctctggttcgacgggcaggccgaaaggggtgatggtgggacaaacggcgatagtcaaccggctgctgtggatgcaggatcactatccgttgacggcggatgatgtagtagcgcaaaaaacaccgtgcagttttgacgtctcagtatgggagtttttctggccgtttatcgccggggcgaaactggtgatggctgaaccggaagcgcaccgcgatccgctcgcgatgcagcggttctttgcgcaatacggcgtcacgaccacccattttgtgccgtcgatgctggcggcctttattgcctcgctcacgccagcgtcggctgggaaaagctgcgcttccttaaagcgcgttttctgtagcggcgaggccctgccgacggcgctgtgccgcgaatgggagacgttaaccaacgcgccgctacacaatctgtacgggccaacggaggccgcggtggatgtgagctggtatccggcctgtggcgatgagctggcggctgttgacggcaacagtatcccgattggttatcccgtctggaataccggtttacgtattctcgatgcgcatatgcagccggtgccgccgggcgtggctggcgatctctatcttaccggtatccaactggcgcagggctatctggggcgtccggatcttaccgccagccgttttatcgccgatccttttgcgccaggtgaacggatgtaccgtaccggagatgtggcgcgctggctggattccggcgtggtggagtacctgggacgcagcgacgatcagctcaaaattcgggggcaacgtattgaactgggtgagattgaccgcgtcatgcaaacgctgccggatgttgaacaggcggtagcacatgcctgcgtctttaatcaggcggcggcgacgggcggggatgcccggcaactggtcggctatctggtgtcgcactccggtttaccgctggatttaccggcgctgcaggataaattacgccaaaaacttcccgcgcatatggtgccggttgtgctgttgcaacttgccagcttgccgcttagcgctaatggcaagctggatcgcaaagccctgccgctgccggatctgacgccgcgcgtgaaagggcgtgcgccgcagtccgcaacggagattgctgtcgccgcggcgttttcccgcctgctgggctgtgagattaacgacgttgaaagtgatttctttgcgctgggcggacactcgctgctggcgatgaaactggccgcgcagctaagccagacgtttaaccgccaggtgacgccggggcaggtgatggtggcgtctgacgtggcgcagttgagtaagctgctcgatactgacgatgacgaacgctcgcgcaatctggggttcgggccgctgttgccgctgcgtgaaagcgatggtccaacgttattttgtttccatccggcgtcggggttcgcctggcaatttagcgtattatcacgctatctcagcccgtcgtggtcgattatggggattcagtcgccgcgccccgttggccctatgcaaatcgcaaccacccttgatgaggtatgtgaacatcatctggcgacattgctcgcccggcagccgcatggcccttattatttattaggctattcgctgggcgggacgctggcgcaagggatcgccgcccggttgcgcgcgcgcggtgaaacggtggcgtttttggggttactggacacctggccgccggaaacacaaaactggcggggaaaagaggcgaatggcctcaatccggacgtattggcggaaattgaacgcgaacgcgcagcgtttgtcgccgcgcagcagggaaatgcctccgacgccttatttaccgccattgaaggcaattatgcggatgccgtccgtttgctgacgacggcgcatagcgcaccgtttgatggacatgccacgctctttgtggcggataaaacggtgccggaagacgtatcgcctgaacagagctggtcgccgtggatagcgtctttggctatttatcgccagccgtgcgcgcatgtagatattatttctccctccgcttttgaaactatcgggcccatcatcagcgaacttattaataaataa

SEQ ID NO: 9627 - DNA, 936 bp, Salmonella typhi
  CDS (1)...(936)
  misc_feature (1)...(936): n = A,T,C or G
gtgcggcgcgttattactactggccgccgatgcgtgcgcgcagcaactgtttatgccttatcagcttccagtgggcgtggtcaccgtcagcctcggcggtatttaccttatcgtcttgttaattcaggagtccngcaaaaaatgaccgaatccgtagcccgtttgcgcggcgaccagttaacgctgggttatggcagctataccgtcgcaaaaaaccttaatgtttcgattccggacggccattttaccgccatcatcggccctaacggctgcggcaagtcgacgttgctacgtacgctaagccgtctgatgacgcctgttgacggccatgtctggctggatggcgaacaaatacagcgttacgccagtaaagaggtggcgcggcgcatcggattgctggcgcaaaacgccaccacgccgggcgatatcaccgtacaagaactggtcgccagagggcgttatccgcatcagccgttatttacccgctggcgcaaggaagatgccgacgccgtcgccagtgctatgcgtgcaacaggtatcacctcactggcggcgcaaagcgtagacacgctgtccggcggccaacgtcagcgggcgtggatagccatggtgctggcgcaggaaacgtccatcatgctgctggatgagccgacaacgtggctggatattagccatcaaattgatttgttggaattgttaagcgatctcaaccgtgaaaaaggctatacgctagccgccgtcctgcacgacntgaatcaggcctgccgatacgccacacatttgattgcattacgcgaaggtaacattgtcgcacagggcgcgccgaaagagattgttaccgctgagcttatcgaaaaaatctatgggctgcgctgtatgattatcgacgatccggttgccgggacgccgctggtggtaccgctggggcggcgatag

SEQ ID NO: 9628 - DNA, 993 bp, Salmonella typhi
  CDS (1)...(993)
  misc_feature (1)...(993): n = A,T,C or G
gtgatgtntctttctcgtcggcttatcgtaagctgcctgcttctggcggctggctgcttcgccattggcttatggagcctgcaaagcggcgccgtgccccttgagaccgggcagattattgccgcgctgctgggcgacgcgccgcgtaatatcacccttgtcgtaaccgaatggcgactaccgcgcgtattaatggcgctactgattggcgctgcgcttggcgtcagtggcgcgatttttcagtcgttgatgcgtaacccgctaggcagccctgatgtgatgggctttaataccggcgcctggagcggcgtactggtcgcaatggtcctgtttggccagcatcttaccgcgatcgcgctggcggcaatggcgggcggtatcgtcacgtcattgattgtctggctgctcgcctggcgtaacgggattgaaactttccggctgattatcatcggtatcggcatccgcgcgatgttagtcgcctttaatacctggcttctgttgcaggcgtcgctggaaacggcgctcaccgccggcttatggaacgccgggtcgctcaacggtctgacatgggcaaaaacctggccttcggcgccgctgattatggtgatgctgacaggcgccgcgctactggtgcgtcgtatgcggctgctggagatgggcgatgacagcgcctgcgcgctgggtgttagcgtggagcggtcacgcctgatgctgatgctggtggcggtgtcgctcaccgctgctgcaacggcactggctggccccatctcgtttattgcccttgtcgcgccgcacatcgcccgtcgtcttagcggcacagcgcgctggggattaacccagtcggcgctgtgcggcgcgttattactactggccgccgatgcgtgcgcgcagcaactgtttatgccttatcagcttccagtgggcgtggtcaccgtcagcctcggcggtatttaccttatcgtcttgttaattcaggagtccngcaaaaaatga

SEQ ID NO: 9629 - DNA, 1419 bp, Salmonella typhi
  CDS (1)...(1419)
  misc_feature (1)...(1419): n = A,T,C or G
atgagccagaatgtttatcaatttatcgacctgcagcgcgttgatccgccgaaganaccgctgaagctcngtaagatcgagtttgttgaaatctacgnacngttttntgaaggtcaggcgaaagcccaggcggatcgctgtttgtcctgcgggaacccctactgcgagtggaaatgtccggtacataactacatcccgaactggctgaaactggctaacgaagggcgtatttttgaggcggctgagctatcgcaccagaccaacaccctgccggaagtgtgtggccgcgtctgcccgcaggaccgcctgtgcgaaggctcctgtacgctgcacgatgagttcggcgcagtgaccatcggtaacattgagcgctatatcaacgataaagcgttcgaaatgggctggcgcccggatatgaccggcgtgcgccagacggacaaacgggtagcgattatcggcgctggtccggcagggctggcgtgcgccgacgtgctgacccgcaacggcgtgaaggcggtggtctttgatcgccatccggaaatcggtggtctgctgaccttcggtattccagctttcaaactggaaaaagaggtgatgacccgtcgtcgcgagatcttcaccggcatgggtattgagttcaaacttaataccgaagtgggtcgtgatgtacagcttgaagatctgctgaaagattacgatgcggtattccttggcgtcggcacctatcagtcgatgcgcggcgggctggaaaatgaagatgcggacggggttttcgacgctctaccgttcctgatcgccaatacgaagcagatcatggggtttggcgaaaccagcgacgaaccatatgtcagcatggaaggcaaacgcgtggtggtgctgggcggcggcgataccgcaatggactgcgtacgcacttccatacgccagggcgcaacgcacgtaacctgtgcttatcgtcgtgatgaagagaacatgccgggttccagacgcgaagtgaaaaacgcgcgcgaggaaggtgtcgagtttcagtttaacgttcaaccgctgggcattgaagtcaatgccaacggcaaagtgagcggcgtaaaaatggtgcgtactgaaatgggcgaaccggatgccaaaggccgtcggcgggcggagatcgtcgccggttccgagcatgtggttccggctgatgcggtggtgatggcgtttggttttcgtccacacagcatggaatggctggcgaaacacagcgtggaactggactcgcagggacgaattatcgcgccggaacgcagcgataatgctttccagaccagcaacccgaaaatcttcgccggtggcgacatcgtgcgcggttccgatctggtggtgacggcgattgccgaaggccgtaaagcggctgacgggattatgaactacctcgaagtgtaa

SEQ ID NO: 9630 - DNA, 4461 bp, Salmonella typhi
  CDS (1)...(4461)
atgttgtacgataaatcccttgagaaggataactgtggtttcggcctgatcgcccacatagaaggcgaacctagccacaaggtagtgcgtaccgccatacacgcgctggcccggatgcagcaccgtggcgcgatccttgccgacggtaaaaccggcgacggttgcggcttgctgttacaaaaacctgaccgtttctttcgcatcgtggccgaagagcgcggctggcgcttagccaaaaactacgccgtcgggatgatctttttgaataaagatcctgaactggccgccgcgtcacgccatattgtcgaagaagaattacagcaggaaaccctgtcgattgtcggctggcgcgatgtgccaaccaatgaaggcgtgctcggtgaaatcgccctctcctccctgccgcgtattgagcagatttttgtcaacgctccggcgggctggcgtccgcgcgatatggagcgccgtctgtttatcgcccgccgacgcattgaaaaacgtctgcaggacgacaaagatttctacgtatgcagcctgtcgaacctggtcaacatttataaaggtctgtgtatgccggcggatctgccgcgcttctacctggatcttgcggatctgcgtctggaatcggccatctgcctgttccaccagcgcttttccactaacaccgtgccgcgttggccgctggcgcagccgttccgctacctggcgcataacggcgagattaacaccatcaccggcaaccgccagtgggcgcgcgcccgtacctataaattccagacgccgctgatcccggatttacaatccgctgcgccgtttgttaacgaaaccggttcggattccagctcgctggacaacatgctggaactgctgctggcaggcgggatggacattatccgcgccatgcgcctgttggtgccgcccgcctggcagaacaaccccgatatggaccaggatctgcgcgccttctttgactttaactccatgcatatggagccgtgggacggtccggcaggcatcgtgatgtccgacgggcgcttcgccgcctgtaaccttgaccgtaacggcctgcgcccggcacgctatgtcattaccaaagataagctgatcacctgcgcctccgaagtcggtatctgggactatcagccggatgaagtggtcgagaaaggccgcgtcggcccaggcgagctgatggtgatcgacacccgcggcggacgtattctgcattccgcggaaaccgatgacgatctgaaaagccgccatccgtataaagcgtggatggaaaagaatgttcgccgtctggtgccgtttgaagagttgccagatgaagaagtcggtagccgcgaactggacgatgacctgctcgccagctatcagaaacagtttaactacagcgccgaagagctggactccgttatccgcgtgttgggcgaaaacggccaggaagccgtcggttcaatgggcgacgataccccctttgccgtgctctccagccagccgcgtattatttacgactacttccgccagcagttcgcgcaggttactaacccgcctatcgacccgctgcgggaagcgcacgtcatgtcgctcgccaccagcatcggtcgcgaaatgaacgtcttctgcgaagcggaaggtcaggcccatcgcctgagttttaaatcgccaattctgctgtactccgatttcaaacagctcaccaccatgagcgagcatcactaccgcgccgactggcttgacattacctttgatgtcaccgaaaccacactggacgcgacggttaaggcgctgtgcgataaagcggaacagatggtgcgcaacggcaccgtgctgctggtcctctcggatcgcaatatcggtaagaatcgcctgccggtccccgcgccgatggcggtgggcgcggtgcagactcgtctggtcgatcaaagcctgcgctgcgacgccaacatcatcgtagaaaccggaagcgcccgcgatccgcatcactttgcggtactgctcggctttggcgcaacggccatctatccgtacctggcctacgaaacgctggggcgtctgattgatacccaggccatcgctaaaaactaccgtaccgtgatgcagaactaccgtaacggcatcaacaaggggctgtacaagattatgtccaaaatgggcatttcgaccattgcctcttaccgctgctccaaactgtttgaagcggtcgggctgcacgatgatgtggtaaacctgtgcttccagggcgtggtcagccgtatcggcggcgcgagctttgatgacttccagcaggatctgctgaatctctccaaacgcgcctggctggcgcgcaaacccattagcccgggcggcctgctgaagtacgtccacggcggcgaatatcacgcctataacccggatgtcgtgcgtaccctgcaacaggcggtacagagcggcgagtacagcgattatcaggaatacgccaaactggtcaatgagcgtccggctgcaacgctgcgcgatctgctggcgatacatccagacggcgaggcggtgactatcgacgaggttgagcccgccagtgagctgtttaaacgctttgataccgcagccatgtctatcggcgcattaagtccggaagcgcacgaagcgctggcggaagcgatgaacagcctcggcggcaactccaactccggcgaaggcggcgaagacccggcgcgctacggcaccaataaagtgtcgcgtatcaagcaggtggcttccggccgttttggcgtgacgccagcgtacctggtcaatgccgatgtgattcagattaaagtcgcgcagggcgcgaaaccgggcgaaggcggtcagttgccgggggataaagtcactccgtatatcgctaaactgcgctattcagtgccgggcgtgacgctgatctccccgccgccgcaccacgatatttactctatcgaggacttagcgcagctcattttcgacctcaaacaggtcaacccgaaggcgatgatctccgtgaagctggtgtccgaaccgggcgtcggcaccatcgcgaccggcgtggcgaaagcctatgcagacctcatcaccatcgctggctacgacggcggtaccggcgcaagcccgctctcttcggtgaaatacgctggctgcccgtgggaactaggacttgttgaaacccagcaggcgctggtcgccaacggtctgcgtcacaagattcgtctgcaggtggacggcggtctgaaaaccggcgtcgatatcatcaaagcggcgattctcggtgcagaaagtttcggcttcggcaccggcccgatggtggcgctgggctgtaaatacctgcgcatttgccatctgaacaactgcgcaaccggcgtggcgacgcaggatgaaaaactgcgtaagaaccactatcacggcctgccgttcaaagtgaccaactactttgaatttatcgcccgcgaagtgcgcgagctgatggcttcgcttggcgtgacccgcctggtggatttgattggccgcaccgacctgctgaaagagctggagggcttcaccgctaaacagcagaagctggcgctgtctcgtctactggaaaccgctgaacctcatccgggtaaagcgctgtactgcaccgagaataacccgccgtttgataacggtgtgctgaatgcgcaactgttgcagcaggcgaagccgtttgtcgatgcgcgccagagcaaaaccttctggttcgacatccgcaacaccgatcgttccgtgggtgcgtcgctttccggttacatcgcacagacccacggcgatcaggggctggcttccgatccgattaaagcgcacttcagcggtaccgcaggccagagctttggcgtgtggaacgcgggcggcgtggagttatatctgactggcgatgccaacgactatgtcggtaaaggtatggcaggcggtttgatcgccatcagaccaccggtaggttccgccttcctcagccataaagccagcatcatcggcaacacctgcctgtatggagcgaccggtggccgtctgtacgcggcggggcgcgcgggcgaacgtttcggcgtgcgtaactccggggcgattaccgtagtagagggcatcggcgacaacggctgtgaatacatgaccggcggcatcgtctgcgtgctgggtaaaaccggcgttaacttcggcgcggggatgaccggcggcttcgcctatgtgctggacgaagatggcgaattccgtaaacgcgtgaacccggaactggtagaagtactggacgttgattcgctggctatccacgaagagcatctgcgcggcctgatcaccgagcacgtgcaacatactggttcgcaacgcggcgaagagatcctgtccaggtggtcaagcttctcaacccaattcgcgttagttaagcccaagtccagcgatgtcaaagccctgttgggccaccgtagtcgtagtgcggcagaattgcgcgtgcaggcgcagtaa

SEQ ID NO: 9631 - DNA, 429 bp, Salmonella typhi
  CDS (1)...(429)
  misc_feature (1)...(429): n = A,T,C or G
atgaaaactttcacagctaaaccanaaaccgtaaaacgcgactggtatgttgttgacgcgaccggtaaaactctgggccgtctggctactgaactggctcgtcgcctgcgcggtaagcacaaagcggaatacactccgcacgtanataccggtgattacatcatcgttctgaacgctgacnaagttgctgtaaccggcaacaagcgtactgacaaagtgtactatcaccacaccggccacatcggtggtatcaaacaagcgacctttgaagagatgattgcccgccgtcctgagcgtgtgattgaaatcgcggntaaangcatgctgccaaaangcccgctgggtcgtgctatgttccgtaaactgaaagtctacgcgggcaacgagcacaaccacgcggcacagcaaccgcaagttcttgacatctaa

SEQ ID NO: 9632 - DNA, 729 bp, Salmonella typhi
  CDS (1)...(729)
atgagcaaacgacgcatcgcgccgttaacgtttttgcgccgtctacttttacgtatccttgctgcgctcgccgtcttttggggcggcggcattgcgctgtttagcgtggttccggtgcctttttcggcggtgatggcggaacggcagattagcgcctggctcggcggagagttcggttatgtggcgcattctgactgggtcagtatggcggatatctcgccgtggatggggctggcggtaattgcggcggaagaccagaagttccctgagcactggggctttgatgttccggcgattgaaaaagcgctggcgcataatgagcggaatgagagccgtattcgcggcgcctctacgctttcgcagcaaacggcgaaaaatctctttttatgggatggacgcagttgggtgcgcaaaggtctggaggccgggctaacgctgggcattgaaactgtctggagcaaaaagcgcatcctcacggtttatctgaatatcgcggagtttggcgatggtatttttggcgtggaggctgcggcacaacggtattttcataaacctgccagtcgcttgagtgtgtctgaagccgcgttgctggcggcggtattgccaaatccgttacgctataaggcgaatgcgccttctggctatgtgcgtagccggcaggcgtggattatgcgccagatgcgccaactgggcggggaatcttttatgacgcgcaaccagcttaattaa

SEQ ID NO: 9633 - DNA, 855 bp, Salmonella typhi
  CDS (1)...(855)
atggtactgatgatcgtcagcgggcgttccggatcaggtaaatctgtcgctctgcgcgcgctggaagatatgggattttactgcgtggataacctccccgtcgtgctgttgcccgatctggcgcgaacgctggccgatcgccagatttccgccgccgtcagcattgatgtgcgcaatatacctgaatcacctgagatttttgaacaggcgatgaataatctgcctggcgctttctcgccgcaattgctgtttcttgatgccgaccgcaataccttgattcgccgctacagcgacacgcgccgtttgcatccgctttccagcaaaaatctttctttggagagtgcgatcgataaagagagtgacttgctggagccgttacgctcacgtgcggatctgatcgtcgacacttcagaaatgtccgtccatgagctggcggagatgctgcgtacccggctattgggcaaacgcgagcgcgaactgacgatggtatttgagtccttcggctttaaacatggtatcccgattgatgcggactatgtgtttgatgtccgctttctgcccaacccacactgggacccaaaactgcgccccatgaccgggcttgataagccggtagccgcgtttcttgaccgacacacagaagttcacaattttatctatcagactcgcagctatcttgagctatggttaccgatgctggagaccaacaaccgcagctaccttaccgtcgctatcggttgtaccggcgggaaacaccgttcggtgtatattgcagaacagctggcagactacttccgctcgcgcggtaaaaatgtccagtctcgccatcgcacgctggaaaaacgcaaaacatga

SEQ ID NO: 9634 - DNA, 393 bp, Salmonella typhi
  CDS (1)...(393)
atggctgacaatcaatactacggcactggtcgccgcaaaagttccgcagctcgcgtcttcatcaagccggggcacggtaacatcgttatcaaccaacgttctctggaacagtacttcggtcgtgaaactgcccgcatggtagttcgtcagccgctggaactggtcgacatggttgagaaactggatctgtacatcactgttaaaggtggtggtatctctggtcaggctggtgcgatccgtcacggtatcacccgcgctctgatggagtacgacgagtccctgcgtggcgaactgcgtaaagctggcttcgttactcgtgacgctcgtcaggttgaacgtaagaaagtcggcctgcgtaaagcacgtcgtcgtccgcagttctccaaacgttaa

SEQ ID NO: 9635 - DNA, 1260 bp, Salmonella typhi
  CDS (1)...(1260)
  misc_feature (1)...(1260): n = A,T,C or G
atggataaatttcgtgtacaggggccaacgacgctccagggcgaagtcacaatttccggcgccaaaaacgccgcgctgccgatcctgttcgccgctctgctggcagaagaaccggtagagatccaaaacgttccaaaactgaaagacgtggatacgtcgatgaagctcctgagccaattaggcgcgaaagtggaacgcaatggatcggtacacattgacgccagccaggtgaacgtgttctgcgcgccttatgatctggttaagaccatgcgcgcctcgatatgggcgctggggccgctggttgcccgttttggtcagggacaagtctctctgccggggggctgtactatcggcgcgcgtccggttgatctacatattaccggtctggaacaactgggtgcgaccatcaagctagaagagggctacgtaaaggcctccgtcgaaggacgtcttaaaggggcgcatatcgtgatggataaggtcagcgtcggcgcgaccgtcaccattatgtgcgccgctacgctggcggaagggacgaccatcattgaaaacgccgcgcgcgagccggaaattgtcgacaccgctaacttcctagttacgctgggggcgaagatcgccgggcagggcaccgatcgtattacgatcgagggcgtagagcgtctgggcggcggcgtttatcgtgtgctgccggatcgtatcgaaacggggactttcctggtggcggcagcgatctctcgcggcaaaatcctctgccgtaacgcgcaaccggacactctggacgcggtactggcgaaactgcgcgatgctggcgcggatatcgaagtgggcgaggactggattagtctggacatgcacggcaaacgaccgaaagcggtcaatgtccgtacagcgccgcacccggcattcccgaccgatatgcaggcgcagttcacgttgctgaacctggtggcggaagggacgggctttatcactgaaaccgtctttgaaaaccgttttatgcacgtgcctgaactcagccgcatgggcgcgcgtgcggaaattgaaagcaataccgtcatatgccatggcgtagaaacgctctctggcgcncaggtcatggcgacagatctgcgggcatctgcgagcctggtgctggcgggctgtattgcggaaggcacgacgattgtggatcgcatttatcacatcgatcgcggttatgagcgcatcgaagacaaactgcgcgcgctaggcgcgaatattgaacgcgtgaaaggcgaataa

SEQ ID NO: 9636 - DNA, 972 bp, Salmonella typhi
  CDS (1)...(972)
atgaatttagaaaaaatcaacgagttaaccgcgcaagatatggcgggtgtcaatgcgacaatccttgaacagcttaattccgacgttcaactgattaatcagctaggatattacattattagcggcggcggaaaacgcattcgtccgatgattgccgttcttgccgcgcgtgcggtgggttatcagggtaacgcgcacgtgactatcgccgctctgatcgagtttatccacacggcgacgctgctacatgatgatgtggtggatgaatctgatatgcgtcgcggcaaagcgacggcaaatgccgctttcggtaatgccgccagcgtgttggtcggcgactttatctatacccgcgccttccagatgatgaccagcctcggctcgttaaaagtgctggaagtgatgtcggaagcggtcaatgtgattgcagaaggcgaagtgctgcaattgatgaacgtgaatgacccggacattaccgaagaaaattacatgcgggtgatttacagtaaaacggcccgtctgttcgaagccgccgcccagtgctccggtattcttgccggttgtacgcctgagcaagagaaagggttgcaggactatggccgctaccttggtacggctttccagctcattgacgatctgctggattacagtgccgacggcgagcatctcggtaaaaatgtgggtgatgacctcaatgagggcaaacctaccttaccgttgcttcacgccatgcgccacggtacgccagaacagtcagcgatgatccgtaccgctattgaacaaggtaatggccgtcatcttctggaaccggttctggaagcgatgaccacctgcggctcgctggaatggacgcgtcagcgagcggaagaagaagccgacaaagcgatatccgcgttgcagatattgccggataccccatggcgtgaggcgctaatcggtctcgcacacatcgcggtgcagcgcgatcgttga

SEQ ID NO: 9637 - DNA, 663 bp, Salmonella typhi
  CDS (1)...(663)
atggaactctatctggataccgctaacgtggcggaagttgaacgtctggcgcgcattttcccgattgccggcgtcaccaccaatccaagcattgtggcagccagcaaagaatctatctgggatgtgctgcccaggctgcaaaacgccatcggcgaagaaggcactttatttgcgcagaccatgagccgcgacgcgaaagggatggtggaagaagccaaacggctgaataacgccatccccggcattgtggttaaaattccggtaaccgccgaaggccttgcagcgattaaattgctgaaaaaagaaggcatcgtgacgctgggcaccgccgtctacagcgcgtcgcagggcctgctggcggcgctggcgggcgcaaaatatgtcgctccctacgtcaaccgcgttgatgcgcagggcggcgatggcattcgtatggttctggagctgcaaacgctactggaacatcacgcgcccgacagcatggtactggcggccagctttaaaacgccgcggcaggcgctggattgcttactggcaggttgccaggcgattacccttcctttagatgtagcgcaacaaatgctcaatacgcctgcggtagagtcagcaatagagaagtttgagcaagactggaaaaacgcttttggtaatctgaacctgtag

SEQ ID NO: 9638 - DNA, 594 bp, Salmonella typhi
  CDS (1)...(594)
atgcaaaaagttgttctcgcaaccggcaacgccggtaaagtgcgcgagctcgcgtcgctgttaagcgattttgggcttgatgtggtagcgcaaacgaaactgggcgttgactctgcggaagaaaccggcctgacgtttattgaaaacgcgattctcaaagcgcgccatgccgctaaaatgaccggtctgcccgccattgccgatgactccggtctggccgttgacgttttaggcggcgcgccgggtatctattccgcgcgctattctggcgaaaacgcgacagatcagcaaaatctggaaaaactgctgcatactctacgagatgttccggacgacaaacgccaggcgcgattccattgtgtactggtttatttgcgtcatgccgaagatcccacaccgatagtctgtcacggtagctggcctggcgtcattactcgccaggcggccggaaatggcggatttggctatgatcccattttcttcgtaccgtctgaaggcaaaaccgccgcagaactgacccgtgaagaaaaaagcgcgatttcccaccgtggacaagcgctcaagctgctgctggatgcgttacgcaatggctaa

SEQ ID NO: 9639 - DNA, 705 bp, Salmonella typhi
  CDS (1)...(705)
atgaacgatatcgcgcataacctggcacacatccgggacaaaatctccgccgcggcgacgcgttgtggccgctcttcagaagaagttacgttgcttgcagtgagtaaaaccaaacctgcgagcgacatcgcagaagccattgccgccggacaacgggcatttggtgaaaattatgtacaagagggggtggaaaaaatccgccactttcaggaagcgaaagtggaaggcctgcactggcactttattggccctttacagtccaacaaaagtcggctggtggccgagcattttgactggtgtcataccatcgatcgcctgcgtatcgcctcgcggctgagcgaacagcgcccggataatctgccggcgctaaatgttctgatccaaattaatatcagcgatgaaaacagcaaatcaggcattccgctggcggaactggatgagctggccgctgcggtggctacactgccgcgtctgcggcttcgcggactgatggcgatcccggcgccagagtcagattatgtaaggcagtttgaagtcgcacgtcaaatggctgtagcatttgccgggctgaaagcgcgctaccctgacgttgataccttatctctgggtatgagcgacgatatggaagccgcgattgcggcaggtagcacaatggtgcgcatcggcaccgctatctttggtgctcgtgattacacaaaaaattaa

SEQ ID NO: 9640 - DNA, 780 bp, Salmonella typhi
  CDS (1)...(780)
atgccctggatagccaaacgccggggccatgacgcggatttttttattatgcgtattccccgcatttatcaccctgaattgttgacgtccggtacgcagatttcgttatgcgaagatgcggccaaccatattggtcgtgtactgcgcatgggagcgggacaagcgttacagctgtttgacggcagcaatcaggtattcgatgctgaaatcattagcgccagtaagaaaagcgttgaagtgcaagtgatgaaaggcgaaatcgacgatcgtgaatcgccgctacatatccatctgggccaggtgatgtcgcgcggtgaaaaaatggaatttactatccagaaatcgatcgaactaggtgtaagcctcattacgccactgttctctgagcgctgtggcgttaaactggataatgaacgtctgaacaaaaagcgccagcagtggcaaaagatcgccatcgccgcctgcgaacaatgcgggcgtaaccgggtgccggaaattcgcccgccgatggcgctggaagcctggtgcgccgagcaagattccgggctgaggctcaatcttcatccgcgcgcccatgccagcatcaacactctgccgctgccggttgaacgcgtccgactgctgatcggcccggaaggcgggctgtcggcggacgaaatcgcgatgaccgcgcgctatcagtttactgatattctgttaggacctcgcgttctgcgtactgagacaaccgcgctcaccgccattaccgcgctacaggtgcgttttggcgacttaggatga

SEQ ID NO: 9641 - DNA, 1167 bp, Salmonella typhi
  CDS (1)...(1167)
  misc_feature (1)...(1167): n = A,T,C or G
gtgaaattaaatatggcaaaacacctttttacgtctgagtccgtatcagaagggcatcctgacaaaatcgcagaccaaatctctgatgccgtgttggacgctatcctgcaacaggatccgaaagcacgcgtcgcctgtgaaacctacgttaaaaccggcatggttttagttggcggtgagatcaccaccagcgcctgggtcgatatcgaagagattacccgtaatacggtgcgcgaaattggctatgtgcattccgacatgggctttgacgccaactcttgcgcggtactgagcgcaattggcaaacagtctccggatatcaaccagggcgttgaccgcgcagacccgctggaacaaggcgcgggcgaccagggcctgatgtttggctacgcgacaaatgaaaccgacgtactgatgcctgcgccaatcacctacgcgcaccgtctggtacagcgtcaggctgaagtgcgtaaaaatggcaccctgccatggttgcgtccggatgcaaaaagccaggtcactttccagtatgacgacggcaaaatcgtcggtatcgacgccgtggttctctctacgcagcacgcagaagatatcgaccaaaaatcgctgcaagaagcggtgatggaagagatcatcaaacccattctgccgtctgaatggttaaatacgtccactaagttttttatcaacccaaccgggcgttttgttatcggcggcccgatgggcgattgtggtctgaccggtcgtaagatcatcgttgatacctacggcggtatggcgcgtcacggcggcggcgccttctccggtaaagatccgtctaaagttgaccgttctgcagcttacgctgcgcgttatgtcgcgaaaaacatcgtggcggcaggtctggcggatcgctgtgaaatccaggtctcctacgctatcggcgtagcggagccgacgtccatcatggtggaaacgttcggtactgaaaaagtgcctgctgaacagttgattctgctggtgcgcgaattcttcgacctgcgccngtacggcttgattcagatgctggatctgctgcacccgatctacaaagaaactgcggcttacggccacttcggtcgcgaaaacttcccatgggaaaaaaccgacaaagcgcaactgctgcgcgatgctgccggtctgaaataa

SEQ ID NO: 9642 - DNA, 2115 bp, Salmonella typhi
  CDS (1)...(2115)
  misc_feature (1)...(2115): n = A,T,C or G
atgttccatgtacatgacgcgcggcttggggtaaattgttggcaaattttccggcgtagcccaaaacgcgctgtcgtcaagtcgttacgggcatggcctttcaacatccgatctggagtcaaaatgtcctcacgtaaagagcttgccaatgctattcgtgcgctgagcatggacgcagtacagaaagccaaatccggtcacccgggtgccccgatgggtatggctgacattgccgaagtcctgtggcgtgatttcctgaaccacaacccgaccaacccgtcttgggccgaccgcgaccgcttcgtgctgtccaatggccacggctcaatgctgatttacagcctgctgcacctcaccggttatgacctgccgatgtccgaactgcagaatttccgtcagctacattcaaaaacccctggtcacccggaagtgggctacaccgctggcgttgaaaccactaccggcccgctggggcagggtattgccaacgccgtcgggatggcgattgccgagaaaactctggcggcgcagtttaaccgtcctggccacgacatcgttgaccacttcacctacgtctttatgggcgacggctgcatgatggaaggcatttctcacgaagtgtgctctctggctggtactctgaaactgggcaaactgatcgcgttctatgatgacaacggtatctctatcgatggtcatgttgaaggctggttcaccgatgacaccgcgaaacgttttgaagcctacggctggcacgttatccgtggcattgacggtcacgatgccgacgccattaaacgtgccacggaagaagctcgcgccgtgactgacaaaccgtccctgctgatgtgcaaaaccatcatcggcttcggttcgccgaacaaacagggtacccacgattcccacggcgcgccgctgggcgacgcggaaatcgcgctgacccgcgaacagttgggctggaaatacgcgccgttcgaaatcccgtctgaaatctacgcccagtgggatgcgaaagaagccggccaggcgaaagagtctgcatggaatgagaaattcgcggcttatgagaaagccttcccgcaggaagctgctgaattcactcgtcgtatgaaaggcgacatgccggctgacttcaatgcgaaagcgaatgagttcatcgctaaactgcaggcgaatccatccaaaatcgccagccgtaaagcgtcccagaatgccatcgaagccttcggtccgctgttgccggaattcctcggcggctccgctgacctggcaccgtctaacctgaccctgtggtccggttcgaaagcgattaacgaagatgccgcaggtaactacattcattacggtgtgcgcgaattcggtatgaccgctatcgccaacggtatcgccctgcacggcggtttcctgccgtacacctccaccttcctgatgttcgtcgaatatgcccgtnacgcagtgcgtatggcagcgttgatgaaacagcgtcaggtgatggtctatacccacgactccatcggtctgggcgaagatggcccgacgcaccagccggtcgagcaggtggcaagcctgcgcgtaacgccgaacatgtccacatggcgtccgtgcgaccaggtggaatccgcggtggcgtggaaatatggcgtagagcgtcaggatggcccaaccgcgctgattctgtcccgtcagaacctggcgcagcaggagcgtactgaagagcaactggcgaatatcgcccgcggtggttacgtactgaaagattgtgcgggccagccgcagattatcttcattgcgaccggttctgaggttgagctggcggttgccgcctacgaaaaactgactgccgaaggcgtgaaggcgcgcgtggtttccatgccgtccaccgacgcgttcgacaagcaggatgcggcctaccgtgaatccgtgctgccgaaagcggtctctgcgcgtgtggcgattgaagcgggtatcgctgactactggttcaaatacgtcggcctgaacggcgctattgtcgggatgaccaccttcggtgaatccgccccggcagagctgctgtttgaagagtttggcttcacggtggacaacgtgatcgccaaagcgaaagcgctgctgtaa

SEQ ID NO: 9643 - DNA, 1164 bp, Salmonella typhi
  CDS (1)...(1164)
  misc_feature (1)...(1164): n = A,T,C or G
atgtctgtaattaagatgaccgatctggatctggccgggaaacgcgtttttatccgtgcggatctgaacgtacctgttaaagaagggaaagtgaccagcgacgcgcgtatccgcgcttctctgccgaccatcgaactggctctgaaacagggcgcgaaagtgatggtaacttcccacctgggtcgtcctaccgaaggcgagtacaacgaagaattctctctgctgccggttgttaactacctgaaagacaaactgtctaacccggttcgcctggtcaaagattacctggacggcgttgacgtggccgaaggtgagctggtggttctggaaaacgttcgctttaacaaaggcgaaaagacagacgacgaagcgctgtctaaaaaatatgccgccctgtgtgacgtatttgtgatggacgcctttggtactgcgcaccgcgcgcaggcttctacccacggtatcngcaaatttgctgacgtcgcgtgcgcaggcccgctgctggccgctgaactggatgcactgggtaaagcgctgaaagagccggctcgtccgatggtggctatcgttggtggttctaaagtatctaccaaactgactgttctggattccctgtctaaaatcgctgaccagctgattgtcggcggcggtatcgccaacaccttcgttgccgctcagggccacagcgtcggtaaatccctgtacgaagctgacctggttgacgaagcaaaacgtctgctgaccacttgcgatatcccggttccgaccgatgttcgcgttgccaccgagttctccgaaaccgcaccagcgactctgaaatccgttaacgacgtgaaagaagacgagcagatcctggatatcggcgatgcttccgctcagcagctggctgaaatcctcaagaatgccaaaaccattctgtggaacggcccggttggcgtgtttgagttcccgaacttccgtaaagggactgaaatcgtggcgaatgccatcgctgatagcgaagcgttttccatcgctggcggcggcgacaccctggcggcaatcgacctgttcggcattgctgacaaaatttcctacatttctactggcggcggcgcattcctcgaattcgtggaaggtaaagttctgccagccgtagcgatgctcgaagagcgcgctaagaagtaa

SEQ ID NO: 9644 - DNA, 894 bp, Salmonella typhi
  CDS (1)...(894)
atgaaacgtccggactacagaacactacaggcgctggatgccgttatacgtgaacgaggattcgagcgcgccgcccagaagctgtgcatcacgcaatccgccgtctcacagcgcataaaacagcttgagaatatgttcggacaacctttgttggtgcgtaccgttcctcctcgccccacggagcaagggcaaaaattactggctctgctgcgtcaggttgaactgctggaagaagagtggctgggcgatgaacaaaccggctctacgccgctactgctgtcgctggcggttaacgccgacagtctggcgacctggctgcttccggcgctggcgccagtactggcggactcccctatccgtctcaatttacaggtggaagatgaaacgcgcacgcaagaacgtctgcgtcgcggcgaggtggtgggcgcggtgagtattcagcatcaggcgctgcccagttgcctggtagacaaactgggcgcgctcgactatctgtttgtcgcgtcaaagccgtttgccgagcgctattttcccaatggcgttacccggtcgtcgctgctgaaagcgcccgccgtcgcgttcgaccatctggatgatatgcatcaggcttttttgcaacagaatttcgatctaccgcccggcagcgtgccgtgccatatcgttaattcatccgaagcgtttgtacagcttgcgcgtcagggcacggcctgctgcatgatccctcacctgcagattgagaaagagctggaaagcggcgagttgatcaacttaacgcctggcttgctacaacgccggatgctttactggcaccgctttgccccggaaagccggatgatgcgcaaagtgaccgacgcgctgctggagtacgggcacaaggtgctgcgtcaggattag

SEQ ID NO: 9645 - DNA, 1284 bp, Salmonella typhi
  CDS (1)...(1284)
atgcaaatccacacacaacatcagatggcaaaaaaagacaggatcggggaaatggcaaaggtatcgctggagaaagataaaattaaatttctgctggttgaaggggtgcatcaaaaggcgctggaaagccttcgtgcggcaggttacaccaacattgaatatcacaagggcgcgctggacgctgaacagttgaaagcgtccatccgcgatgcccacttcatcggtctgcgatcccgtactcatctgacagaagaagtgattaacgccgcagagaagctggtggcgattggctgtttttgcatcggcaccaaccaggtggatttaaatgcggcggcaaaacgcggtattccggtctttaacgcgccattctcgaatacccgttccgtggcggagctggtgattggcgagctattgctgctgctgcgcggcgtgccggaagcgaacgccaaagcgcaccgcggcgtatggaataaactggcggcgggatcgttcgaagcacgcggtaaaaagcttggcattatcggttacggccatatcggaacgcagttgggcattctggcggaatcgctggggatgcatatctatttctatgatattgaaaataaactgccgctcggtaatgcaactcaggtgcagcacctgtctgaattgctgaatatgagcgatgtggtcagtctgcacgtacctgaaaacgcctccaccaaaaacatgatgggcgcaaaagagatagccctgatgaagccgggttcgctgctgattaacgccgcgcgcggtacggtagtggatatcccggctttgtgcgacgcgctggcgacgaaacatctggcgggggcggctatcgacgtcttcccgacggaaccggccactaatagcgatccgtttacctctccgctgtgcgaattcgataacgtgatcctgacgccgcatatcggcggctcgacgcaggaggcgcaagaaaacatcggtctggaagtcgcaggaaaactgattaagtactcggataacggctcgacgctgtccgccgtgaacttcccggaagtgtcgctgccgctgcacggcggtcgtcgcctgatgcacatccacgaaaaccgcccgggcgtattgaccgcgcttaaccagatctttgccgagcagggcgttaacattgccgcacagtatctgcaaacctccgcccgaatggggtatgtggtaattgatatagaagccgatggcgatgtggcggagaaagcgctgctggcgatgaaggcgattccgggcaccattcgcgcccgtctgctgtactaa

SEQ ID NO: 9646 - DNA, 1041 bp, Salmonella typhi
  CDS (1)...(1041)
  misc_feature (1)...(1041): n = A,T,C or G
atgatgccgcgccgggaaaaactgggcgttgaccgggcgctggcgtttagcgaaatcaaccagcaactctttcagttgcttaatggtctggatgtggtgtaccacgcgcanggcgaatatgcgtatgccgacgagattgttctggctgcgctggagaagctgcgtaaaggctcccgccagaatctgaccgcgccggccaccatgactgactggcgaccgatcgtccatgagatgcgcctgttcaaatcgccggaagagattgctgtcctgcgccgcgccggggaaattagcgctctggcgcatatccgcgcgatggaaanatgccgtccggggatgtttgagtatcagctggagggtgaaattcaccacgaatttaatcgccatggcgcgcgctatccctcctataacaccattgtcggcagcggcgaaaatggctgtatnnngcattncactgaaaacgaaagtgaaatgcgcgacggcgatttagtgcttatcgacgcgggctgtgaatataaaggttacncgnncganatcacgcgtactttcccggtgaacgggaaatttacgccagctcagcgtgaaatttatgacatcgttctggaatcgctggagaccagcctgcgactgttccgtcctggtacctctattcagcaggtgaccggcgaagtagtgcgcatcatgataaccgggctggtgaagttggggattttgcaaggagaggttgatcaactgattgccgagaatgcgcatcgtcctttctttatgcatggcttgagccactggctggggctggatgttcatgatgtcggcgtttatgggccggatcgctcccgcatcctggagccgggcatggtgctgaccgtagagccaggcctctatatcgcgccggatgccgacgtgccggaagcgtatcgcggcattggcgttcgaattgaagatgacattgtcattaccgaaaccggtaatgaaaacctgaccgctggcgttgtgaagaaggcggatgacattgaggcattaatggcggcggcgcggcagcaatga

SEQ ID NO: 9647 - DNA, 1302 bp, Salmonella typhi
  CDS (1)...(1302)
atgaatacaaaaatcgatgcgttgaattactacggcgcgacgaaaaaatacccgttgcattttcctgctctgcaagacgatattgatgccgatgtggtgatcattggcggtggcttttcaggcatcaataccgcgctggaactggcggagcaggggatcactaatgttgtcgttctggaagcccgccatcttgggtatggcggcaccgggcgaaacggcggtcaggtgatggccggtataggtcacgacatcgaagccgttaaaaaatatgtaggcgcagcgggaatggagacgctgtttaaaatctcgaacctcggcgcgggtattattcgggagcgaattcgtaaataccatattgatgctgattttgtccccggatatggttatctggcctacaaccagcggcagttaaaaacgctgcaacaatgggaaaaagaattcaaagccgctacgccggaagacgatattgaactctataccggtaaagacgtgcagcaggttatcggttccgacgtctactgcggtgttctcaagcatatggggggagggcatgtccactcgctgaatttattgctgggctccgctcaggctgcgaattcgctgggggtgaagatattcgaatattcacctgtggttgaggtcagttacggtaaaactgtgcgggtacgtactgcgatgggcagcgtaaaagcagccaaattgctgtgggcctgtgatagttttctcaataatctggaaccagaaatttataagaaaacgctggttacttattcttatcaggtctctacagaacctctctccagcgagcttgttgagcggatcagtcccttgcgcggggcttttagcgatatccgcccggtgataaattactaccgtctcacaaaagaaaaccgtctgctgtttggcagcgccacaaggtttcttgaatataccccgcacgattttgctgcctggaaccgcactctgttgacggaggtctttccttatttgaaagacgttaaaatcgattttgcctggggcggaccgatggcctgtagcgcgaatctgtttccgcagattggcacgcttcgtgagcacaataatgttttttatgttcagggttattccggatttggcgtcacgccttcccatattgtatgcaaaatcctggccgaaggaataaatggcggttccgagcggtatcgtctgatgagtagcattccccacgcgacaatttatggtcgcgacagtctacgtctattgctggtcagtgcgggaaaactgatacatcaaacagccggtttctggaaaggccggaattaa

SEQ ID NO: 9648 - DNA, 756 bp, Salmonella typhi
  CDS (1)...(756)
atggtggaagattcacaagaaacgacgcactttggctttcagaccgtcgctaaagagcagaaagctgacatggtggcccacgtttttcattctgtggcgtcaaagtacgatgtgatgaatgatttaatgtcatttggcattcatcgtttgtggaagcgcttcaccattgattgcagtggcgtgcgtcgtggacaaaccgttctcgatttagcgggcgggacgggcgatcttaccgcgaaattttcacgtatggtcggggaaactggcaaagttatcctggcggatattaatgattctatgctcaaaatggggcgtgagaagctgcgtaatatcggcgtgatcggcaacgtagagtatgtgcaggcgaatgccgaagctctgcctttccctgataatacgtttgattgcattaccatttcgtttggtttgcgcaatgtaacggaaaaagaaaaagcgctgcggtcaatgttccgtgtgttgaaacccggcggacgtttactggtgcttgaattttccaagcctatcattgagccgctgagtaaagcgtatgacgcctattcttttcatattttaccgcgtattggctcgatggtcgcgaacgatgcggatagctatcggtatctcgcggaatccatccgtatgcatcccgatcaggataccttaaaagccatgatgcaggacgccggatttgagagcgtggattattacaatctgacggcgggcgttgtggcattgcaccgtggttataaattctag

SEQ ID NO: 9649 - DNA, 1848 bp, Salmonella typhi
  CDS (1)...(1848)
atggtgaacggggttaatgtggcgcaggcggaagtgttgaatctggaatcaggggccaaacaggttttgcaggaaacctttggctaccaacagtttcgcccgggccaggaagcgattattgatactgcgctctccggtcgcgactgtctggtcgtcatgcccaccggcggcggcaaatctctgtgctatcaaatccccgcgttgttgctggacggattgaccgtcgtcgtttcgcccctgatctcgttgatgaaagaccaggtcgatcagctactggcgaacggggtggcggcggcctgtctgaactccactcaaagccgcgagcagcagcttgaggtgatggcggggtgccgtaccggacagattcgtctgctgtatattgcgccggaacgcctgatgctggacaactttcttgatcatctggcgcactggaatccggtattgctggcggtggatgaagcgcactgtatctcgcaatggggacatgatttccgtccggaatatgcggctctcggtcagcttcgccagcgttttcccgctttgccgtttatggcattgaccgccaccgccgacgacaccacgcgccaggatattattcgtctgcttgggcttaacgatccgttaatccagatcagtagctttgaccgaccgaatatccgctacatgctgatggagaagtttaagccgctcgaccagctaatgcgctatgttcaggagcaacgcggcaaatcgggtatcatctactgcaacagtcgggcgaaagtggaagataccgccgcgcgcttgcaaagtcgcggcattagcgcggcggcctatcatgcggggctggaaaacgctattcgcgccgatgtgcaggaaaaatttcagcgcgacgatctgcaaatcgtggtggcgaccgtcgcttttggaatgggcataaacaaacctaacgtacgtttcgtcgtgcatttcgatatcccgcgtaatattgaatcctactatcaggaaacgggccgcgccgggcgcgacggactgcctgcggaagccatgctattttacgatccggctgatatggcctggctacgtcgttgtctggaagagaaaccagccggacagcttcaggatattgaacggcataagctgaatgcgatgggcgcttttgccgaagcgcaaacctgccgccgcctggtattgcttaattactttggcgaaggccgacaagaaccgtgcggcaactgcgatatctgtctcgatccgcccaaacaatatgatggcttaaacgatgcccagattgcgctttctaccattggtcgggttaaccagcgttttggcatgggctacgttgtcgaggtgatccgcggcgcgaataaccaacgcatccgcgatttcggtcatgacaaactcaaggtttatggcatgggacgcgaaaagagccatgagcactgggtgagcgtgattcgccagctcattcatctggggctggtaatgcaaaatattgcgcagcactccgcattacagttgacggatgccgcgcgtccggtactccgtggagacgttccgctaaagcttgcggtgccgcgcattgtcgccctcaaaccccgcgtgatgcagaaatcgttcggcggtaattacgatcgcaaattgttcgctaagttgcgcaagctgcgtaaagctatcgctgatgaagagaatatcccgccgtatgtggtctttaacgacgccacgttgatagaaatggcggaacagatgccggtttccgccagcgagatgttaagcgttaacggggttgggatgcgcaaactggagcgcttcgggaaagaattcatggcgctcatccgcgcgcatgtcgatggtgatgacgaagagtag

SEQ ID NO: 9650 - DNA, 2169 bp, Salmonella typhi
  CDS (1)...(2169)
  misc_feature (1)...(2169): n = A,T,C or G
gtgccaatggacgtttcttacctgctcgacagccttaatgataaacagcgcgaagcggtggccgcgccacgtagcaacatgctggtgctggcgggcgcgggaagcgggaaaacccgcgtgctggtgcaccgtatcgcctggttactgagcgtagaaaacaactcgccatactccatcatggcggtgacctttaccaacaaagcggcggcggaaatgcgccatcgtattggccagttgatggggaccagccagggcggaatgtgggtagggacgttccacggtctggcgcaccgcctgctgcgcgcgcatcatatggacgctaatttgccgcaggatttccagattctcgacagcgaagatcagatgcgtttgcttaaacgcctgattnaggcgatgaatcttgatgagaagcagtggccgccgcgtcaggcgatgtggtacatcaatagccagaaagacgaagggctacgcccgcaccatatccaaagctatggcaatccggtggaacagacctggcagaaggtgtatcaggcctatcaggaagcgtgcgatcgcgctggtctggtggatttcgccgagctactgctgcgcgctcatgaactatggctgaacaagccgcacatcctgcaacactatcgcgagcggtttactaacattctggtggacgaattccaggataccaacaacattcagtacgcctgggttcgtctgctggcgggcgataccggtaaagtgatgattgtcggcgacgatgaccagtcgatctacggctggcgcggggcccaggtagagaacatccagcgcttcctcaatgatttccccggcgcgcagaccattcgtctggagcagaattaccgctcgaccagcaacattcttagcgtggcgaacgccctgattgaaaacaacaacgggcgtctgggcaaaaagctgtggactgacggcgttgacggcgaaccgatatcgctgtactgcgctttcaacgaactggatgaagctcgctttgtggttaatcgtatcaaaacctggcaggacaacggcggcgcgcttgcgcaatgcgccatcctttatcgcagcaacgcccagtcgcgcgtgctggaagaagcgttattacaggccagtatgccgtaccgcatttacggcggtatgcgcttcttcgaacgccaggagatcaaagatgcgctctcttatctgcgtttgattgccaatcgcaacgatgatgccgcctttgaacgcgtggtgaataccccaacgcgcggtatcggcgaccgcacgctggacgtggtgcgccagacctcgcgcgatcgccagctaacattgtggcaggcgtgccgtgaattgttacaggaaaaagccctggccgggcgtgcggccagcgcgctgcaacgctttatggaactgatcgacgccctggcgcaggaaaccgccgacatgccgctgcatgtgcagactgaccgggtgatcaaagattccggcctgcgcaccatgtatgagcaagaaaaaggcgagaaaggccagacgcgcatcgaaaacttagaggaactggtgacggcaacgcggcagttcagctacaacgacgaagatgaagatttaatgccattgcaggccttcctctctcacgcggcgctggaagcgggcgaggggcaggcggatacctggcaggatgcggtacagctgatgacgctgcactcggccaaagggctggagttcccgcaggtgtttatcgtcgggatggaagaggggatgttccccagccagatgtcgctggatgagggctggcgtttggaagaggagcgtcgtctggcctacgtcggcgttacccgtgccatgcagaaactgacgctaacctatgccgaaactcgccgtctgtatggtaaagaggtttatcatcgcccgtcgcgtttcatcggcgagttgccggaggagtgcgtggaagaggtccgtctgcgcgccaccgtcagtcgtccggtgagccatcaacgaatgggaacgccgctggcggaaaacgacacaggctacaaactcggccaacgcgtgcgccatgcgaagttcggcgagggaactattgtcaacctggagggcagcggcgaacatagccggttgcaggtggcttttcaggggcaagggatcaaatggctggttgccgcgtatgcgaagctggaaacggtttga

SEQ ID NO: 9651 - DNA, 957 bp, Salmonella typhi
  CDS (1)...(957)
  misc_feature (1)...(957): n = A,T,C or G
atgacggtaacaagcatgttagacaatgtnttaagaattgccacacgccaaagtccccttgcgctttggcaggcacattatgtcaaagacgcattgatggcaacccatccgggactgacggtagaactggtgccgatggtcacacgcggcgacgtgattctcgatactcccctggcgaaagtgggcggtaagggactgtttgttaaagagcttgaaatcgcgctgctggaaaaacgcgctgatatcgccgtgcactctatgaaagacgttccggtggccttcccggacggtctcggtctggtgaccatttgcgagcgcgaagatccgcgcgacgcgtttgtctcgaataaatatcacagtctggacgatctgcccgcgggtagtatcgtcgggacgtccagtttgcgtcgtcagtgtcaactggcggaacgccgtccggatctcattatccgttcgttgcgcggcaacgtcggcacacgtctcggcaagctggataacggcgactatgacgccattatcctggccgtggccggtctgaaacgcttaggtctggagtcgcgcattcgcacagccttgccgcctgacgtttcgcttcctgccgtaggccagggcgctgtcgggattgagtgtcgtcttgacgacgcgcgaacacaggcgctgctcgcaccgttgaatcactcgcaaaccgcgctgcgcgtaacggcggaacgtgctatgaacacccgcctggaaggcggttgtcaggtgccgattggcagctatgcagaaatcatcaacggtgaaatttggctacgcgcgctggttggcgcgccggacggttcggtgatggtgcgcggcgaacgtcgtggttctcccgagcaggcggagcaaatgggcatctcgcttgcagaggaactgctggaaaacggcgcgcgcgcgattctgacggaagtttataacggcgagacgcccgcatga

SEQ ID NO: 9652 - DNA, 1164 bp, Salmonella typhi
  CDS (1)...(1164)
  misc_feature (1)...(1164): n = A,T,C or G
atggaacaggttgtcattgtcgatgccattcgcaccccgatgggccgttcgaagggcggcgcgtttcgcaacgtgcgggcagaagatctctccgcccacttaatgcgtagcctgctggcgcgtaatccgtcgcttacagcggcgaccctcgatgatatttactggggctgcgtacaacaaacgctggagcaaggcttcaacattgcccgtaacgccgcgctgctggcagaaattccccattcggtaccggcggtcaccgtcaaccgtctgtgtggttcctcgatgcaggcgttacacgatgcagcgcgaatgatcatgaccggcgatgcgcaggtttgtctggttggcggcgtggagcatatggggcacgtgccgatgagccacggcgtggattttcacccgggtctgagccgcaacgtcgccaaagcagcagggatgatggggctaacggcggaaatgctctcccgcctgcacggcattagccgggaaatgcangaccagttcgccgcgcgttctcacgctcgcgcctgggccgccacccagtctggcgcattnaaaacngagattatcncgactggcngtcatgatgcagacggcgtgttgaagcagtttaantacgatgaagtgatccgcccggaaaccacggtcgaagcgctatcaacgctgcgtccggcatttgatccggttagtggcacggtcacggcgggcacctcatccgcgctttccgatggcgcagccgccatgctggtaatgagcgaaagtcgtgcccgtgagctgggtctgaaacctcgcgcccgtattcgctcaatggcagtggtgggttgtgatccgtcaattatgggttacgggccggttccggcgtcaaaactggcgttgaaaaaagcgggactgtcggccagcgatatcgatgtgtttgagatgaacgaagcgtttgccgcacagatcctgccatgcattaaggatctgggattgatggagcagatagacgagaagatcaacctcaacggcggcgcgatcgcgcttggccatccgctcggctgctccggagcacgtatcagcaccacgcttatcaacctgatggagcgcaaagacgcgcagtttggtctggcgacgatgtgtattggtctgggtcagggcatcgccacggtgtttgagcgggtttaa

SEQ ID NO: 9653 - DNA, 1050 bp, Salmonella typhi
  CDS (1)...(1050)
  misc_feature (1)...(1050): n = A,T,C or G
atgagtaaaatcagggtattgtcagttgatgattccgcgctaatgcgccaaatcatgactgaaattattaatagccatagcgatatggagatggtagcgactgcgccggacccgttggtcgccagggatctcatcaaaaaatttaatccggacgtattgaccttggacgttgagatgccgcgtatggacggcctcgattttctgganaaactgatgcgcctgcgaccgatgccggtggtgatggtctcttcnctgaccgggaaaggttccgaagtgacgctacgggcgctggagttgggggccatcgattttgtcaccaaaccgcagcttggcattcgtgaaggtatgctggcgtatagcgagatgattgccgaaaaagtgcgtaccgccgcgcgggcccgcatcgccgcacataaaccgatggcggccccgacaaccttaaaagccggtccgctgctcagttcggaaaaactgattgctatcggcgcttcaacgggcggtactgaagctatccgacatgtgctgcaaccgctgccgctttccagtccggcagtgattattacgcagcatatgccgcctggctttacccgctcgtttgccgagcgcctgaataaactctgtcaaatcagcgtgaaggaggcggaggacggcgaacncgtattgccaggtcatgcctacattgcgcccggcgacaagcatatggagctggcgcgtagcggggcgaattatcaaatcaaaattcatgatggcccgccggtaaaccggcatcggccttccgtggatgtgctgtttcattcggtggcgaaacacgcggggcgcaacgccgtaggcgtcattcttacggggatgggcaacgatggcgccgctggaatgttagcgatgtaccaggctggcgcctggaccattgcgcaaaacgaagcaagttgtgtggtgttcggcatgccgcgcgaggccatcaatatgggtggcgtaagcgaagtggtcgatcttagccaggtaagccagcagatgctggcgaaaatcagtgccggacaggcgatacgtatttga

SEQ ID NO: 9654 - DNA, 1734 bp, Salmonella typhi
  CDS (1)...(1734)
gtgaatattcaggctcttctctcagaaaaagttagtcaggccatgattgctgcaggcgcgcctgcagattgcgagccccaggttcgtcagtcagccaaagttcagttcggcgactatcaggccaacggcatgatggcagttgcgaaaaaactgggtatggccccccgacaacttgcagagcaggtgctgactcatctggatctcagcggcatcgccagcaaggttgaaatcgccggccctggctttatcaatattttcctcgaaccggcttttctcgctgaacaggtgcaacaggcgctgacctccgatcgtctgggcgtttctcagccgactcgccagacgattgtcgtcgactactccgcgcccaacgtcgcgaaagagatgcacgttggtcatctacgctccacgatcattggcgatgcggcagtgcgcacgctggagtttctgggccatcatgttattcgcgctaaccacgtcggcgactggggcacccagttcggtatgcttatcgcttggctggaaaaacagcagcaggaaaacgcgggcgacatggcgctggcggatctcgaaggattttaccgcgatgcgaaaaaacattatgacgaagatgaaacgtttgccgagcgcgcgcgtaactacgtcgtcaaattgcagagcggtgatacctatttccgtgagatgtggcgtaagctggttgatatcacgatgacgcaaaaccagatcacctatgatcgtctgaacgtcactctgacgcgtgacgatgtgatgggcgaaagtctgtataatccgatgctgccgggcatcgtcgccgatctgaaagccaaaggcctggcggttgaaagcgaaggcgcaacggtggttttccttgatgagtttaaaaacaaggaaggcgacccgatgggcgtcattattcagaagaaagatggcggttatctgtataccactaccgatatcgcctgcgccaaataccgttacgaaacgctgcacgccgaccgcgtgctctactacattgactcccgtcagcaccagcacctgatgcaggcctggaccattgtgcgtaaagccggttatgtgccggattccgttccgctggaacaccacatgttcggcatgatgttgggtaaagacggtaaaccgtttaaaactcgcacgggcggtacggtgaaactggcggacctgctggatgaggcgctggagcgcgcgcgtcgtctggtggcggagaagaacccggatatgccggctgacgagctggaaaaactggctaacgccgtcggtattggcgcggtgaaatacgccgatctgtcaaaaaaccgcaccactgactatatcttcgactgggataatatgttggctttcgaaggcaataccgcaccttatatgcagtatgcctatacgcgtgtgctgtctgttttccgtaaagcggacatcgacgagcaggcgctggcgagcgcgccggttatcattagcgaagatcgcgaagcgcagctcgctgcccgtctgctgcagtttgaagaaaccctgacggtggtcgcgcgtgaaggtacgccgcacgtcatgtgcgcgtatctgtatgacgtcgccgggctgttctccggcttctacgagcactgccctattctcagcgccgagaatgacgcggttcgcaatagccgcctaaaactggcgcaactgacggcgaagacgctgaaactgggtctggatacgttgggtatcgaaaccgtagaacgcatgtaa

SEQ ID NO: 9655 - DNA, 600 bp, Salmonella typhi
  CDS (1)...(600)
gtgaaatccgctatttttaggagagtgattatcatgctgaaactcaacgcgaccacaaccgccctggtggttattgatttacaggaaggaattcttccgtttgccggcggcccgtatacggcaaatgaggtggtcgcccgcgccgcgcggctggcggaaaagtgtcgcgccaacggctcgcccgtggttatggtacgcgttggatggtctgatgattatgccgaagcgttaaaacagccggtggatgccgcaacgcctgcgcacgcgttgccggaaaactggtggacctggcctacggcattgggtaaaaaggacagcgatctggaagtgactaaacgccagtggggcgcgttttacggcaccgacctggaattacagcttcgccgccggggtatcgacaccatcatattgtgcggaatctcaaccaatatcggcgtcgaatccacagcgcgtaacgcctgggagttgggatttaaccttattattgccgaagatgcctgtagcgccgccagcagtgagcagcatcagagcagtatgacgcatattttcccgcgcattggccgggtacgcagcgtagaggatattttaaacgccttatga

SEQ ID NO: 9656 - DNA, 1773 bp, Salmonella typhi
  CDS (1)...(1773)
atgcgtacagaatattgcggacagctacgtctgtcccacgtggggcagcaggtgactctgtgtggttgggtcaaccgtcgtcgtgatcttggcagcctgatctttatcgatatgcgcgaccgcgaaggtattgtgcaggtgttcttcgatccggatcgtgcggacgcgttaaagctggcctctgaactgcgtaatgagttctgcattcaggttacgggcaccgtgcgtgcgcgtgacgcgaaaaacgtcaatgcggatatggcgaccggcgaaattgaagtgctggcgtcctctctcactatcatcaaccgcgcagactcactgccgcttgacgctaaccacgttaataccgaagaggcgcgtctcaagtaccgctatctggatttgcgtcgtccggaaatggcgcagcgcctgaaaactcgcgccaaaattaccagcctggtgcgtcgttttatggacgatcacggtttccttgatattgaaaccccgatgctgaccaaagcgaccccggaaggcgcgcgcgattacctggtaccgtcccgcgtacacaaaggtaaattctatgcgttgccgcagtcgccgcagctgttcaaacagctcctgatgatgtccggtttcgaccgttactatcagatagtcaaatgcttccgtgatgaagacttacgtgctgaccgtcagccggagtttactcagatcgacgtcgagacctccttcatgaccgcgccacaggtgcgcgaagtgatggaagcgctggtgcgccatttgtggctggaagtgaaaggcgtggatctgggggatttcccggtcatgacgtttgccgaagcggaacgtcgctacggttccgacaagccagacctgcgtaacccgatggagctggtagatgtcgctgacctgctgaaatcggtagagttcgcggtcttcgcgggcccggctaacgatccgaaaggccgcgtggcagcgctgcgtgtgcctggcggcgcacagcttagccgtaagcagatcgacgattacggtaactttgttaagatctacggcgcgaaaggactggcatatatcaaagttaacgagcgcgcgaaaggtctggacgggattaacagtccggtggccaagttcctgaccgccgacatcgtcgaggctatccttgaacgtaccggcgcgcaggacggcgacatgatcttcttcggcgcagataacaaaaaagtggttgccgatgcgctgggcgcgctgcgtctgaaactgggcaaagacctgagcctgaccgacgaagacaaatgggcgccgctgtgggtgattgacttcccgatgttcgaagacgacggcgaaggcggtctgaccgcgatgcaccatccgttcaccgccccgcgtgacatgacggcgtctgaactgaaaactgccccggaagaagccgtcgctaacgcttacgatatggtgattaacggctatgaagtgggtggcggttcggtgcgtattcacaacggtgaaatgcagcaaaccgtatttggtattctcggtatcaatgagcaggagcagcgcgagaagttcggcttcctgttggatgcgttgaaatacggtacgccgccgcacgtgggcctggcgtttggtctggaccgtctgaccatgctgttgaccggcaccgacaatattcgtgatgttatcgccttcccgaaaacgaccgccgccgcgtgtctgatgactgaagcgccgagtttcgccaaccaggcagcgttgacggagttggggattcaggttgtgaagaaagccgagaataactga

SEQ ID NO: 9657 - DNA, 1443 bp, Salmonella typhi
  CDS (1)...(1443)
  misc_feature (1)...(1443): n = A,T,C or G
atgtccagaaggcttcgcagaaccaaaatcgttaccacgttaggcccggcaactgaccgcgataacaaccttgagaaggttatcgccgcgggcgcaaacgtagtacgtatgaacttctctcacggctcgccggaagatcataaaatgcgtgctgataaagtccgtgagattgccgccaaattggggcgtcatgtggctattttaggcgacctgcaagggccaaaaattcgcgtttccacttttaaagaaggcaaagtgttcctcaatatcggggacaaatttctgttagacgctaacctgggtaaaggcgaaggcgataaagaaaaagtcggcattgattacaaagggttgccggcagacgtcgttcctggcgatatcctgctgcttgacgatggtcgagtgcagttgaaagtgcttgaagtccagggcatgaaagtctttaccgaggtcaccgtcggcggcccgctgtctaacaataaaggcattaacaagctcggcggcgggctttctgctgaagcgctgaccgaaaaagataaagccgatattcaaaccgctgcgctgataggcgttgactatctggcagtctccttcccgcgctgcggcgaagatctgaactatgcacgccgcctggcgcgcgacgccggctgtgacgcgaaaattgtggctaaagtcgaacgcgccgaagcggtatgcgatcaaaacgctatggacgatatcattctggcctctgacgttgtgatggtcgcacgtggcaacctgggcgttgaaatcggcgatccggagctggttggtatccagaaggcgctgattcgccgtgcgcgtcagctaaaccgcgcagtcatcaccgcaacgcagatgatggagtcgatgatcaccaacccgatgccgacccgtgcggaagtgatggacgtggcgaacgccgtcctggatggcacggatgcagttatgctgtctgccgaaaccgcagccggtcagtatccttctgaaaccgttgccgcaatggcgcgcgtctgtctgggcgcagaaaaaatccccagcatcaatgtgtctaaacaccgtctcgacgtgcagttcgacaatgttgaagaagccattgccatgtctgcgatgtatgcggcaaaccatctgaaaggcgttaccgcgatcatcaccatgacggaatccggtcgtaccgcgctaatgacttcccgtatcagctccggcctgccgattttcgccatgtcgcgccatgaacgcacgctgaacctgaccgcgctctaccgcggagtaacgccggtgcattttgatagcgcggctgatggcgttgtcgcggcgcatgaagctgttaatctgctgcgcgatnaagggtatctggtttccggtgaccttgttatcgtgacncagngcgatgtcatgagcaccgtcggttcaaccaataccacgcgtattttgaccgttgagtaa

SEQ ID NO: 9658 - DNA, 1476 bp, Salmonella typhi
  CDS (1)...(1476)
  misc_feature (1)...(1476): n = A,T,C or G
atggcggtaacgcanacagcncaggcatgtgacctggtcattttcggcgcgaaaggcgacctggcgcgccggaaactgctgccttccctgtatcagcttgagaaagccggccagatccatccggatacccggatcattggggtggggcgcgcggactgggataaagaagcttatacccacgttgtgcgtgaggcgctggaaaccttcatgaaggaaaaaattgatgaaggcttgtgggatacgctgagcggccgtctggatttttgtaatcttgacgttaacgatacgcctgcgttcagtcgcctgggcgatatgctggatcaaaaaaaccgcaccaccattaactattttgcgatgccgcccagcacgtttggcgctatttgcaaagggttaggggaggctaaactcaacgccaaaccggcgcgtgtcgtgatggagaaaccgttgggtacttcgctggcgacctcgcgtgagattaacgatcgggtcggcgaatactttgaagagtgccaagtatatcgtatcgaccactatctgggcaaagaaacggttctcaacctgctggcgctgcgttttgccaactcgttattcgttaataactgggataaccgcactatcgatcacgttgagattaccgtagcggaagaggtggggattgaagggcgctggggatattttgaccaggccggtcagatgcgcgatatgatccagaaccacttgctgcaaattctctgcatgattgccatgtcaccgccgtctgacctgagcgccgacagtattcgcgatgaaaaagtaaaagtgttgaaatcgttgcgccgtattgatcgctccaacgtgcgtgaaaaaacggttcgtggtcaatacaccgcgggctttgcgcagggtcaaaaggtgccgggctatctggaanaagagggcgcgaataaaagcagcaacaccgaaactttcgtcgcgatccgcgtcgacatcgataactggcgttgggcgggcgtgccattctatctgcgcaccggcaagcgtctgccaactaagtgctctgaagtcgtggtttatttcaagacgcctgaactgaatctctttaaagagtcctggcaagacctgccgcagaacaaattgacgattcgcctgcagccggatgaaggcgtagatattcaggtacttaacaaagtaccgaggctggatcataagcataatctgcaaatcacgaagcttgatctgagctactccgagacctttaatcagacgcacctggcggatgcatatgagcgcctgctgctggaaacgatgcgtggcattcaggcgctgtttgtccgccgtgacgaagtggaagaagcctggaagtgggtggactccattaccgaagcatgggcgatggacaacgacgcgccgaagccgtatcaggcgggcacctggggaccggtagcgtccgtggcgatgattacccgtgacggtcgttcgtggaatgagtttgagtaa

SEQ ID NO: 9659 - DNA, 612 bp, Salmonella typhi
  CDS (1)...(612)
atgagtgcaatcgcgcctggaatgatcctcttcgcgtacctctgcggctcaatttccagtgccattctggtttgccgcatcgccgggctgcccgatccgcgagaaagcggctccggcaacccgggcgcgacgaacgtattacgaatcggtggcaagggagcggctgtcgcggtacttatttttgacatccttaaaggcatgttgcccgtctggggcgcgtatgcgttaggcgttacccctttctggctggggcttatcgctatcgccgcctgtctgggacatatctggccggtcttttttggctttaaaggcgggaaaggcgtagcaaccgcgtttggcgccattgcgcccatcggctgggatttaaccggcgtcatggcaggcacctggctgctgacggtcctgttaagcggttattcatcgttaggggcgattgtcagcgccttgattgcgccgttttacgtctggtggtttaaaccgcagttcactttcccggtgtcgatgctgtcatgtctcattttgctgcgccatcatgacaacatccagcgtctgtggcgtcgccaggagacgaaaatctggacgaagctgaaaaagaaacgccagaaagattga

SEQ ID NO: 9660 - DNA, 1404 bp, Salmonella typhi
  CDS (1)...(1404)
  misc_feature (1)...(1404): n = A,T,C or G
atggcaatgtggcgcacaatactatctactgacaaagataatgcaagtcagttcgtcaagaatctgcccagatgtgacatagcccataagtacatcgcccatggctntcacgacatcgagtnacagttgatcgtcnatcacgacgccgtagatgcgctgcgacatcatcttcatacgctcagctgcgagcatcatgcgaccagccagttgctgaatatctatttcgaaacgcctgataactgcctacgccgccatgatatggggctgcgtattcgtggtgaaaatgggcgctatgaaatgaccatgataattgccggccgggtaacgggcgggctgcaccagcgacccgaatacaatgttgcgctaagcgaacccgtgctggatctgacgcaacttccggcggaggtctggccggatggcaacctgcccgacggcctgtcatcaagcgtacagccgctgttcagtaccgatttttaccgggaaaaatggtgtctggacgttgacggcagcaggattgatattgcgctcgatctcggcgacgtaaaagcgagcgagtttgccgaaccaatttgtgagctggagcttgagttgcttcgcggcgatacgcgcgccgtgttaacactggcgaagcaactgctgtcgcaaaccggtttgcgtcagcgcagtctgagtaaggcggcgcgaggttatcacctggcgcaggggaatgcgccgcgagagaatacaccaacggcaattctgcggactgccgcgaaagctacggtagagcaagggctggaggcctcgctggatctggcgttgtcacagtggcagtaccatgaagagctctggctgcgcggcgacgagtcggcgaaagaacatgtgctggatgctatgggattagtgcgccatgccttaatgctttttggtggcattgttccacgtaaagcgagcgctcacttacgtgatctacttacccaggcggaagcgacgatgacatccgcggtgtccgccgtcacagccgtttatagtacgcaaacggcgatggcgaaactggcattgacggaatggctggtgacgaaagcctggcagccatttctggacgcgaaggcgcaggccaaaatggccgantcttttaagcgtntcgccgacattcatctttctcgtcatgctgctgaattaaaaaaagtttttggacaaccgctgggtgataagtatcgcgaccagttgccgcgtttgactcgcgatatcgacagcgttttactgctggccgggtattatgatgcgatggtcgcgcaggcatggctggaaaactggcagggattgcgtcacgccattattaccgggcaacgtattgaaattgaacatttccgtaatgaggccatcaaccagcagccgttctggttgcacagcggaaaacgataa

SEQ ID NO: 9661 - DNA, 1434 bp, Salmonella typhi
  CDS (1)...(1434)
atgaaagtaaatctgccagcgtttgaacgtgcaggcgtcatggttgtgggtgatgtaatgctggatcgctattggtatggccccacttgccgtatttcaccggaagcgccggtgcccgtggttaaggtaaataccgttgaggaacgtccgggcggcgcggcgaacgtggcgatgaacattgcgtctctgggagcgaacgcccgtctggtcggcctgacgggtattgatgacgccgcgcgcgcgctgagcaaaacgctggcggaggtcaatgtgaagtgcgacttcgtttctgtgccgacgcatccgacgattaccaaactgcgcgtactatcacgtaatcagcagctcattcgtcttgattttgaagaaggctttgagggcgtggacccgcagccgttgcatgagcgtatcaaccaggcgctgggatcgatcggcgcgctggtattgtccgattatgccaaaggcgctctgaccagcgtgcagactatgatttccctagcgcgccaggcgggcgtgccggtgctcatcgatccgaaaggaacggattttgaacgttaccgcggcgccacgctgctgacgccaaacctttctgaattcgaggcggttgcggggaaatgtaaaagcgaagacgaactggttgaacgcggcatgaagctcattgccgattacgacctttccgcgctgttggtcacgcgttccgaacagggaatgacgctgctgcaaccgaataaagcgccgctacatatgccgacgcaggcgcaggaagtttatgatgttaccggtgcgggcgatacggtgatcggcgtgctggcggcgacgctggcggcgggaaataccctggaggaggcgtgttatttcgccaatgcggcggcgggcgtagtggtaggtaaactcgggacgtcaacggtttcccctattgagctggaaaacgcagtgcgcggacgcgcggataccggcttcggcgtcatgaccgaagaggagttgagacaggccgtcgccagcgcgcgtaagcgtggcgagaaagtggtcatgaccaacggcgttttcgatattctgcacgcgggccacgtctcttatctggcgaacgcgcgcaaactgggcgaccgcctgattgttgcggtcaatagtgacgcctcgactaaacgtctgaaaggcgaaagccgtccggttaatccgctcgaacagcgtatgatcgtgctgggcgcgctggagtcggtcgactgggttgtctcttttgaagaggatacgccgcaacgactgattgccggtattctgccggatctgctggtaaaaggcggcgactataagccggaagagatcgcgggcagcgaagaggtctgggccaacggcggcgaagtcatggtgctgaacttcgaagatggttgttccacgaccaatatcatcaaaaagatccagaccgagagcgagaagtaa

SEQ ID NO: 9662 - DNA, 1935 bp, Salmonella typhi
  CDS (1)...(1935)
atggcgaaaaacctaatactctggctggtcattgccgttgtgctgatgtcagtattccagagctttgggcccagcgagtctaatggccgtaaggtggattactctaccttcctgcaagaggtcaatcaggaccaggttcgcgaagcgcgtatcaacggacgtgagatcaacgttaccaagaaagatagtaaccgttacacgacttacattccgattaatgatccgaagctgcttgataacctgctgactaaaaacgtcaaggttgttggcgaaccacctgaagagccaagcctgctggcttctatcttcatctcctggttcccgatgctgttgctgatcggcgtctggatcttcttcatgcgtcagatgcagggcggcggtggcaaaggcgccatgtcgttcggtaagagcaaggcgcgtatgctgacggaagatcagatcaaaaccacgtttgctgacgttgcgggttgtgacgaagcgaaagaagaagtggcggaactggttgaatacctgcgtgaaccgagccgtttccagaagctgggcggtaaaattccgaaaggcgtcctgatggtcggcccgccgggtaccggtaaaaccctgctggcaaaagccattgcgggtgaagcgaaggtgccattctttacgatttccggttctgactttgtggaaatgttcgtgggtgtcggcgcatctcgtgtgcgtgacatgttcgaacaagccaagaaagcggcaccgtgcattatcttcatcgatgaaatcgacgccgtaggtcgccagcgtggcgctggtctgggcggtggtcacgatgaacgtgagcagacgttgaaccagatgctggttgagatggacggcttcgaaggtaacgaaggtatcatcgttatcgccgcaactaaccgtccggacgtccttgacccggcgctgctgcgtcctggccgttttgaccgtcaggtggtggtaggcctgccggatgttcgcggtcgtgagcagattctgaaggtgcatatgcgtcgcgtaccgttagcgacggacattgatgcggcgatcattgcgcgcggtacgccgggcttctccggtgcggacctggcgaacctggtcaacgaagcggcgctgtttgccgcacgcggcaacaagcgcgtagtgtcgatggttgagttcgagaaagcgaaagacaaaatcatgatgggcgccgaacgtcgctccatggtgatgacggaagcgcagaaagagtcgaccgcgtaccacgaagcgggccacgcgattatcggtcgcctggtgccggaacacgatccggtgcacaaagtgacgattatcccgcgtggtcgtgcgctgggcgtgaccttcttcttgcctgaaggcgacgcgatcagcgccagccgtcagaagctggaaagccaaatcagcacgctgtacggcggccgtctggcggaagagattatctacggcgttgagcatgtttctaccggcgcgtcgaacgacattaaagtcgcgactaacctggcgcgtaacatggtcacccagtggggcttctcggagaaactcggtccgttgctgtacgcggaagaagagggcgaagtgttcctcggccgtagcgtcgcaaaagcgaaacatatgtctgatgaaactgcgcgtatcatcgaccaggaagtgaaagcgctgattgaacgtaactacaatcgcgctcgtcagatcctgactgacaatatggatattctgcacgcgatgaaagatgcgctgatgaaatatgaaaccatcgatgcgccgcagattgatgacctgatggcgcgtcgtgaagtgcgtccgcctgcgggctgggaagatccaaacggcaccaataactctgacagcaatggtacgcctcaggcgccgcgtccggttgatgaaccacgcacgccgaacccgggcaacacgatgtcagagcagctgggcgacaaataa

SEQ ID NO: 9663 - DNA, 849 bp, Salmonella typhi
  CDS (1)...(849)
  misc_feature (1)...(849): n = A,T,C or G
atgaaactcttcgctcagggcgccacgctcgatctcactcatccgcatgttatggggatcctgaacgtaacgccggattcgttctccgacggcggcgcgcataacacgctgattgaggcggtgaaacatgcgaatttaatggtgaataccggggcgacaattattgatgtggggggggaatcaacgcgaccaggcgcggcagaagtgagcgtggaagaagagctggatcgcgttattccggtactggaagcaatcgcgcaacgttttgaagtgtggatttctgtggatacctctaaacccgaggtgatccgtgaagcggcaagggcgggcgcgcatattatcaatgatgtccgttcactctccgaacccggcgcgttggaagcggcagcgganaccggcttgccggtcagtcttatgcacatgcagggcaaccccaaaaccatgcaggaggcgccgaaatatgacgatgtcttgcccgaggtgaatcgctactttattgagcaaatagcacgttgtgagaaggccggcatcgcaaaagagaaattgttgctcgacccaggattcggtttcggtaanaatctctctcacaattataccttactggcgcgactgggtgagtttcatcattttaacctgccgctgctggtgggcatgtcacgtaaaacgatggttggtcagttacttaacgtgggaccatcagaccgtctgaacggtagccttgcgtgcgcggtaattgctgcgatgcagggcgcgcagatcattcgcgtccatgacgtcaaagaaaccgtagaggcgatgcgggtggtggaagccactctgtcngcaaagggaaacaaacgctatgagtaa

SEQ ID NO: 9664 - DNA, 1338 bp, Salmonella typhi
  CDS (1)...(1338)
  misc_feature (1)...(1338): n = A,T,C or G
atgagtaatcgtaaatatttcggtaccgatgggattcgcggacgtgtaggcaatgcccccattacacctgatttcgtgcttaaactgggttgggctgccggaaaagtgctggcgcgtcatggttcgcgtanaatcattatcggtaaagatacgcgtatttccggctatatgctggaatccgcgctggaggcaggccttgccgctgcggggctgtcggcctcgtttaccnnacctatgccaacgccagccgtcgccnatctgacgcggactttccgcgcggaggcgggtatcgttatctcggcttcccataacccgttctatgataacggcattaaattcttctctatcgacggtacgaaactgcctgacgatgtggaagaagccatcgaagccgaaatggaaaaagagatcacctgcgtagactccgccgagctggggaaagccagccgcatcgtcgacgccgccggacgctatattgagttctgtaaaggcaccttcccgaacgaactgagcctcaacggcctgaaagtggttgtggattgcgccnacggcgctacctaccacatcgctccgaatgtgctgcgcgagctgggcgcgaccgtgatcgccatcggctgtgagccaaacggcgtcaacattaatgaagaagtgggcgcgaccgacgtgcgcgcgttgcaggcgcgcgtgttggcggagaaggcggacctcggcatcgcgcttgacggcgacggcgaccgggtcatcatggttgaccatgaaggcaataaagtcgatggcgatcagatcatgtatatcatcgcgcgcgaagggctgcgccaggggcaactgcgcggcggcgcggtggggacgctgatgagcaatatggggctggagctggcgctcaagcagcttggcattccgtttgcccgggcgaaagtgggcgaccgctatgtgctggaaaaattgcaggaaaaaggctggcgcatcggcgcggaaaactctggtcacgttattctgctggataaaacgaccactggcgacggtattgtggcggggctacaagttctggcggcgatggtgcgtaatcatatgagtctgcacgatctgtgcagcggaatgaaaatgttcccgcagattctggttaacgtgcgttacaccgctggtagcggcgatccgctggaaaatgaagcggtgaaagcggtaacggcggacgtagaagccacgctcggcaatcgtgggcgggtactgctacgtaaatccggtaccgaaccgctgattcgcgtgatggttgaaggcgaggatgaagcgcaggttacggctttcgcccatcgtatcgcggatgcggtaaaagccgtttaa

SEQ ID NO: 9665 - DNA, 885 bp, Salmonella typhi
  CDS (1)...(885)
  misc_feature (1)...(885): n = A,T,C or G
atgtctcatctatacgaccctaccacgcagtattacaccggcgagtatcctaagcaaaaacagccggcgcccggcgtccaggcgaaaatgacgcctgttcctgactgtggtgaaaaaagttatgtcggcagtggtcgccttaaagatcgtaaggcgctggtgacagggggcgactccgggattgggcgcgctgccgctatcgcttacgcgcgtgaaggcacagatgtcgcgatcaactatctgccagcggaagaagaggacncccagcaggttaaagcgctgattgangagtgcggccgtaaagcggtgttattgccgggcgatcttagcgacgaatctntcgcccgttcgctggtccataangcgcgcgaagcgctgggcgggctggacattctggcgctggtagccggtaaacagacgtcaatcctggagacaaaagatctaaccagcgagcaatttcagcaaacgttcgccgtaaacgattttgacctgttacggataacccaggaagcgactccgctgctgccanaaggcgccantattatnannacgtcgtctatccaggcntatnagcccagtccgcaccngntngattatgcggcaaccaaggcggcaatccttaattacagccgcggcctggcgaaacaggtggcggaaaaaggaattcgcgtgaatattgtcgcgcctggccctatctggacagcgctgcaaatttccggcggccaaacacaggataaaattccgcagtttggccagcagacgccaatgaagcgggccggtcaaccggcagagctggcgccggtgtatgtctatctggcaagccaggaatcaagttacgttaccgcagaagtgcacggcgtgtgcggcggggaacatttaggctaa

SEQ ID NO: 9666 - DNA, 1503 bp, Salmonella typhi
  CDS (1)...(1503)
atgaacaaagaaattttggctgttgttgaagccgtctccaacgaaaaagcgctgccacgcgaaaaaatttttgaagcgctggaaagtgcgctggcgacagcaacaaagaaaaaatatgagcaggagatcgatgttcgtgtagaaatcgatcgtaaaagcggtgattttgatactttccgccgttggttgatcgttgaagaagtgaccatgccgacgaaggaaattacgctggaagcggcgcgctttgaagacgaaagcctgaatgtcggcgactatgttgaagatcagattgaatctgtcacctttgaccgtatcaccacgcagactgcgaaacaggttatcgtgcagaaagtccgtgaagctgaacgcgcgatggttgtcgatcagttccgcgaccaggaaggcgaaatcgtcactggcgtggtgaagaaagtgaaccgcgacaatatctctttggaaattaaatccgaagggatggccggtaacgctgaagcggtgattctgcgtgaagatatgctgccgcgcgaaaacttccgccctggcgaccgtattcgcggcgtgctgtatgctgttcgcccggaagcgcgtggcgcgcagctgttcgtcacccgttccaagccggaaatgctgatcgagctgttccgcatcgaagtgccggaaatcggcgaagaagtgattgaaattaaagcggcggctcgcgatccgggttctcgtgcgaaaatcgcagtgaaaaccaacgataagcgtatcgatccggtcggcgcttgcgtggggatgcgcggcgcgcgcgttcaggcggtctctaccgaactgggcggtgagcgtatcgatatcgtgctgtgggatgataacccggcgcagttcgtcattaatgcgatggcgccggcagatgtcgcgtctatcgtggtggacgaagataaacataccatggatatcgccgttgaagccggtaatctggcgcaggcgatcggacgtaatggtcagaacgtccacttggcttcgcaattgagcggctgggaactcaacgtaatgaccgttgatgacttgcaggctaaacatcaggctgaagcacatgccgctatcgagatctttactaaatatcttgatattgatgaagagttcgcgaccgttctggtagaagaaggtttctccacgctcgaagaactggcctatgtgccaatgaaagaactgctggaaattgacggccttgatgagccgaccgttgaagcactgcgcgagcgtgctaaaaacgcactggccactctggcgcaggaccaggaagcaagcctaggtgataacaaaccggctgacgatctgctgaatctggaaggattagatcgcgatatggctttcaaactggcggctcgtggtgtttgtacgctggaagatctcgccgaccagggcattgatgatctggctgatatcgaagggttgaccgacgaaaaagccggtgagctgattatggctgcccgtaatatttgctggttcggcgacgaagcgtaa

SEQ ID NO: 9667 - DNA, 2679 bp, Salmonella typhi
  CDS (1)...(2679)
  misc_feature (1)...(2679): n = A,T,C or G
atgacagatttaaccctaaaagcgctggccgcagagagacaggtttccgtggatcgcctggtacagcagtttgctgatgcaggtatccggaaatctgctgacgactctgtgtccgcacaagaaaaacagactttactggcgcacctgaaccgcgaagcggtttctggccccgataaattgacgctgcagcgtaaaacgcgcagcaccctgaatattcctggtaccggtggaaaaagtaaatcggtacaaatcgaagtccgcaagaagcgcacctttgtgaaacgcgatccgcaagaggctgaacgcctggccgcggaagagcaggcgcagcgtgaagcggaagagcaagcccgtcgtgaggcagaagaacaggccaaacgcgaggcgcaacaaaaagctgaacgcgaggccgcagaacaagctaagcgtgaagccgctgaaaaagcgaaacgtgaagctgcggaaaaagacaaagtgagcaatcaacagactgacgatatgaccaaaaccgcccaggccgaaaaagcccgccgtgagaatgaagctgcagagctgaagcgtaaagcggaagaagaagcacgtcgcaaactcgaagaagaagcgcgtcgtgtagcagaagaagctcgccgcatggcggaagaaaacaaatggaccgcaacgcctgagccagtagaagacaccagtgactatcatgtcaccacttctcagcacgcgcgccaggccgaagacgaaaacgatcgtgaagtagaaggtggtcgtggtcgtggccgtaatgcaaaagcggcgcgtccggcgaaaaaaggcaaacatgccgaatccaaagccgatcgcgaagaagcgcgtgctgcggttcgcggcggtaaaggcggcaagcgtaaagggtcttctttacagcaaggcttccagaagcccgctcaggccgttaaccgtgacgtggtgatcggtgaaaccatcaccgtcggcgaactggcgaacaagatggcggtgaaaggttctcaggtcatcaaagcgatgatgaagctgggcgccatggccaccatcaaccaggtcatcgaccaggaaaccgcacagctggttgccgaagagatgggccacaaagttatcctgcgtcgtgaaaacgaactggaagaagcggtaatgagcgaccgtgataccggcgctgcggctgaaccgcgcgcaccggttgtgaccatcatgggccacgttgaccacggtaaaacctctctgctggactacattcgttccacgaaagtggcctctggcgaagcgggtggcattacccagcacatcggtgcttaccacgttgaaactgacaacgggatgatcaccttcctggacaccccgggccacgccgcgtttacctccatgcgtgctcgtggtgctcaggcaacggatatcgtggttctggttgttgcagcagacgacggcgtgatgccgcagactatcgaagctatccagcacgcgaaagcggcaggtgtgccggtcgtggttgcggtgaacaaaatcgataagccggaagcggatccggatcgtgtgaagaacgaactgtcccagtacggcattctgccggaagagtggggcggcgagagccagttcgttcacgtgtctgcgaaagcgggcaccggtatcgacgaactgcttgacgctatcctgctgcaggccgaagttctggaactgaaagcggttcgtaaaggtatggcgagcggcgcggtgatcgaatccttcctggataaaggtcgtggtccggtggctaccgttctggtacgcgaaggtacgctgcataagggcgatatcgtgctgtgtggcttcgaatacggccgcgtgcgtgcgatgcgtaacgaactgggtcaggaagtgctggaagcgggtccgtccattccggtggaaatcctcggcctgtccggcgttccggctgccggtgacgaagtgaccgtggttcgcgacgagaagaaagcgcgtgaagttgctctgtatcgtcagggtaaattccgtgaagttaaactggctcgtcagcagaaatctaaactcgagaacatgttcgtcaacatgaccgaaggcgaagttcacgaagtgaacatcgtgctgaaggctgacgtacagggttccgtggaagcgatctccgactccttgctgaaactgtctaccgacgaagtgaaagtgaagatcatcggttctggcgtaggtggtatcaccgaaaccgacgcgaccctggctgcggcgtccaacgcgattctggtgggcttcaacgttcgtgctgatgcttctgcgcgtaaagtgattgaatccgaaagtctggatctgcgttactactccgtcatctataacttgatcnacgaagtgaaagcggcgntgagcggcatgctgtctccggaactgaaacagcagatcatcggtctggctgaagtgcgcgatgagttcaaatcgccgaaattcggcgcgatcgcgggctgtatggntaccgaaggtacaattanacgccataatccaatccgcgtantgcgcgacaacgtgnnnatctatgaaggcgagctggaatccctgcgccgcttcaaagatgacgttaacgaagtccgtaacggcatggaatgtggtatcggcgtgaagaactacaacgacgttcgcgttggcgatatgattgaagtgttcgagattatcgagatccnacgtaccatcgcttaa

SEQ ID NO: 9668 - DNA, 336 bp, Salmonella typhi
  CDS (1)...(336)
  misc_feature (1)...(336): n = A,T,C or G
gtgtgcgcggaagcggagttttttatgtacgcggttttccanagtggtggtaaacaacaccgagtaagcgaaggtcagaccgttcgcctggaaaagctggacatcgcaactggcgaaactatcgagttcgctgaagttctgatgatcgcaaacggtgaagaagtcaaaatcggcgttcctttcgttgatggcggcgtaatcaaagctgaagttgttgcccacggtcgtggcgagaaagttaaaatcgttaagtttcgtcgccgtaaacactaccgtaagcagcagggccatcgtcagtggttcactgatgtgaaaattaccggcatcagcgcttaa

SEQ ID NO: 9669 - DNA, 270 bp, Salmonella typhi
  CDS (1)...(270)
atgtctctaagtactgaagctacagctaaaatcgtttctgagttcggtcgtgacgcaaacgacaccggttctaccgatgttcaggttgctctgttgactgcacagattaaccacctgcagggtcactttgcagagcataaaaaagatcaccacagccgtcgtggtctgctgcgtatggtttctcagcgtcgtaaactgctcgactacctgaaacgtaaagatgttgcacgctacaccgcgctgattgagcgtctgggtctgcgtcgctaa

SEQ ID NO: 9670 - DNA, 2166 bp, Salmonella typhi
  CDS (1)...(2166)
  misc_feature (1)...(2166): n = A,T,C or G
gtgccgtcaaaaattggaaaggatattattttgcttaatccgatcgttcgtgaattccagtacggccagcataccgntacgctggaaactggcatgatggcgcgtcaggccactgccgctgttatggtaagcatggatgacaccgccgtattcgttaccgttgtcggccagaaaaaagccaagccaggccaggacttcttcccactgaccgttaactatcaggagcgtacctacgctgctggtcgtatcccgggcagcttcttncgtcgtgaaggccgtccaagcgaaggcgaaaccctgatcgcgcgtctgattgaccgcccggttcgtccgctgttcccggaaggtttcgttaacgaagtgcaggttattgcgaccgtcgtttccgttaacccgcaggttaacccggatatcgtggcgatgatcggcgcatccgctgcgctgtcgctgtccggcattccgttcaacggcccaatcggcgcggcgcgcgtaggttacatcaatgaccagtacgtactgaacccgacccaggacgagctgaaagaaagcaagctggacctggtggttgccggtaccgaagcggctgtgctgatggtggaatccgaagctgaactgctgagcgaagacactatgctgggcgcggtggtattcggtcacgagcagcagcaggttgttatccaggcgatcaacgatctggtgaaagaagccggtaaaccgcgttgggactggcagccggaagccgtcaacgacgcgttgaacgcgcgtgttgctgcgctggctgaatctcgtctgagcgacgcgtaccgcatcaccgataaacaagagcgctatgctcaggttgacgtaatcaaatccgaaaccatcgagcagcttattgcagaagatgaaactctggatgctaacgagctgggtgaaatcctgcacgccatcgagaaaaacgtggtacgtagccgcgtactggcaggcgagccgcgtattgatggccgtgaaaaagacatgatccgtggtctggacgtgcgcactggcgtactgccgcgaactcacggttccgctctgtttacccgtggtgaaacgcaggcgctggttaccgcgactctgggtactgcccgtgacgcgcaggtgcttgatgaactgatgggcgagcgcactgacagcttcctgttccactacaacttccctccgtactccgtaggcgaaaccggcatggtcggttctccgaagcgtcgtgaaattggtcacggtcgtctggcgaagcgcggcgtgctggcagtgatgccggacatggataaattcccgtacaccgttcgcgtggtgtctgaaatcaccgaatccaacggttcttcttctatggcttccgtgtgcggcgcttctctggcgctgatggacgctggcgtgccaattaaagccgccgtagcaggtatcgctatgggtctggtgaaagaaggcgacaactacgttgtactgtctgacattctgggcgacgaagatcacctgggcgatatggacttcaaagtggcgggttcccgcgacggtatctctgcgctgcagatggatatcaaaattgaaggtatcaccaaagagatcatgcaggttgcgttgaaccaggctaaaggtgcgcgtctgcacatcctgggcgtgatggaacaggcgatcaacgcgccgcgcggcgatatctctgaatttgcgccgcgtatccataccatcaagatcagcacggacaagatcaaagacgtgatcggtaaaggcggttctgtgatccgcgcgctgactgaagagaccggcaccaccatcgaaattgaagatgacggtactgtgaagatcgcggcgaccgacggtgaaaaagcgaaatacgctatccgtcgtatcgaagagatcaccgcagagatcgaagtcggccgtatctacaatagtaaagtgacccgtatcgttgactttggcgcgtttgttgccatcggcggcggtaaagaaggtctggttcacatctctcaaatcgcggataagcgtgtagagaaagtgaccgattatctgcagatgggtcaggaagtcccggttaaggttctggaagttgaccgccagggccgtgtacgtctgagcattaaagaagcaaccgagcagtctcaacctgcggctgcgccggaagctccggcgagcgaacaggccgagtaa

SEQ ID NO: 9671 - DNA, 1941 bp, Salmonella typhi
  CDS (1)...(1941)
atgatgagttatgtagactggccgccattaattttgaggcacacgtactacatggctgaattcgaaaccacttttgcagatctggggctgaaggctcctatccttgaagcccttaccgatctgggttacgaaaaaccatctccaatccaggcagagtgcattccgcatctgctgggcggtcgcgacgtgctgggcatggcccagaccggtagcggcaaaaccgcagcgttctctttaccgctgctcaacaatcttgatcctgagctgaaggcacctcagattctggtgctggcgccaacccgcgaactggcggtacaggttgccgaagccatgacggatttctctaaacacatgcgcggcgtaaacgtggttgccctgtacggcggtcagcgttatgacgtgcagttacgcgccctgcgtcaggggccgcagatcgttgtcggtacgccgggacgtctgcttgatcacttaaaacgcggcaccctcgacctctctaaactgagtggtctggtgctggatgaagccgacgaaatgctgcgtatgggcttcatcgaagacgttgaaactattatggcgcagatcccggaaggtcatcaaaccgctctgttctccgccaccatgccggaagcgattcgtcgcattacccgccgctttatgaaagagccgcaggaagtgcgcattcagtccagcgtgactacccgtcctgacatcagccagagctactggactgtctggggtatgcgtaaaaacgaagcactggtgcgtttcctggaagcggaagactttgatgcggcgattatcttcgtacgtaccaaaaacgcgaccctggaagtagcagaagcgctggaacgtaacggctacaacagcgccgcgttgaatggcgatatgaaccaggcgctgcgtgagcagactctggaacgcctgaaagatggtcgtctggacatcctgatcgccaccgatgttgcggcacgtggtctggacgttgaacgtatcagcctggtggtgaactacgatattccgatggactccgagtcctacgttcaccgtatcggtcgtaccggtcgtgcgggtcgcgccggtcgcgcgctgctgttcgttgagaaccgcgagcgtcgtctgctgcgcaacatcgaacgcaccatgaagctgaccattccagaagtggaactgccgaacgcagaactgctgggtaaacgccgtctggaaaaattcgccgcgaaagttcagcagcaactggaaagcagcgatctggatcagtaccgtgcgctgctggcgaaaatccagccgtctgccgaaggtgaagagctggatctcgaaacgctggccgccgcactgctgaaaatggcgcagggcgagcgtccgctgattctgccgccggatgcgccgatgcgtcctaagcgtgaattccgtgaccgtgacgaccgtggtccgcgcgatcgtaatgaccgtggcccgcgtggcgatcgtgaagaacgtccgcgtcgtgaacgtcgtgacgttggcgatatgcagttataccgcattgaagtgggccgtgatgacggcgttgaagttcgtcatatcgtgggcgctatcgctaacgaaggcgacattagcagccgttacattggtaacattaagctgttcgcgtctcactccaccatcgagctgccgaaaggtatgccgggcgaagtgctccagcacttcacgcgtactcgcattctgaacaagccgatgaatatgcagctgttgggtgatgcggttccgcacgcgggcggcgaacgtcgcggcggtggtcgtagcttcagtggcgaacgtcgtgaaggcggtcgtaatttcagcggcgaacgtcgtgaaggtggtcgtggtgatggtcgtcgcttcagcggcgaacgtcgtgaaagccgtggtccgcgtcgtgatgactctaccggtcgccgtcgtttcggcggtgatgcgtaa

SEQ ID NO: 9672 - DNA, 1008 bp, Salmonella typhi
  CDS (1)...(1008)
  misc_feature (1)...(1008): n = A,T,C or G
atgactgacaaaactattccgttctnggtgctggatctggcgccgatccctgaaggatcttcggcaaaagaagccttcacgcactcgcttgatctcgcacggctggctgaaaagcgtggctatcaccgctactggctggcggaacatcacaacatgaccggtatcgccagcgcggcgacctcggtattgattggttatctggcggccaataccacaacattacatcttggctccggcggcgtgatgctgcctaaccattcaccgctggtgattgccgagcagttcggcacgctgaatacgctctacccgggacgtatcgacttaggattgggacgcgcgccgggtagcgatcagccgacgatgcgcgcgctgcgtcgccatatgagcggcgatatcgataactttccacgcgatgtcgcagagctggtggactggttcgacgctcgcgatcctaatccgcatgtgcgcccggtgcccggctacggcgagaagatcccgatctggctgttgggctccagcctgtatagcgcgcaactggcggcccagcttggcctgccgttcgcctttgcttcgcatttcacgccggatatgttgttccaggcgctgcatctgtaccgtactcagttcaaaccttcagcgcggctggaaaaaccgtacgcgatggtgtgtatcaatattatcgccgccgacagcaaccgcgacgccgaattcctgtttacctccatgcagcaggcttttgtgaagctacgccgtggagaaaccggccaactgccgccgccgattgagaatatggaaaccttctggtcgccatccgagcagtatggcgtgcagcaggcgctgagtatgtcgctggtcggcgataaagcgaaagtccgccacgggctggtgtccattctgcgggaaacccaggcggatgaaattatggtaaacgggcagattttcgaccaccaggcacgcctgcattcgtttgatttagcgatggatgtgaagcaggaattgttggggtag

SEQ ID NO: 9673 - DNA, 258 bp, Salmonella typhi
  CDS (1)...(258)
  misc_feature (1)...(258): n = A,T,C or G
atggcacataaaaaggctggcggctcgactcgtaacggtcgcgattctgaagctaaacgtctgggcgtaaaacgctttggcggtgaagcagttctggcaggcagcatcatcgttcgtcaacgtggtactaaattccacgctggcaccaacgttggttgcggtcgtgaccacactctgtttgctaaagcagacggtaaagtgaaattcgaagttaaaggnccgaaaaaccgtaaatacatcagcatcgttgctgagtaa

SEQ ID NO: 9674 - DNA, 864 bp, Salmonella typhi
  CDS (1)...(864)
atgaaacaaaacgaatcggcggataattctcagggccaactctttattgtacctactcctatcgggaatttggctgatattacccaacgcgcgctggaagttttacaagccgttgatttaattgccgctgaagacactcgtcacaccggtttattgctgcaacattttgggattaatgcccggttgtttgcgctgcacgaccataacgaacaacaaaaagcggaaacgctggtcgcgaagctgaaagaggggcagaacattgctctggtttccgatgccggaacgccgctaattaatgaccccggctatcacctggtacgtacctgccgtgaagcggggattcgcgtggtgccgctaccagggccgtgtgctgctatcactgcattaagcgccgcaggtttaccatcagatcgtttttgttatgaaggcttcctgcctgccaaatcaaaaggccgccgtgatgcgctaaaagccattgaagcggagccacgaacgctgattttttatgagtccacccatcgtctgttggatagcctggaagatatggtggccgtgtggggcgaatcccgttacgtggtgctggcgcgtgagctgaccaaaacctgggaaaccattcacggcgcgccggtcggcgagctgctggcgtgggtcaaagaagatgaaaaccgtcgcaaaggcgaaatggtgctgattgtcgaagggcataaagcgcaagaagacgacctgcccgccgacgcgctgcgcacgctggcgctgctacaggcagagctgccgctgaaaaaagcggcggcgctggcagcagaaattcacggcgtgaagaaaaatgcgctgtataagtatgcgctggcgcagcaggaagagtaa

SEQ ID NO: 9675 - DNA, 1044 bp, Salmonella typhi
  CDS (1)...(1044)
atgaaatcagtggttattcacgctgagggagacgtgcgcgttgaagaacgtcccttaccacaactgcaagccgaggacgatgtgttggtcaaagtcgttagctcagggctttgcgggtcggatatcccgcgtattttcgcgcagggcgcccattattatcctattacgttaggccatgaattcagcggctacgttgaatcctacggcacaggcgtaacggatatgcagcctggcgatgccgtcgcttgtgtcccgcttcttccctgctttcactgtccgcaatgcgaacgcggttacttttctttatgcaaacagtatcagtttgtaggatcgcgcagcgaaggcggtaatgcggaatatgtggtggtcaaacgggccaatcttttccgcttgccgtctgatatgccgattgaagatggcgcgtttatcgaaccgattaccgtgggcttacacgcctttcatctggcgcagggctgcgaggggaaaaacgtaattatcgtcggggccgggacaattggcctgctggccttacagtgcgcgcgggaactgggcgcgcgaagcgtaacggcgattgatatcaatccgcagaaactggaactggcgaaagcgctcggcgcaacgcatacctgtaatagccgggaaatgaccgccgacgacatccagaccgcgttgtccgacattcagtttgatcaactggttctcgaaacggcaggaactccccagaccgtctcgctggctatcgatatcaccgggccgcgcgcgcaactggcgctggtggggacgttacatcacgatctcaccctgacgacgcgtacattcgggttaattttgcgtaaagagctcacgctcctcggcagttggatgaactactccgcgccatggccaggagaagaatgggaaaccgcagcgcgcctgttggctgaaaaacgtcttcaactgacccctctcattgcccatcgcggcgatgcggaaagctttgcagaagcagtcaaagcgcttaatggcgcgcccatgcagggcaaaatcttacttcaactttcctga

SEQ ID NO: 9676 - DNA, 1428 bp, Salmonella typhi
  CDS (1)...(1428)
  misc_feature (1)...(1428): n = A,T,C or G
atgaaaaagatcattgcagtgaccggctgccctaccggtattgcgcatacatttatggctgaagaagccttaaaaaatgccgcgaaaaaattatctgttgaaataaaagttgaaaccaatggtgccagcggtgttgaaaatgccattcaacctgctgatctggtagatattgccggagtcattattgcggcggataaagatgtcttacctgatcgctttaatggtttaccggttattnaagtaccggtaaaagaagcaatccatcatcctgcggagctgattaacaaagttattaatggtgaagccccaatacgtaaaggcgaatcaaccaccagcacggaaattatcgaaaaagaatcactggggcgacaaatttataagcacctgatgagtggtgtttcaaatatgctaccttttgtagttgccggaggcatattaattgcggtgtcgcttttatgggggatttattccgctgatcctaattcagctgaatacaatgcaaccgccgcaatgctaatgaaaatcggtcagcaagccttttcgattatggttccggtctttaccgcttatattgcattctctatttctggcagaccagggatggtggctgggtttgtcggcggcttactggcaaatactaccggagcaggatttctcggtgggataattgccggattcgccgccggttacctgatgttatgggtaaagaatcgactcgaaggcttaccgcgtcagtatgaaggcctgaaatcgatttttattatgccgctcattggcgtactggttattggcgtgttgatgtcgctgcttgggcaacctgtcgcagctatcaataatagcatgatgaactggctggcatcgctacaggaagcgaatccaatattgctgggtattgtggtgggtgcaatgtgctcttttgactttggcggcccggtaaacaaagccgcttatgtcaccggcacgcttttactgggccagggcaacttctactttatggctggtgtgtctgccgcatgtattactccaccactggtaattgctctggcgaccaccttctttccaaaaggttttagcgaggaagaacgtgccgcaggcatggttaactatatcctcggttgtacacacatcactgaaggcgcgattcctttcgcagcgaaagatcctttgcgtgtcatcccgatgatgatgattgcttccagcatttccgcagtacttagctacagcttgcgtattcaggttccggctcctcacggcggcttcttaattttacctttggtgagtcagccgctggcctgggtgttatgtatccttgcgggatctgcatgtggtgcgatgatgcttggcctatggagattgtgggctgtgcgcaaaaattcagtcaacacaactcctgtagcaaaggctggaggtcagaatgcagctctgtga

SEQ ID NO: 9677 - DNA, 765 bp, Salmonella typhi
  CDS (1)...(765)
  misc_feature (1)...(765): n = A,T,C or G
atgttcattatttccagtaaaaatatgctccagaaggcccagcatgcaggctatgccgtgccagcctttaacatccataacctagaaaccttgcaggtggtggtagaaaccgccgcagaaatgcgctcaccgctgatcgttgccggaacaccaggcacgtttagctatgccggaatgggtaacattgtggcgatcgcgggcgatctggctcgtgaatacaatctgccactggccattcatctggatcatcatgaatcgttagccgatattgaaagcaaagttatggcagggatccgttcagtcatgatcgatggttcccactttccctttgaagagaatgtggcgctggtgaaaagcgtggtcgatttttgccatcgctacgacaccagcgtggaggcagaactgggccgccttggtgggatcgaagatgatttagtggtagacagcaaagatgccctttacaccaatccacagcaagcacgtgagtttgtggcgcgcaccggcattgattcgctggcggttgctatcggcacggcacacggtatgtatgccgctgaacctaaacttgattttgagcgactggcagaaatacgcgctctggtggatatccctctggtattgcatggggcatctggtttgccggaaagcgatattcgccaggccatcagccttggggtatgcaaagtcaatgtcgccaccggactgaatatcgccttctccgacgccttaaaagagtatttcctacaaaacccngaaagccaatga

SEQ ID NO: 9678 - DNA, 771 bp, Salmonella typhi
  CDS (1)...(771)
atgaataacgctattttcccgaataagtttaaagcggcgctggcggcgcaacaggtgcagattggctgctggtctgcactggcaagcccaatcaccaccgaagtactcggtctggcgggatttgactggctggtgctggatggcgaacatgcgccgaacgatgtgaccaccttaattccgcagttaatggcattgaaaggcagcgccagcgcgcctgtggtacgtgtgccaaccaatgaaccggtcattatcaaacggatgctggatattgggttttataacttcctgatcccctttgttgaaacgcaagaggaagcggctcgcgccgtcgcctcgacgcgttacccgccggaaggcattcgcggcgtctccgtttctcaccgcgcgaatatgttcggcacggtgcctgattactttgcgcagtcgaacaaaaacatcaccattattgttcaaatcgaaagccagttgggtgtcgacaatgttgatgccatcgccgcaacggaaggcgttgatggcatttttgtcggccctagcgatttggccgccgcgctgggtcatctcggcaatgcttctcaccctgacgtgcagcagacgattcaacatattttcgcccgcgctaaagcgcacggtaaaccgtgcggcattctggcgccggtagaggcggatgcccgccgttatctggaatggggcgcgacctttgtcgccgttggcagcgatttaggcgcattccgcgccagcacgcagaagcttgccgacacctttaaaaaataa

SEQ ID NO: 9679 - DNA, 399 bp, Salmonella typhi
  CDS (1)...(399)
atggcggactctcgacaggcacaaggaccaggcaaaagcgtactgggtatcgggcagcggattgtcaccattatcgttgagatggtggaaacccggctgcgactggcggtagtagaactggaagaagagaaagcgaacctctttcagcttttgctgatggtaggtcttaccatgctcttcgcggcgtttggcttaatgagcctgatggttctggtcatctgggctatcgatcctcagtaccgtttgaacgcgatgatcgctaccacagttgtactgttagtgcttgcgctaatcggcggcatctggactttgcgcaaagcgcgtcagtccacgctattgcgccatacgcggcacgaactggctaacgatcggcaaattctggaggacgatcagtcgtga

SEQ ID NO: 9680 - DNA, 1407 bp, Salmonella typhi
  CDS (1)...(1407)
gtgatacacggccctctggagctcattttgaacaggttaccttccagcgcatcggctttggcctgtagcgcgcacgcactgaatctcatcgagaagcgaacgctaaaccatgaggaaatgaaagcactaaaccgagaggtcattgactactttaaagagcatgtaaatccaggatttctggaataccggaaatctgttaccgccggcggggattacggagccgtagagtggcaagcgggcagtttgaatacgcttgtcgacacccaggggcaggagtttatcgattgtcttggggggtttggcatctttaacgtggggcaccgtaatcctgttgtggtatccgccgtccagaatcaactcgcaaaacaacctctccacagccaggagttacttgaccccttgcgggcgatgctggcaaaaacgctggcggcgctaacaccggggaaactcaagtacagctttttctgtaacagcggcaccgaatccgtcgaagcggcgctaaaactggcaaaagcgtatcagtcgccgcgcggcaagtttacctttatcgccaccagcggcgcatttcacggcaaatcattgggcgcgctctccgccacggccaaatccaccttccgcagaccctttatgcctttactgccgggcttccgccatgtgccgtttggcaatatcgacgcgatgagcatggcatttagcgaaggcaaaaaaacgggcgacgagatagcagccgtgattctggagcctattcagggtgaaggcggcgtgatcctgccgccgcagggatacctgacagaggtacgtaagctctgtgatgaattcggcgcgctgatgattctggatgaagtacaaaccggcatggggcgtaccggcaagatgtttgcctgcgagcacgaaaatgtgcagcctgatattctgtgtctggcgaaagccctgggcggcggcgtgatgccaattggcgccaccatcgcgactgaggaggtgttttcggttctgttcgacaatcccttcctgcataccaccacttttggcggtaacccgctggcttgtgctgccgcgctggcgaccattaacgtcctgctggaacaaaacctcccggcccaggcggaacaaaaaggcgatacgctcctggatggttttcgacaacttgcgcgtgaatatcccaatctggtacacgaggcgcgcggcaaaggtatgttgatggccattgaatttgtcgataacgaaacgggctaccgttttgccagtgagatgttccgtcaacgcgtgctggtcgctggtacgctgaataatgcgaaaacaattcgtatcgagccaccgctcacgctaaccattgaactgtgcgaacaggtattgaaatcagcgcgtaatgcgctggcggcaatgcaggtgagcgttgaagaggtttaa

SEQ ID NO: 9681 - DNA, 216 bp, Salmonella typhi
  CDS (1)...(216)
  misc_feature (1)...(216): n = A,T,C or G
atgccggtaattaaagtacgtgnaaacgagccgttcgacgtagctctgcgtcgcttcaagcgttcctgcgaaaaagcaggtgtnctggcggaagttcgtcgtcgtgagttctatgaaaaaccgacgaccgaacgtaagcgcgntnaagcttctgcagtgaaacgtcacgcgaagaaactggctcgcgaaaacgcacgccgtactcgtctgtactaa

SEQ ID NO: 9682 - DNA, 1014 bp, Salmonella typhi
  CDS (1)...(1014)
  misc_feature (1)...(1014): n = A,T,C or G
atgcgtgtactgggtattgaaacatcttgcgatgaaaccggcatcgctatttacgacgacaaaaaaggtctgttagccaaccaattgtatagtcaggtgaaattacatgctgattacggcggcgtantgcctgaactggcttcccgcgatcatgtgcgtaaaaccgtgccgctgattcaggcggcattaaaagaagccgctctgacagcgagcgatatcgacgcggtggcctataccgcangcccgggcttggtcggcgcgctgctggtcggcgcaaccgtcgggcgttcgctggcatttgccnggaatgtgccagccattcctgtacaccatatggaaggtcatctgctggcgccaatgctggaagataaccctccggatttcccgtttgtggcgctgctggtctccggcggacatacgcagctcattagcgtgaccggaatcggtcagtacgaactgctgggagagtcgattgacgatgccgccggtgaagcgtttgataaaaccgccaaattgttggggctggattatcctggcggcccgatgctgtcgaaaatggcgtcgcaggggacggcggggcgttttgtctttccgcgcccgatgaccgatcgcccggggctggattttagtttttccggtctgaaaacctttgccgctaacaccattcgtagtaatggcgacgacgaacaaactcgcgctgatatcgcgcgcgcttttgaagatgcggtcgtggatacgctgatgatcaagtgcaagcgcgcgctggaaagcaccggttttaagcgtcttgtcatggcgggcggcgtcagcgctaaccgcacgctgcgtgcgaagcttgccgaaatgatgcaaaaacgccgcggcgaagtgttctatgcgcgcccggaattttgtaccgacaacggggcgatgatcgcctatgccggaatggtgcggtttaaggcgggcgttacggcggatcttggcgtaacggtacgtccgcgctggccgctggccgagctgccggcggcgtaa

SEQ ID NO: 9683 - DNA, 1302 bp, Salmonella typhi
  CDS (1)...(1302)
atgcatataattttaacggctatttgcggtttgctcaatctatacgcaaagaagtttagatgtccagatgtattgacgtctattgtggtagtggttaatctgtggcctgactttcaccgactcagccaggaatatcttcatatgacgcgtaaacaggccactatcgcagtgcgtagcggattaaacgatgacgaacaatacggctgcgttgtgccgccaatccatctctccagtacctataactttaccggtttcaatgagccgcgcgcgcatgattattcccgccgcggtaatcccacgcgtgatgtggttcagcgcgcattagcggaactggaaggcggcgcgggcgcagtattgacgaataccggcatgtcggcgattcatctggtcaccaccgttttcctcaagccgggcgatctgctggtcgcgccgcatgattgctacggcggcagttatcgtctgtttgacagtctggcgacgcgcggctgttatcgtgtgcggtttgtcgatcagggcgatgaacgcgccttacaggcggcgctggaagaaaaaccgaagctggtactggtagaaagtccaagtaatccattgttacgcgtggtggatattgcgaaaatctgtcggctggcgcgcgaggcgggcgcagtgagcgtcgttgataacacatttttaagcccggcgctgcaaaatccgctggcgttgggtgccgatctggtgttgcattcatgcacgaaatatctcaatggtcattcggatgtcgtggccggcgtgatgattgctaaggatccggaaatggtcactgaactggcgtggtgggcgaataatattggcgtgaccggcggggcgtttgatagctatctgctgctgcgcggtttgcgaactctggtgccgcgtatggagctggcgcagcgcaacgcgcaggcgattgtgaaatatctgcaaacccagccgttggtgaaaaaactgtatcacccgtcgctgccgaataatcagggacatgagattgccgcgcgtcagcaaaaaggctttggcgcaatgttgagttttgaactggatggggatgaggagacgctacgtcgttttctgggcgggctgtcgctgtttacgctggcggaatctttagggggagtggaaagtttgatctctcacgccgccaccatgacgcatgccggtatgtcgccgcaggcgcgtgccgccgccgggatctccgaaacgctactgcgtatctccaccggtattgaagatggcgaagatttaattgccgacctggaaaatggcttccgggctgcaaacaaggggtaa

SEQ ID NO: 9684 - DNA, 879 bp, Salmonella typhi
  CDS (1)...(879)
  misc_feature (1)...(879): n = A,T,C or G
atgaacaactacaccatcaaagacattacgcgagcgtccggcgggtttgccatgctggctgtcgatcagcgcgaggcgatgcgtntaatgtttgctgctgctggtgcgaaaacacccgttgccgatagcgtgctgacggatttcaaagtgaatgcggcgaaaattctttccccgtatgcctctgccgttctgctggatcagcagttctgttatcgccaggccgtagaacaaaacgcggtcgctaaaagctgcgccatgatcgtcgcggcggatgatttcatcccaggcaacggtattcccgttgataacgtggtcattgataaaaaaattaatgcgcaggcggtaaaacgggatggcgcgaaagccttaaaactgttggtgctgtggcgcagcgatgaagacgcgcagcagcgtctggatatggttaaagaattcaatgaattatgtcactccaatggtttgctgagcattatcgaaccggttgtacgtccgccgcgctgcggcgacaagttcgatcgcgagcaggcgattatcgatgcggccaaagagctgggcgacagcggcgccgatctttacaaagttgaaatgccgctctacggcaaaggcgcgcgttccgatcttcttaccgcctcacaacgcctgaatgggcatatcaatatgccgtgggtcatcctctcttccggtgtggacgaaaaactgttccctcgcgcagtcagggtcgccatggaagctggcgcatccgggttcctggcgggacgcgcggtctggtcatcagtgattggtttaccggataccgagctgatgctacgtgatgtttccgcgcctaaattgcaacgtctgggcgagatcgtcgatgaaatgatggcaaaacgtcgttaa

SEQ ID NO: 9685 - DNA, 699 bp, Salmonella typhi
  CDS (1)...(699)
atgaataaaatcctgttagttgatgatgaccgagagctgacttccctgttaaaagagctcctcgaaatggaaggttttaatgtcctggtggcccacgacggcgagcaggcgcttgagcttttggatgacagcatcgatttacttttgcttgacgtcatgatgccgaagaaaaacggtatcgatacgttgaaagcgcttcgccagacacaccagacgcctgtcattatgctgaccgcgcgcggcaacgagctggatcgcgttctcggccttgagctgggcgcggacgactatttgcccaaaccgtttaacgaccgcgagctggtagcgcgcatcagggctattttgcgccgttcccactggagcgagcagcagcagagcagcgacaacggctcgccgacgctggaagttgatgcgctaagccttaatccgggtcgccaggaagccagtttcgatggccaaacgctggagctgaccggtacggaattcaccctgctctatttactggcgcaacacctcggccaggtggtttcccgtgaacatttaagtcaggaagtgctgggtaagcgcctgacgccgttcgatcgcgccattgatatgcatatttctaacctgcgccgcaaactgccggaacgcaaagacggtcacccgtggtttaaaacattgcgtggtcgcggctatctgatggtttccgcttcatga

SEQ ID NO: 9686 - DNA, 369 bp, Salmonella typhi
  CDS (1)...(369)
atgtttgacggcataagtttaaccgaacatcagcgtcagcagatgcgagatcttatgcagcaggcaaggcacgaacagcctcctgttaatgttagcgaaatggagacaatgcatcggcttgtcaccgcagaaaaatttgatgaaagcgttgtgcgcgctcaggcagaaaaaatggcgcaagagcaggttgcccgccaggtcgaaatggcccgcgtgcgtaaccagatgtatcgcctgttaacgccggagcagcaagcggttttgaatgaaaagcatcagcaacgaatggagcaactgcgcgacgtggcgcaatggcaaaaaagttcatcgttgaaattattgagtagtagcaactcacgttcccagtaa

SEQ ID NO: 9687 - DNA, 963 bp, Salmonella typhi
  CDS (1)...(963)
atgattaagaaaatcggtgtgttgacaagcggcggtgatgcgccgggcatgaacgcggcaatccgcggtgttgtgcgcgcagcgttgacggaagggctggaagtcatgggcatttatgacggctatctgggcctgtatgaagatcgtatggttcagcttgaccgttacagcgtatctgacatgatcaaccgtggcggtactttcctcggttccgcccgtttcccggaattccgtgacgaaaatattcgcgctgtcgcgatcgaaaacctgaaaaaacgcggtatcgatgcgctggtagttattggcggcgacggttcttatatgggtgcaaaacgtctgactgaaatgggcttcccgtgcatcggtctgccaggcactatcgataacgacatcaaaggcaccgactacactatcggctacttcactgctctcggcactgtagtggaagcgattgaccgtctgcgtgacacctcctcttctcaccagcgtatctctatcgttgaggtgatgggccgttattgcggcgacctgacgttggcggcggctattgctggcggctgtgagtttatcgtggtgccggaagttgaatttaatcgcgaagatctggtggccgaaatcaaagccgggatcgcgaaagggaaaaaacacgctatcgtcgctattactgagcatatgtgcgatgttgacgaactggcgcactttattgaaaaagaaacgggccgtgaaacgcgtgcgacggtgctcggccacattcagcgcggtggttccccggtaccttacgatcgcattctggcttcccgtatgggcgcgtatgctattgacctgctgctggaaggccatggcggtcgttgtgtcggtatccagaacgagcagcttgttcatcatgacatcatcgatgcgattgaaaacatgaagcgtccgttcaaaagcgactggatggagtgcgcgaaaaaactgtactga

SEQ ID NO: 9688 - DNA, 990 bp, Salmonella typhi
  CDS (1)...(990)
atgaaaaagtggggcgtggggttcacattattgctggcgtcaaccagcattctggcaaaggatattcagttacttaacgtatcgtacgatccaacgcgtgagctgtacgagcagtacaacaaagcgtttagcgcgcactggaagcaggaaaccggcgacaacgtcgtgatccgccagtcgcacggcggttcaggtaaacaggcgacttccgtcattaacggcattgaagccgatgtcgtgacgctggcgctggcttacgatgtggacgctattgctgaacgtggtcgtatcgataaaaactggatcaagcgtctgccggataactcagcaccttacacctccaccattgttttcctggtccgcaaaggcaatccaaaacaaattcatgactggaacgatctgattaaacccggtgtgtcggtgattacgccaaacccgaaaagctccggcggcgcacgctggaactatctggcggcatggggctacgccctgcaccacaacaataacgatcaggccaaagcccaggactttgtcaaagccctgtttaaaaacgttgaagtgctggactccggtgcgcgtggctcaaccaatactttcgttgaacgcggtatcggtgatgtgctgatcgcctgggaaaacgaagcgctgctggcgacgaacgaactgggtaaagataaattcgagatagtgaccccgagtgaatctatcctcgcagagccgaccgtgtccgtggtggataaagtcgttgagaagaaagggacgaatgcggtggcggaggcgtatctcaagtatctctattcgccggaagggcaggagatagcagcgaaaaacttctaccgtccgcgcgatgctgacgtggcgaaaaaatacgacgatgcgtttccgaagctgaagctattcaccattgacgaggtgtttggcggctgggtgaaggcgcaaaaagatcactttgctaatggcggtacgttcgaccaaatcagcaaacgctaa

SEQ ID NO: 9689 - DNA, 768 bp, Salmonella typhi
  CDS (1)...(768)
atgcgacatcctttagtgatgggtaactggaaactgaacggcagccgccacatggtaaacgaactggtggctaacctgcgtaaagaactgacgggcgtagcaggctgcgacgtggcaatcgctccgccggaaatgtatatcgatctggcgaaacgcgctgctgccggcagccacatcatgctgggcgcgcagaacgttgatctgaatctgtctggcgcattcaccggtgaaacttcggctgaaatgctgaaggatatcggcgcgcagtacattattatcggccactccgagcgtcgtacttatcacaaagaatctgacgagctgatcgccaaaaaattcgccgtactgaaagaacaaggtctgacgccggtactgtgcatcggtgaaaccgaagcggaaaacgaagcgggcaaaacagaagaagtgtgcgcacgccagatcgacacggtactgaaaacgcagggcgcggcagcctttgaaggcgcggttatcgcttacgaacccgtatgggcgatcggtaccggtaaatctgcaactcctgcgcaggctcaggcagttcacaaattcatccgtgaccacattgctaaagctgacgcgaaaatcgctgaacaggttattatccagtacggcggttctgttaatgcgtccaacgcagccgaactgttcgcgcagccggacatcgacggcgcactggtaggcggcgcttctctgaaagctgacgccttcgccgtgatcgtgaaagcagcagaagctgctaaacaggcttaa

SEQ ID NO: 9690 - DNA, 1506 bp, Salmonella typhi
  CDS (1)...(1506)
  misc_feature (1)...(1506): n = A,T,C or G
atgactgaaaaatatatcgttgcgctcgaccagggtaccaccagctcccgcgcggtcgttatggatcatgacgcgaatatcgtcagcgtatcacagcgtgaatttgagcaaatttatcctaagccaggctgggtagaacacgacccgatggaaatttgggcgtctcaaagctcaacgctggtagaagtgctggctaaggccgatatcagttccgatcagattgccgctatcggtatcaccaaccaacgtgaaaccgcgatcgtctgggaacgtgaaaccggcaaaccgatatacaacgctattgtctggcagtgccgtcgtaccgccaatatttgcgaacagcttaaacgcgacgnnctggaagattacatccgcgacaataccggtctggtcgtcgacccgtacttctctggcactaaagtgaaatggatccttgaccatgtggaaggttcgcgcgaacgcgcgaagcgtggcgagctgctgttcggtacggtggatacctggcttatctggaagatgacgcagggccgcgtccacgttacggantacaccaacgcctcacgaaccatgctgttcaacatccatgatttggactgggacgataaaatgctggacgtgctggatatcccacgcgcgatgctgccccaggtacgtaaatcctccgaagtctacggccagaccaatattggcggtaaaggcggtacacgtattcctatcgccgggattgccggggatcagcaggccgcgctcttcggccaactgtgcgtaaaggaaggaatggcaaagaacacctacggcaccggctgctttatgctgatgaacaccggcgagaaagcggtaaaatcggaaaacggcctgctgaccaccatcgcctgcggcccaagcggcgaagtcaactatgcgctggaaggtgcggtgtttatggcgggagcgtccattcaatggctgcgtgatgaaatgaagctcatcagcgacgcattcgactccgaatatttcgccacgaaagtgaaagataccaacggtgtctacgtggttccggccttcaccggtctgggcgcgccgtactgggatccgtatgcccgcggcgccatttttggcctgacccgcggcgtgaactctaatcacattatccgcgcgacgctcgaatccatcgcttaccagacccgcgacgtactggaagcgatgcaggccgactccggtatccgcctgcacgctctgcgtgtggacggcggcgcagtggccaacaacttcctgatgcagttccagtcagatattctcggcacgcgggtggaacgcccggaagtgcgcgaagtgaccgcgctgggcgccgcctatctggctggcctggccgtcggttactggcagaacctggacgagctgcaggaaaaagccgtcattgagcgagaattccgccccggcattgaaaccaccgagcgtaactaccgttacagcggctggaagaaagcggttaaacgcgcaatggcgtgggaagagcacgacaagtaa

SEQ ID NO: 9691 - DNA, 1410 bp, Salmonella typhi
  CDS (1)...(1410)
atgtccgctgaacacgttttgacgatgctgaacgaacacgaagtgaagtttgtcgatctgcgcttcaccgataccaaaggcaaagaacagcacgtcacgattcctgctcatcaggtaaatgccgaattctttgaagaaggcaaaatgtttgacggctcctctatcggcggctggaaaggcattaacgaatccgacatggtgctgatgcccgatgcgtccactgcggttatcgacccgttcttcgcggactctaccctgattatccgttgcgacatcctggagcctggcactctgcaaggttatgaccgtgacccacgttccatcgcaaaacgtgcggaagactacctgcgcgcgaccggtatcgccgataccgtcctgtttgggccggaacctgaattcttcctgttcgacgacatccgcttcggcgcatctatctccggctcacatgtggcgattgacgatattgaaggcgcctggaactcctctaccaaatacgaaggcggcaacaaaggccatcgcccgggcgtgaaaggcggttatttcccggttccgccagttgactccgcgcaggatatccgttctgaaatgtgtctggtcatggagcagatgggcctggttgttgaagcgcaccaccacgaagtagcgaccgcaggtcagaacgaagtggcgacccgctttaacaccatgaccaaaaaagccgacgaaattcagatttacaaatatgtcgtgcataacgtggctcaccgcttcggtaagaccgcgacctttatgccaaaaccgatgttcggcgataacggttccggtatgcactgccacatgtcgctggcgaagaacggcaccaacctgttctctggcgacaaatatgccggtctgtctgagcaggcgctgtactacatcggcggcgtcatcaaacacgccaaagccatcaacgccctggcgaacccgaccaccaactcctacaagcgtctggtcccgggttacgaagcgccggtgatgctggcctactccgcccgtaaccgttccgcctccatccgtattccggtggtggcgtctccgaaagcgcgccgtatcgaagttcgcttcccggacccggcggctaacccgtatctgtgctttgccgccctgctgatggccggtctggacgggattaagaataagattcacccgggcgaagccatggacaaaaacctgtatgacctgccgccggaagaagcgaaagagatcccacaggtagcaggttctctggaagaagcgctgaacgcgctggacctggaccgcgagttcctgaaagcaggcggcgtgttcacggatgaagcgatcgatgcgtatattgcgctgcgtcgcgaagaagatgaccgcgtgcgtatgaccccgcacccggtagagtttgagctgtactacagcgtttaa

SEQ ID NO: 9692 - DNA, 531 bp, Salmonella typhi
  CDS (1)...(531)
gtgacaacaatagtaagcgtacgccgtaacggccacgtggtaatcgccggtgatggtcaggccacactgggtaacacagtaatgaaaggcaacgtgaagaaagtccgccgcctctacaacgacaaggtcattgcgggctttgcgggcggtactgctgatgcattcacgctgttcgagctgtttgaacgtaaactggaaatgcatcaggggcacctggtcaaagccgccgttgaactggcgaaagactggcgtaccgaccgtatgctacgcaaactggaagcgttgctggccgtcgcggatgaaaccgcttcgctcatcatcacgggtaacggcgatgtcgtgcaacctgaaaacgatttaattgctatcggctccggcggtccttatgcccaggctgccgctcgcgctctgttggaaaataccgagctcggcgcgcgcgaaattgctgaaaaggcgttggatattgcaggcgatatctgcatttacaccaaccatttccacaccattgaagaattgaccgccaaagcgtaa

SEQ ID NO: 9693 - DNA, 1824 bp, Salmonella typhi
  CDS (1)...(1824)
  misc_feature (1)...(1824): n = A,T,C or G
gtgatcgaaaatttgcgtaacatcgccatcatcgcgcacgttgaccatggtaaaactaccctggttgataagctgctccagcaatccggtacgttcgacgcgcgtgccgaaactcaagagcgagtgatggactccaacgatttggagaaagagcgtggtattactatcctcgctaaaaacaccgctattaaatggaatgattatcgtatcaacatcgttgatactcccgggcacgctgacttcggtggtgaagtagagcgcgtcatgtccatggttgactctgtgctgctggtggttgacgcatttgacggcccgatgccgcaaacgcgcttcgtgaccaaaaaagcctttgctcatggcctgaaacccattgtggttatcaacaaggttgaccgtcctggcgcgcgccctgactgggttgtcgaccaggtattcgacctgtntgttaacctcgacgcgaccgacgaacagctggacttcccgatcatctacgcttcggcgctgaacggtatcgcgggtctggaccacgaagatatggcggaagacatgaccccgctgtatcaggcgatcgttgatcatgttccggcgccggacgttgacntcgatggtccgttgcagatgcagatctcccagctggactacaacaactacgttggcgttatcggcattggccgtatcaaacgcggcaaagtgaagccgaaccagcaggtcactatcatcgatagtgaagggaaaacccgtaacgcgaaagtaggtaaggtgctgacgcatctgggtctggagcgtatcgacagcgatatcgccgaagcgggcgatatcattgcgatcaccggtctgggcgagctgaacatttccgacaccatctgcgacccgcagaacgttgaagcgctgccggcgctgtccgttgatgagccgaccgtgtctatgttcttctgcgttaacacctcgccgttctgcggtaaagaaggtaagtttgtgacttctcgtcagattcttgaccgtctgaacaaagagctggtgcataacgtggcgctgcgcgttgaagaaaccgaagatgcggatgcgttccgtgtatccggtcgtggcgaactgcacctgtccgtgctgattgaaaacatgcgtcgtgaaggtttcgaactggcggtttcccgtccgaaagttatcttccgtgaaatcgacggtcgtaaacaagagccgtacgaaaacgtgacgctggacgtcgaagagcagcaccaggggtctgtcatgcaggcgctgggcgagcgtaaaggcgatctgaaaaacatgaatccggacggtaaaggccgcgtacgtctcgactacgtgatcccaagccgcgggctgattggtttccgttcagaattcatgaccatgacttccggtacgggtctgctgtactccaccttcagccattacgacgatattcgtccgggtgaagtgggccagcgtcagaacggcgtactgatctccaacggtcagggtaaagcggtggcgtttgcgctgttcggtttgcaggatcgcggtaagctgttcctgggtcacggcgcggaagtttacgaaggccagattattggtattcacagtcgctccaacgacctgacggtaaactgcctgaccggtaagaaactgaccaacatgcgtgcgtccggtacggatgaagcggtgattctggttccgccaattaaaatgagtcttgagcaagcgctggagttcattgatgacgacgaactggtagaagtcactccaacctctatccgtatccgtaaacgtcacctgacggaaaacgatcgccgccgtgcgaaccgtggtcagaaagaagagtaa

SEQ ID NO: 9694 - DNA, 1260 bp, Salmonella typhi
  CDS (1)...(1260)
atgcggatgttaaagcgtgaaatgaacattgccgattatgatgccgaattgtggcaggctatggagcaggaaaaagtacgtcaggaagagcacatcgaactgatcgcctccgaaaactacaccagcccgcgcgtgatgcaggcgcaggggtctcagctgaccaacaaatacgctgaaggatatccgggcaagcgctactacggcggttgcgaatacgttgatgtcgtagagcagctggctatcgaccgcgcgaaagaactgttcggcgccgactacgctaacgtgcagccgcactccggttctcaggctaacttcgctgtttacaccgcgctgctgcagccgggcgataccgttctgggtatgaacctggcgcagggcggccacctgactcacggctccccggttaacttctccggtaaactgtacaacatcgtaccttacggtatcgatgagtccggtaaaattgactatgacgagatggcgaagctggccaaagagcacaagccgaagatgattatcggtggcttctctgcctactccggtgtggttgactgggcaaaaatgcgtgaaatcgctgacagcatcggcgcatacctgtttgtcgacatggcgcacgtggcgggcctgattgccgcaggcgtttacccgaacccggttccgcacgctcacgttgtcaccaccaccacccacaaaaccctggcgggtccgcgcggcggcctgatcctggcgaaaggcggcgacgaagagctgtacaaaaaactgaactccgccgtcttcccaagcgcgcagggcggcccgctgatgcacgtgatcgcgggtaaagcggtagcgctgaaagaagcgatggagccggagttcaaagtttaccagcagcaggtggcgaaaaacgccaaagcgatggtggaagtgttcctgaaccgcggctacaaagtggtgtctggcggcactgagaaccacctgttcctgctggacctggtggataaaaacctgaccggtaaagaagctgacgccgcgctgggccgtgctaacatcaccgtgaacaaaaacagcgtgccgaacgatccgaagagcccgttcgtgacctccggtatccgtattggttctccggcggttactcgtcgcggcttcaaagaagcggaagtgaaagagctggctggctggatgtgtgacgtgctggacaacatcaatgatgaagccaccattgaacgcgtgaaagcgaaagtgctggatatctgcgcccgcttcccggtttacgcgtaa

SEQ ID NO: 9695 - DNA, 1191 bp, Salmonella typhi
  CDS (1)...(1191)
  misc_feature (1)...(1191): n = A,T,C or G
gtgaagctgaaagtgacggtgcgccagaatatcagccagttgtttgacgatctggataacggcaatgccgacctgctcgcggcagggctggtctacgacagcgcgcgcgttaaaaactatcagcccggccccatgtattattcggtttcgcaacagctcgtttaccgggtcggacaatatcgcccacgttcgctggcgaccgttaacgagaatcagcttaccattgcgccagggcacgtcgtggtcaatgatttacagcgtttaaaagagacaaagtttcccgacctgagctggaaggtggatgataaaaaaggctcgacgacgctgctggaagaggtcatcagcggcaaactggattacaccattgccgattcagtggcgatcagtctgtttcagcgcgtccatcccgaactggccgtggcgctggatgtcacggatgaacagcccgtgacctggtttagccgactggacgacgataatacgctctccgccgcgctgctcgattttttcaattcgatcaatgaagacgggtcgttggcgcggatcgaagagaaatatctggggcatggcgatgatttcgactacgttgatacccgctctttcctgcgagcggtggataacgtcctgccggagctggaaccgttatttaaaaaatatgccaaagagatagactggcgcctgctggcggcgatttcttatcangaatcacactgggacccgctggcgacctcgccaaccggcgtgcgcggcctgatgatgctgactaaaaataccgcccaaagtctggggctgaccgaccgtaccgatgcggagcaaagcatcagcggcggtgctcgctatcttgaagatatgatggctaaagttcccgaaaccgttccggaagacgagcgtatctggtttgccttagccgcctacaatatgggttatgcgcacatgctcgatgccagatcgctgacggtaaaaaccaaaggcaatccggatagctggaccgatgtgaagcagcgtttgcctctgttaagccaaaaaccgtattacagtaagctaacctacggttacgcgcgtggacatgaggcttatgcttatgtggaaaatatccgtaaataccagataagtttggtggggtatttgcaggaaaaagaaaagcaggaagcggaagctatgaaactggcgcaggattacccggcggtgtag

SEQ ID NO: 9696 - DNA, 1368 bp, Salmonella typhi
  CDS (1)...(1368)
  misc_feature (1)...(1368): n = A,T,C or G
gtgtgtatggataagacggcagcgctcgccagcgacattttacgtggtatcggcggagagcaaaatattctgcgcctggaaaactgtatgacgcgagtcagagtggaggtacaggacgacagccaactggatattccgcgcttaaaagcgttgcctggcgtcagtggatacgtaaagcaaggggagcaacatcagctgatcgttgggccggggaaggctgcacaggtggttgatgcgatgcgcgtgcagattgccgcaggtggtgtaaagccggacgatgctatggcgcgtaccaaatccgaggcgaaagcgaagtataaagcgccgatgagcgatgcgttgcgtaagctggcgaatgtttttattccgcttattcccgcctttatcgcatccggcttgattaccggcattatcaatattcttaaacgcccggatatcgtcggcgatgttgccgtccactatcctaacctgctgggcctgatggggatatttggtagcgcggtgttctctatcatgaacattctggttggcgtcaataccgcgaaagtctttggcggatcgcaggcgttaggcggcgtgatggcggggatcctttccagcccgcaactggcgcagattacgctctttggcgaggcgcttcagccgggacggggcggcgttatcgccgtcctgctggtggtggcgttaatgtgctggattgagcgccagttccgtaagctgctgccggggtcgctggagttaattcttaaccctttattgacgactgttatcaccggcgcggtagcgattgtcgctctgcaaccgcttggcggctggatttcagacgctatcgctcacggcgcgtcctgggctatcgatcgcggcggttttctggtgggcgcggtgttagccggaaccttcctgccgttggtactgatcgggctgcatcaggggctggtgcntattcatgtggagctggtgcaagcgcacngctataacgcgctgtttcccatcctggcgatggcgggggttggtcagataggcgcggccattgccgtactgatgaaaacccgcaatgcgcggctcaaaaaggtgattaaaggcgcgcttccggtcggactgctggggattggcgagccgctgatttttggcgtcacgctgccattgggtaagccatttattggcgcttgcctcggcggcgcggtaggcggggcgttgatcagctactggaaagtggcgacggtaattacctttggtatttccggtttgccgctggcattaacaattgttgccggaaaagtcctgttctatctgttaggctatttaatagcggtaattgccgggtttatttttacctggctgctggggttcaatgatccagaggagtaa

SEQ ID NO: 9697 - DNA, 894 bp, Salmonella typhi
  CDS (1)...(894)
atgaatcttggtaccttagtgtctgaaacccgtaacccgcaaacgatggatctggatgcgttgtctactcctgaattagttaagcgttttaatgaacaggatacgctggtagcggaagcagtaaaagccactctgcctgacgttgcgcgtgcggtggatgctgctgcggcggcgctgaagtctggcggacgtatcatctatatgggggcgggcaccagtggtcggcttggcgtactggatgcctcagaatgccccccgacgtttggcgttccgcacggtctggtcgtcgggctgattgccggcgggccgggcgcgttgctgaaggcggtcgaaggcgcggaagacagccaacaggcaggcgaagacgatcttgtcgcgctaaatctgcaagaacaggatctggtcgtggggctcgcggcgtcgggtcgtacaccctatgtgattggtggcctgcgctatgcgcgacagtccggttgtaccactgttgccgtctcctgtaatccagattcgcctattgcgcgggaggctaatatcgctatttcgcccgttgtcgggccggaagcgcttaccggctccacgcggctgaaatccggcaccgcgcagaaaatggtgctcaatatgatttctaccggcgcgatggtgaagttcggtaaggtctatcagaacctgatggtggatatgaaagccaccaacgtcaaactggtcgatcgcgcgtgtcggatggtcgttgaagcgaccgggataggtcgtgaagaggcggaaacgttgctgaaacagaccgattttgaggttaagcccgccattttgatggcgcttacggggctggatgctgcagccgccagggaaaaactcgccgctcatcagggctttttaagggcggcgttagaacactaa

SEQ ID NO: 9698 - DNA, 381 bp, Salmonella typhi
  CDS (1)...(381)
atggcgattctcggcctgggaacggatattgtagagattgcccgcattgaggcagtgatctcccgttccggcgaacgtctggcaaggcgtgtgctcagtgacaacgagtgggctatctgggagacgcatcagcagccggtgcgttttctcgccaagcgttttgcggtcaaagaggcggcagcgaaagcttttggcaccggcatccgcaacggtctggcgtttaatcagttcgaagtgtttaacgatgagctgggaaaaccacgtttgcggctgtggggcgaggcgttaacgctggcggaaaaactcggtgtggcgcacatgcatgtcacgttggccgatgaacgccattacgcctgcgctacggtcattctggaaagttag

SEQ ID NO: 9699 - DNA, 906 bp, Salmonella typhi
  CDS (1)...(906)
  misc_feature (1)...(906): n = A,T,C or G
atgagcaccgacaaaacttactgcggatttattgccatcgtcggacgtccgaacgttggcaaatccaccttgctgaacaaactgctcgggcagaagatttcgatcacttcccgtaaagcgcagaccacgcgccaccgcattgtcggtattcataccgaaggcccgtatcaggcaatctatgtcgatacnccgggactgcatatggaagaaaagcgcgccattaaccgtttgatgaataaggcggcgagcagttcgattggcgacgttgagctggtgattttcgttgtagaaggcacccgttggacgccggacgacgaaatggtcctgaacaaactgcgcgatggcaaagcgccggttattctcgccgttaacaaggtggataacgtgcaggaaaaagccgatttgctgccgcacctccagttcctggcaagccagatgaactttcttgatatcgtccccatctctgctgaaacgggtatgaacgtcgataccattgccagtatcgtgcgtaaacatttaccggaagcgattcaccacttcccggaagattatatcaccgatcgctctcagcgctttatggcgtctgaaatcattcgtgaaaagctgatgcgttttctcggcgccgagctgccgtattccgttaccgttgagattgaacgttttgttaccaacgaacgcggcggctatgatatcaacgggctgatcctcgtcgagcgcgaagggcagaagaagatggtgattggcaacaaaggcgccaaaatcaaaaccattggtattgaagcgcgtaaagacatgcaggagatgtttgaagcgccggtacacctggaactgtgggtgaaagtgaaatccggctgggccgatgacgaacgcgctctgcgcagtctcggttacgtagacgatctgtga

SEQ ID NO: 9700 - DNA, 1260 bp, Salmonella typhi
  CDS (1)...(1260)
gtgcgaccactgaggaaactttacaattctcgcccgaatttgagagaggaaggcgacgtggaaaggtttgatgctgttattataggcgctggcgcagcgggcatgttttgcgccgcacaggcaggacaagcgggtagccgcgtgctgctcatcgataatggcaagaagccaggacgtaaaatcctcatgtccggcggtgggcgctgcaactttactaatctttatgttgagcctgctgcgtatttgagccagaacccccatttttgcaaatcagcattagcccgctatacccagtgggactttatcgatctggtcggcaggtatgggatagcctggcatgagaaaacgctgggacagcttttttgcgatgattccgcccaacgcattgtcgatatgctggttgccgagtgcgacaaaggtggcgtaacgatgcgcctgcgtagcgaggtattgagcgtcgagcgtgatgagtcgggtttcgtactggcgttgaacggcgagacggtgactacgcaaaagctggtgattgccagcggcggcctgtcgatgccggggcttggcgcatcgccgtttggctataaaatcgccgaacagtttggtctcaaggtgttgccgacgcgcgccgggctggtgccctttacgctacataagccgctgttagaacagctccagacgctgtctggcgtctctgtgccctgcgtgattaccgcccgcaatggcacggtatttcgggaaaacctactttttacccatcgtgggctgtccggccccgccgttttacagatttccagctactggcaaccgggcgagttagtgagcattaacttattgccggatctctcgctggaagacgttctcaatgaacagcgtaacgcgcacccgaaccagagtctgaagaacacgctggcgatgcatctgccgaaacggctggtggagtgtttacaacagttggggctcatcccggatgtatcgctcaggcagttgaacgttcgtgaccagcagacgttggttgacacgctgacggcctggcaagtacagcctaacggtaccgaaggctatcggacagcggaagtgacgctgggcggcgtggatacaaacgaactatcatcgcggactatggaggcgcgccgcgtgccgggtctctattttatcggcgaagtgatggacgtcaccggctggttgggcggctataacttccagtgggcctggtcgagcgcctgggcctgcgcgcaggatttgattgcgttaaaaattaactaa

SEQ ID NO: 9701 - DNA, 720 bp, Salmonella typhi
  CDS (1)...(720)
atgatcgagcaacccgacagtaaaagcgccaaaccgctttataagcagcttgaagacgccttaaaagaggctattgcgcgtggagagtataaaccaggccagcagatcccgacggaaaatgaactgagcgtgcgctggcaggtgagcagggtcacggtccgtaaggcgctggatgcgctgacgcgtgaaaatttgctgacccgtgtctccggcaaaggcacctttgtttctggtgagaaatttcagcgtagcatgaccggcatcatgagtttcagcgagttatgccagtcccagggacgtcgcccggggtcacgcaccatcaaatccgtttttgaatcggtagacgatgagacaaaagcgttactgaatatgaacgatggcgaaaaagcggtcgtcattgaacgtatccgctatgccgacgatgtggcggtatcgctggaaaccgtacatcttcccccacgttttgcgtttttgctggacgaagatcttaataatcactctttgtatgaatgcttacgcgagaaataccatttatggtttacccactcccgtaagatgatcgaactggtttatgccagctttgaagtcgcccattatcttggcgttaacgagggttatccgctgatcctgataaaaagtgaaatgattgataacaaaggagaactctcctgcgtttcgcaacagttgattgtcggcgataaaatacggtttaccgtatga

SEQ ID NO: 9702 - DNA, 1014 bp, Salmonella typhi
  CDS (1)...(1014)
atgagtacgcatgaggccaccttgcaacagccgctgttgcgggctatcgacctgaaaaaacactatccggtgaagaaggggatcttttctccggaacggctggtaaaagcgctggacggcgtgtcgtttaatctcgaacgcggtaaaacgctggcggtagtgggggagtccggttgtggaaaatccacactgggtcgcctgctgacgatggttgaaacgccaaccggcggcgagctttattaccaggggcaggatctgctcaaacacgatccgcacgcgcagaaactgcggcggcagaaaattcagattgtgtttcagaacccctacggttccctgaacccacgcaagaaagtggggcaaattctggaagaaccgttgctgattaacacctcgctcagcaaagagcagcgccgtgaaaaagcgctggcgatgatggcgaaggtggggctgaaaaccgagcactacgaccgctatccgcatatgttctccggcggccagcgtcagcgtatcgctatcgcccgcggtctgatgcttgatccggacgtagtgattgccgacgaaccggtctccgcgctcgacgtgtcggtgcgcgctcaggtgctgaacctgatgatggatttgcaacaggatatggggctgtcttatgtctttatctcgcacgacctgtcggtggtggagcacattgccgatgaagtaatggtcatgtacttaggccgctgcgtggagaaagggaccaaagagcagatttttaacaatccacgtcatccctatacccaagcgttgctctccgccacgccgcggctgaatccggacgatcgccgtgagcggattaagctgaccggcgagttgccgagtccgctgaacccgccgccgggctgcgccttcaacgcccgctgccgccgtcgcttcggaccctgtacgcagttacagccgcagcttaaagagtacgacggccagttggtggcctgctttgccgtcgatcaggatgaaaacccgcagaagccgctgagttaa

SEQ ID NO: 9703 - DNA, 1608 bp, Salmonella typhi
  CDS (1)...(1608)
  misc_feature (1)...(1608): n = A,T,C or G
atgagtatttccttgaagaagtcagggatgctgaagcttggtttgagcctggtggccatgaccgttgcagcaagcgtgcaggccaaaaccctggtttattgttcagaaggctcgccggaaggctttaacccacagctctttacgtctggcaccacctatgatgccagctccgtacctatctataaccgtctggttgaattcaaaaccggcaccacggaagtgatcccgggtcttgctgagaagtgggatatcagcgaagacggtaaaacctatacgttccacctacgtaaaggggtgaaatggcaatccagcaaggatttcaaacccacgcgcgagctgaacgccgatgatgtcgtgttctcttttgaccggcagaaaaacgagcagaacccgtaccataaagtgtctggcggcagctatgaatactttgaaggcatggggctgccggatctgattagcgaagtgaagaaggtagacgatcacacggtgcagtttgtgctgacgcgtccggaagcgccgttccttgccgatttagccatggacttcgcctctattctttccaaagaatatgctgacaacatgctgaaagccggtacgccggaaaaagtggatctgaatccggtcggcactggcccattccaactggtgcaatatcagaaagattcccgcattctctacaaagcctttgacggctactggggcacgaagccgaaaattgaccgcctggttttctccattacgcctgacgcctctgtgcgttacgccaaactgcagaagaacgaatgtcaggtgatgccgtatccgaacccggcggatattgcgcgcatgaaagaagataaaaacatcaacctgatggagcaggccggtctgaacgtgggttatctctcctataacgtgcagaaaaaaccgctggatgacgtcaaagttcgccaggcgttgacctatgccgtgaanaaagaggccatcatcaaagccgtttatcagggcgcaggcgttgcggcgaaaaacctgatcccgccgacgatgtggggctacaacgncgatattaaagactacggctacgatccggaaaaagcgaaggcgctgctgaaagaagccggtctggaaaaaggcttcaccatcgatctatgggcgatgccggtacagcgtccctataacccgaatgcgcgtcgtatggcggaaatgatccaggcggactgggcgaagattggcgttcaggccaaaattgtcacctatgaatggggcgaatacctcaagcgcgctaaagatggcgagcaccagacggtgatgatgggctggaccggcgataatggcgatccggataacttcttcgccacgctgttcagctgcgatgccgcccagcaaggctccaactattcaaaatggtgctacaagccgtttgaagacctgattcagcctgcgcgtgcgaccgatgaccacaacaagcgtattgaactctataaacaggcccaggttgtgatgcatgaccaggcgccagcgctgatcatcgctcactccacggtttatgagccagtacgtaaagaagttaaaggctatgtggttgacccattaggcaaacatcacttcgaaaacgtctctgtcgaataa

SEQ ID NO: 9704 - DNA, 1218 bp, Salmonella typhi
  CDS (1)...(1218)
  misc_feature (1)...(1218): n = A,T,C or G
atggcaactgaacaaacggctattacgcgcgcaacttttgatgaggtaattctgcctgtttatgcaccggcggactttattccggtcaaaggtaaaggcagccgcgtatgggatcagcagggcaaagagtatatcgatttcgccggcgggattgcagtgactgcgctgggccattgccatccggcactggtcgaggcgctgaaatcccagggggaaaccttgtggcataccagtaacgtttttaccaatgaaccggcgttgtgtctgggacgtaaactgatcgacgccacgtttgccgagcgcgtgctgtttatgaattccggcaccgaagcgaacganaccgcttttaaactggcgcgtcattatgcctgcgtgcgccatagcccgttcaaaacgaaaatcattgccttccagaacgcctttcatggccgttccttgtttaccgtctctgtaggcgggcagccgaaatattccgacggctttgggccgaaacccgccgatattattcacgttcccttcaacgatcttcatgcggtgaaagcggtaatggatgaccacacctgcgcggtggtagtcgagccgattcagggtgaaggcggcgtgcaggcggctacaccggaattcctcaaagggttacgcgacctgtgtgacaagcatcaggcgttgctggtgtttgatgaagtgcagtgtgggatggggcgcaccggagacctgtttgcctatatgcactacggcgtcacgccggatatcctcaccagcgccaaagcgttaggcggcggttttccggtgagcgccatgctgaccacgcaggagatcgcctcggccttccatgtcggttcgcatggttcaacctatggcggcaatccgctggcctgtgcggtggctggcgcggcattcgatattattaatacgccagaggtactacaaggcattcacactaagcggcaacagtttgtgcaacatttgcaggcgattgacgagcaatttgacattttcagcgatattcgcggcatggggctgctgattggcgcggaactgaagccgaagtacaaaggtcgggcgcgcgattttctgtacgcaggcgcggaggccggcgtgatggtgctcaatgccggagccgacgtgatgcgttttgccccgtcgctggtggtggaagaggcggatatcaatgaaggaatgcagcgctttgcgcaggcggtagggaaggtggtggcctga

SEQ ID NO: 9705 - DNA, 2544 bp, Salmonella typhi
  CDS (1)...(2544)
  misc_feature (1)...(2544): n = A,T,C or G
atgagcaaagtcagactcgctattatcggtaatggtatggtcggccaccgctttattgaggatctccttgataaatccgacgctagcctgttcgacattaccgtgttctgtgaagaaccccgtaaagcctatgaccgtgtccacctgtcatcctacttctctcaccacaccgcggaagagctctctctggtgcgtgaaggattttacgagaagcacggcgtaaaggtactggttggcgaacgcgcaattaccattaaccgtcaggagaaagtgattcactccagcgcgggtcgtaccgtttattatgacaagctgatcatggcgaccggttcctatccgtggattccgccgattaaaggctccgaaacccaggattgcttcgtttaccgtaccattgaagacctcaacgctatcgaagcctgcgcccgccgcagcaagcgcggggcggtggtcggcggcggtctgctggggctggaagccgctggcgcgctgaaaaacctcggcgtggaaacgcacgtcattgaatttgcgccaatgctgatggcggaacaactcgatcaaatgggcggcgagcagctacgtcgcaagatcgaaagcatgggcgtgcgtgtacacaccagtaaaaacacgcaagagattgttcagcagggtaacgaagcgcgtaagactatgcgttttgccgatggcagcgagttggaagtcgattttatcgtcttctctaccggtattcgcccccgcgacaagctggctacccagtgcggtctgnccgtcgcgcagcgcggcgggatcgtgattaacgacacctgccagacgtccgacccggatatctacgctatcggcgagtgcgccagttggaacaaccgcgtttacggtctggtcgcaccgggctataaaatggcccaggtcgccgttgaccatatcctcggcagtgaaaacgcctttgaaggcgcggatctcagcgccaaactgaagctgctgggcgtggacgtcggcgggattggcgatgcgcatggccgcacgccgggcgcgcgtagctacgtttacctcgatgaaagcaaagaagtctacaaacgtcttattgtcagcgaagataacaaaacgctgctcggcgcagtactggtcggcgacaccagcgattacggcaatttgctgcaactggtactgaacgccatcgaactgccggaaaacccggattcgctgatcctgccgtcgcacgcgagcagtggtaaacccgctatcggcgtggataaactgccggacagcgcgcagatctgctcctgcttcgatgtgactaaaggcgatctgatcgctgctatcaataaaggctgccataccgtggcagcgctgaaagcggaaaccaaagccggaaccggctgcggcggctgcatcccgctggtgacgcaggtactgaacgccgaactggcgaaacagggtattgaagtcaacaacaacctgtgcgagcactttgcttattctcgtcaggaactgttccacttaatccgcgtggaaggtatcaaaacctttgaagaactgctgacgaaacacggtaaaggctacggctgcgaagtgtgtaagccaaccgtcggttcgctgctggcgtcgtgctggaacgaatacatcctcaaaccgcagcacacgccgctacaggatactaacgataacttcctagcgaatattcagaaagacggcacctactcggtgatcccgcgctcggcgggtggtgaaatcacgccggaaggtctggtggccgtgggtcgtatcgcccgcgagtttaacctctataccaaaatcaccggttctcagcgtatcggtctgttcggcgcgcaaaaagacgatctgccggaaatctggcgtcagttgattgaagccggtttcgaaaccggtcacgcgtacgccaaagcgctgcggatggcgaaaacctgcgtcggcagcacctggtgccgctacggcgtgggcgacagcgtcggtttcggcgtggagctggaaaaccgctacaaaggcattcgtaccccgcacaaaatgaaattcggcgtctccggctgtacccgtgaatgtgcggaagcacagggtaaagatgtcggtatcatcgccactgagaaaggctggaacctgtacgtttgcggtaacggcgggatgaaaccgcgtcatgcggatctgctggcagccgatctcgatcgcgacacgctgatcaagtacctcgaccgctttatgatgttctacatccgtaccgccgataagctgacgcgtaccgcgccgtggctggataacctggaaggcggcatcgaatatctgaagtcggtcattatcgacgataagctgggcctgaacgaacatctggaagaagagatggcgcgcctgcgcgcagcggtggtctgcgagtggacggagaccgtcaacacgccagcggcgcaggttcgtttcaaacacttcatcaacagcgacaaacgcgacccaaatgtccaggttgtgcctgaacgcgaacagcatcgtccggccacgccgtatgaacgcatcccggtcactctggtggaggaaaacgcatga

SEQ ID NO: 9706 - DNA, 327 bp, Salmonella typhi
  CDS (1)...(327)
atgagccagtggcaaaacatctgcaaaattgatgacatcctgccgggaaccggcgtctgcgcgctgtcaggcggcgagcaggtggcgattttccgtccttaccatagcgatcaggtgtttgcgatcagcaacatcgacccgttctttgaggccagtgtgctgtctcgtgggctgattgcggaacaccagggcgaactgtgggtcgccagcccgttgaaaaagcagcgctttcgtttaagcgacgggctgtgcatggaagatgagcagttctctgtgaagcattacgacgcgcgggtaaaagacggcgtggtgcagttgcgcggttaa

SEQ ID NO: 9707 - DNA, 1374 bp, Salmonella typhi
  CDS (1)...(1374)
gtggaccatttgcctatattttgtcaattgcgcgaccgcgactgtctgatcgtcggcggtggcgatgtcgcagaacgcaaagcacggttactgctggaagcaggcgcacgtttaacggtcaatgcgctaacatttattccgcagttcaccgtatgggtaaatgaaggcatgttgactctggttgaggggccgttcgacgaaacgcttctcgactcgtgttggctggcgatcgcggccactgacgacgataccgtcaaccagcgcgtcagcgaagcggcggaatcacgccgtatcttctgcaacgtggtggatgcgccgaaagccgccagctttatcatgccctccattatcgaccgctcgccgctgatggtcgccgtctcctccggcggcacctccccggtgctggcgcgtctgctgcgcgagaaactggaatcgctgctgccgcagcatctggggcaggtcgcgcgctatgccggacagctccgcgcccgagtgaaaaagcagtttgccaccatgggcgaacgtcgtcgcttctgggaaaaatttttcgtcaatgaccggctggcgcagtcgctggcgaatgccgatgagaaagcggttaacgcgacaactgaacacctgtttagcgagccgctggatcaccgtggcgaagtcgtgctggtcggcgccgggccgggcgatgccgggctgcttacgctgaaaggattacaacaaatccaacaggcggatatcgtggtttacgatcgcctcgtttccgacgacattatgaacctggtacgccgcgatgccgatcgggtctttgtggggaaacgcgcgggttaccactgcgtcccacaggaggaaatcaaccagatcctgctgcgtgaagcgcaaaaaggtaaacgcgtggtacgcctgaaaggcggcgatccctttatctttggtcgcggcggcgaagagctggaaacgctgtgtcatgccggtattcctttctcagtagtaccggggattaccgcggcttccggctgctccgcctactccggtattccgctaacccatcgcgattacgcacagagcgtacgtctggtcacgggtcacctgaaaaccggcggcgagctggactgggaaaacctggcggcagaaaaacagacgctggtgttctacatggggctgaatcaggcagcgactatccaggaaaaactgatcgcattcggtatggaggccaatatgccggttgcgctggtggaaaacggtacctccgtaaagcaacgcgtcgttcacggtgtgctgacgcagcttggtgaattagcgcaacaggttgaaagcccggcgctgattatcgttggtcgcgtggtagccttacgcgataaattaaattggttctctaatcattaa

SEQ ID NO: 9708 - DNA, 1005 bp, Salmonella typhi
  CDS (1)...(1005)
atgactaagcccatcgtttttagtggcgcacagccctcaggtgaattgaccattggcaactatatgggggcattgcgtcagtgggtaaacatgcaggatgactatcattgcatctactgcatcgtagaccaacatgctattaccgtacgtcaggacgcgcagcagctacgtaaagcgacgctggatacgctggcgctgtacttggcatgtggtattgatcctgaaaagagcactattttcgttcagtcccatgtgccggaacatgcgcagcttggctgggcgctgaactgctatacctatttcggcgagctgagccgtatgacgcagtttaaagataaatctgcgcgctatgcggaaaatattaacgccggcctgtttgattacccggtgctgatggcggcagacatcctgctgtaccaaaccaatctggtgccggtaggcgaagatcagaagcagcatctggaactgagccgcgatatcgcccagcgtttcaacgggctgtatggcgatattttcaaagtaccggaaccgtttattccaaaatccggtgcgcgcgtgatgtcgttgctggagccgacgaagaaaatgtccaaatcggacgataaccgtaataacgtaatcggcctgttggaagatccgaaatcggtagtgaagaaaatcaaacgagcggtcactgactccgacgagccgccggtagtgcgttatgatgtgaaagagaaagcgggtgtctctaacctgctggatatcctttccgccgtgaccggtcagagcattcctgagctggaaaaacagtttgaaggtaaaatgtatggccatttgaaaggcgaagtggcggaggcggtttccggaatgctgtctgagttgcaggagcgctatcaccgtttccgcaacgacgaagcgttcttgcagaaggtgatgaaagacggggcggaaaaagccagcgcacgtgcggccgaaacgctgaaagccgtttacgaagccattggctttgtggcgaaaccgtaa

SEQ ID NO: 9709 - DNA, 402 bp, Salmonella typhi
  CDS (1)...(402)
atgaaagaaaagtcctccgttgaggtcagactggataaatggctgtgggccgcgcgtttttataaaacccgcgcgctggcccgcgagatgattgaaggcggtaaggtgcattacaacggccagcgcagtaagccgagcaaaatcgtcgagctgaacgcaacccttaccctgcgtcagggaaatgacgaacggacggtgatcgttaaagccatcaccgaacagcgccgtccggccagcgaagccgtcgctctgtatgaagagacggcggaaagcgtggaaaaacgcgaaaaaatggcgcaggcgcgcaagcttaacgccctgaccatgccgcatccggccaggcgaccggacaagaaagagcgccgcgacctgttacgatttaaacacggcgacagcgaataa

SEQ ID NO: 9710 - DNA, 885 bp, Salmonella typhi
  CDS (1)...(885)
atgattatgccgcaacatgaccaattacatcgttatctgtttgaaaactttgccgttcgcggcgagctggtgaccgtttcggaaaccttgcaacagatcctcgacaatcataactatccgcagtcggtgaaaaccgtactggccgaactgctggtcgccactagcctgctgaccgcgacgctgaagtttgccggtgacattacggtacagctccagggcgacgggccgttaagcctggcggtgatcaatggcaataatcagcagcagatgcgcggcgtggctcgcgttcagggcgatatccctgacaatgcggatctcaaaacgctggttggcaacggctatctggtgatcaccattacgccggaagagggtgaacgctatcagggcgtggtgggtctggaaggcgatactctggcggcgtgcctggaagattacttcctgcgctccgagcagttgccgacgcgcctgtttatccgtaccggcgatgtcgacggtaaaccggcggcaggtggaatgttgctccaggtgatgccggcacagaacgcgcaggcggaggatttcgaccatctggccatgttgacggaaaccattaaaagcgaagagctgctgacattaccggcaaatgacgtgctgtggcgtttgtatcacgaagaagaagtcacgctctacgatccgcaagaggttgaattcaaatgcacctgttcacgcgaacgttgcgcgggcgcgctgaaaacattgccggatgaagaagtggacagcattctggcggaagaaggcgaaatcgatatgcactgcgattactgcggcaatcattacctgttcaatgcgatggatatcgcggagatccgtaacaacgcctctcctgccgatccacaggttcattaa

SEQ ID NO: 9711 - DNA, 1620 bp, Salmonella typhi
  CDS (1)...(1620)
  misc_feature (1)...(1620): n = A,T,C or G
atgcgcgttaacaatttaaccccgcaagatctcaaggcttatggtatcaacgacgtccaggatatcgtttacaatcccagctacgacaccctttatcaggaagaacttaatcctggtctggaaggctatgagcgtggcgtgttaactaacctgggcgctgttgccgttgataccggtatttttaccggtcgttcgcctaaggataagtatattgttcgcgacgacaccacgcgtgatacgctgtggtggtccgataagggtaaaggtaaaaacgataataagccgctttcccaggaaacctggcaacacctgaaaggtctggtgacgcatcagctttccggtaaacgcttattcattgttgatgcgttctgcggcgcaaatgccgatacgcgtctttccgtgcgctttattacggaagtcgcctggcaggcccacttcgttaaaaatatgttcattcgcccaacggacgaagagctggtaggcttcaaacctgactttattgtcatgaacggcgcgaagtgcaccaacccgcagtggaaagagcaagggctgaactcggaaaacttcgtggcgttcaacctgactgaacgtattcagcttattggcggcacctggtacggcggcgaaatgaaaaaagggatgttctcggtaatgaactacctgctgccgctcaaaggtatcgcctcaatgcactgttccgccaacgtgggtgaaaaaggcgatgtcgcggtcttcttcggcctgtccggttccggaaaaaccactctgtccaccgacccgaaacgtcgtctgattggcgatgatgagcacggttgggatgacgacggcgtgttcaactntgaaggcggctgctacgccaaaaccatcaaactgtcgaaagaagcggagccagaaatttatcatgcgattcgccgtgatgcgctactggaaaacgtcaccgtgcgcgaagacggcaccgtagatttcgacgatggttccaaaaccgaaaacacccgcgtctcttacccgatctatcatatcgataacatcgttaagcccgtatccaaagcaggtcacgccaccaaggttatcttcctgacggcggatgctttcggcgtgttgccgccggtttcccgtttaaccgctaaccagacgcagtaccacttcctgtcgggtttcaccgctaaactggccggcaccgaacgcggcgtcaccgaaccgacccccaccttctccgcctgcttcggcgccgcgttcctgacgctgcacccgacgcagtatgctgaggtgctggtgaaacgtatgcaggcagcaggcgcacaggcttatctggttaacaccggctggaatggcaccggcaaacgtatctccatcaaagatacgcgcgcgattattgacgctattctgaacggttctcttgataacgcggaaaccttccgcctgccgctgttcgatctggcgatcccgactgaactgccaggcgtggatacccacattctcgacccacgtaacacctacgcgtcgccggaacaatggcaggaaaaagccaccgcgctggcgaaactgttcattgagaacttcgagaagtatacggataccccggcaggcgaagcgctggttagcgccggaccgaagctgtaa

SEQ ID NO: 9712 - DNA, 1353 bp, Salmonella typhi
  CDS (1)...(1353)
atgaggcgaatgcgcttctcgccgcgaagttcatttgcccgcacgctgttgctcatcgtcaccttgctgttcgtcagcctggtgacgacctacctggtggtgctgaacttcgcgattttgccgagcctccagcagtttaataaggttctggcttacgaagtccgtatgctgatgaccgataagctgcaactggaggacggcacgcagttagtcgtgccgcctgcgtttcgccgggaaatctatcgcgagctggggatctctctctacaccaacgaagccgctgaagaggccgggctgcgttgggcgcaacactacgaattcttaagccaccagatggcgcagcaattaggcggcccgacggaagtgcgggttgaggtcaacaaaagctcgcccgtcgtgtggctcaaaacctggctgtcgcccaatatctgggtgcgcgtgccgctgaccgagattcatcagggcgatttttctccgcttttccgttacacgctggcgatcatgctcctggcgataggcggcgcgtggctgtttattcgtatacagaacagaccgttagtggatcttgaacatgccgccttgcaggtagggaagggaattattccgccgccgctgcgtgaatatggcgcctctgaggtgcgctctgtgacccgggcgtttaaccatatggcagccggcgtgaaacaattggccgatgaccgtacgctattgatggcgggcgtcagccacgacttacgcacgccgctgacccgtattcgtctggcgacggagatgatgggcgaggaagacggttatctcgcggagtcgatcaataaagacatcgaagagtgtaacgccattatcgaacagtttattgactatctgcgtaccggtcaggaaatgccaatggagatggcggatctcaattccgtgctgggcgaggtgattgcggcggaaagcggctatgagcgtgagattaacactgcgcttcaggcaggcagcatccaggtgaaaatgcacccgctctcgattaagcgcgcggtggcgaatatggtggtcaatgctgcccgctatggcaactgctggattaaggtcagcagcggcaccgagtcgcatcgcgcctggttccaggtagaagatgacgggccgggcattaagccggagcagcgtaaacatctgttccagccttttgtgcgcggcgacagcgcccgtagcaccagcggcacagggctggggctggcgattgtgcagcgcattattgataaccataacgggatgctggagattggcaccagcgagcgtggcggattgtcgattcgcgcctggctaccggttcctgtggctcgcgtccaggggacgacaaaagaggcataa

SEQ ID NO: 9713 - DNA, 2331 bp, Salmonella typhi
  CDS (1)...(2331)
atgatgaatgattctttctgccgcattattgcgggtgaaatccaggcaaatgccgggcaggttgaagctgccgttcgcctgcttgacgaagggaacaccgtgccgtttatcgcacgttatcgtaaagaaatcaccggcggtctggatgacacgcagttgcgtaacctggaaacgcgtctgggctatctgcgtgagctggaagacaggcgtcaggccatcctcaagtccatttccgaacaaggcaaactgaccgatgagctggctggcgccatcaacgctacgttaagtaagaccgagctcgaagacctctacctgccctataaacctaaacgccgcacccgtggacaaatcgccattgaagccggccttgagccgctggccgatctgctctggaacgaaccgtcccacgatcctgacgtgaaagcggcaaagtacattgatggcgacaaaggcgtggcggacacgaaagccgcgctcgacggcgcacgctacattctgatggagcgctttgccgaagacgccgcattgctggcgaaagtgcgtgattacctgtggaagaatgcccatctggtcgccacagtcgtgagcggcaaagaggaagaaggggcaaaattccgcgactatttcgaccatcatgagcccattgctaacgtcccgtctcaccgtgcgctggccatgttccgtggtcgtaacgaaggcattctgcaactttcgctcaatgccgacccacagtttgatgagccgccgaaagagagctactgcgagcaaatcatcatggaccatctcggcctgcggctaaataacgccccggcggatagctggcgcaaaggcgtagtgagctggacgtggcgtatcaaagtcttaatgcacctcgaaaccgaactgatgggcaccgtgcgcgaacgtgcggaagacgaagcgattaacgtgtttgcgcgtaacctgcacgacctgctgatggcagcccccgcaggcctgcgcgccacgatgggccttgatcctggcctgcgtaccggcgtaaaagtcgctgtcgttgacggcaccggcaagctggtggcgacggataccatttatccgcataccggtcaggcggccaaagcggctaccgtgatcgccgcgctgtgcgaaaaataccacgtcgaactggtcgcgattggcaacggtacggcttcgcgtgaaaccgaacgtttctatctcgacgtacagaaacagttcccgaacgtgacggcgcagaaagtgatcgtcagcgaagcgggggcgtccgtgtattccgcttctgagctggcggcgcaggagtttccggatctcgacgtctccctgcgcggcgcggtctctatcgcgcgtcgtctgcaggatccgctggcggaactggtgaaaatcgatccgaaatcgatcggcgtcggccaatatcaacacgatgtcagccagacccaattggcccgtaaactggatgcggtggtcgaagactgcgtaaacgccgtcggcgtcgatttgaataccgcctccgtaccgctgctgacccgcgtcgcaggcttaacgcgcatgatggcgcaaaacatcgtcgcctggcgcgatgagaacggtcagttccagaaccgccagcaactgttgaaggtgagccgtctggggccgaaagcgtttgagcagtgcgcgggcttcctgcgtattaaccacggcgataacccgctggatgcctccaccgtccacccggaagcctatccggttgtcgaacgcattctggcggcgacgcagcaagcgctaaaagatctgatgggcaacagcaacgaattgcgtcacctcaaggccgctgattttaccgacgataaattcggcgtgccgaccgtgagcgatatcatcaaagagctggaaaaaccgggccgcgacccgcgtcctgaatttaaaaccgcgcaattcgccgatggcgtcgaaaccatgaacgacctgctgccggggatgattctggaaggggcagtcactaacgtcactaacttcggcgcgtttgtcgatatcggcgttcatcaggatggcctggtccacatctcttccctgtcgactaagttcgtcgacgatccacacaccgtggtaaaagctggcgacatcgtgaaggtgaaagtgctggaagtggatctgcaacgtaagcgtattgcgctgacgatgcgtctggacgaacagcccggcgaaaccgccgctcgccgcggcggcggtgccgatcgcgctcagggcaaccgcccggcgtcaaaagcggcgaaaccgcgcggtcgtgacgcccagccagccggtaacagcgccatgatggacgcgctggcagcggcaatgggaaaaaaacgctaa

SEQ ID NO: 9714 - DNA, 1965 bp, Salmonella typhi
  CDS (1)...(1965)
atgacgcagcttgcgatcggcgaagcaacgccgcatggcgcaacgtatgacggtcatggcgtgaatttcacgctcttttccgcccatgcggagcgcgtagagctgtgcgtttttgattcccgagggaatgagcgtcgctatgacctgccaggacgtcgcggcgatgtctggcatggttatctggcaggcgccaggccaggtttgcgctatggctatcgcgtacatggcccgtggcagccagcgcaggggcatcggtttaatccggcgaagttactgcttgacccttatgcgcgccaagtcgagggcgaactaaaagatcatccgctgttgcacggcggacacgatgaaccggactaccgcgataacgcggcggtggcgccgaaaagcgtggtaatcagcgaccattatgactgggaagatgacgccgcgccgcgcacgccgtggggaaaaacggtcatctatgaagcgcatgtcaaagggcttacctatctgcatccggaactcccccaggagatacgcggcacctataaagcgctcggtcatccggtcatggtggcgtacttcaaacagcttggcattacggcgctggaactgttgccggtggcgcagtttgccagcgagccgcgtctgcaacgtatggggctgaccaattattggggttataacccaatggcgatgtttgcgctgcatcccgcctgggccagttcgcccgagacggcgctggacgagtttcgcgatgcggtgaaagcgctgcatcgcgcggggattgaggtcattctggacatcgtattaaaccatagcgccgagctggatctggacggtccaaccttctccctgcgcggaattgataaccgtagctattattggataagggacgatggcgattatcacaactggacggggtgcggcaacacgctcaatttaagccatcccggcgtggtggaatacgcgtgcgagtgtttgcgctattggatggaaacctgtcatgtcgatggttttcgttttgatttggcgtccgtcatggggcgcacgccgacgtttcgccaggatgcgccgctgttcgccgcgattaaagcgtgtcctgtgttatcaacggtcaagctgattgctgaaccgtgggatattggcgagggcggctatcaggtcgggaattttccgccaccgtttgccgagtggaacgatcattttcgcgatgcggcccgccgattctggttgccgcgtaacctgacgaccggggagtttgcctgtcgtttcgccgcttccagcgatgtgtttaaacgcaatggccgcgcgcccggcgcctctgtcaatctgctcacggcgcatgacggttttacgctccgggactgcgtctgtttcaatcagaaacacaatgaggcgaacggtgaggaaaatcgcgacggcaccaacagcaattacagcgacaatcatggtaaagaaggattaggcggtccgcttgatttaatggagcggcggcgcgacagcattcatgccctgctggcgacgctactgctctctcagggaacgccgatgctgctggcaggcgatgaacacggccatagccagcacggcaacaataacgcctactgtcaggataatgccttaacctggctggactggcagcaggcaaatcgtgggttaaccacgtttaccgccgcgctgattcgtttgcgtcagcagataccggctttaaccggcaatagctggtgggaagaaggcgatggcaacgtgcgttggctaaataaaaacgcgcaacccttgagtgcggatgagtggcaaaacggacctaagctgatgcaaattctgttgtcggaccgttttctgattgcgataaatgccacgcttgaggtgacagatatagttttacccgaaggggaatggcgcgccgttcccccattcgctggagaggataatccggtgataacggcggtctggcagggactgtgtgtgttccagagaggataa

SEQ ID NO: 9715 - DNA, 1293 bp, Salmonella typhi
  CDS (1)...(1293)
  misc_feature (1)...(1293): n = A,T,C or G
atgaaaccgatgcatattgcgatggctctgttctctgcggcgatgttcttcgttctggctggcgtctttatgggcgtacaactggagctggacggcaccaaactggtggtggataccgccgccgacatccgctggcagtggatctttatcggtacggcagtggttttnttctttcagttgctgcgtcngatgttccagaaagcggtgaancacgtcaccggaccgaagtttattctgccggcgatcgatggctctaccgttaagcaaaagctgtttctgatggcgctgttggttatcgccgtggcgtggccgtntatggtgtcgcgcggtancgtcgatatcgccactatgancatgatttatatcatcctcggtctggggctgaacgtggtggtggggctgtccggcctgctggtattgggctacggcggcttttacgccatcggcgcttatacctttgcgctgcttaaccactattacggtttgggtttctggacctgcctgccgctggcgggactggtctccgccgccgccggtttcctgctcggcttcccggtactgcgcctgcgcggcgactatctggcgattgtgacgctcggcttcggcgaaatcgtccgtatcctgttgctcaacaacactgaaattaccggcggcccgaacggcatcagccagatccccaaaccgacgctgtttggtctggagtttagccgcaacacccgagaaggcggctgggataccttcagcaatttctttggcgtgaagtacgacccatccgaccgggtcattttcctctatctggtggccctgttgctggtggtcctgtcgctgtttgtcattaaccgcctgctgcgtatgccgctgggccgggcgtgggaagcgttgcgtgaagatgagatcgcctgtcgctcattaggtttaagcccgacgcgcatcaagctgaccgcttttactatcagcgccgcgtttgccggtttcgccgggacgttgtttgccgcccgccagggctttgtcagcccggaatccttcactttcgccgaatccgccttcgtgctggcgattgtggtgctgggcggaatgggctcgcagtttgcggtgatcctggcggcggttctgttggtggtgtcgcgcgagttgatgcgcgatttcaacgaatacagcatgttgatgctcggcggtttaatggtgttgatgatgatctggcgcccgcagggattgctgccgatgacgcgtccgcagttgaagctgaaaagtggtcaggcgaaaggagagcaggcatgngtcagccattattag

SEQ ID NO: 9716 - DNA, 1908 bp, Salmonella typhi
  CDS (1)...(1908)
atgattgttttctcctcgttacaaattcgtcgcggcgtgcgcgtcctactggacaatgcctcggctaccattaatccaggccagaaagtcggcctggtgggtaaaaacggctgcggtaaatctaccctgctggcattgctaaaaaatgaaatcagcgccgatgccgggagttttaccctgcccggaacctggcaattagcgtgggtgaatcaggaaacacctgcgttgcctcagccagcgattgagtatgtcattgacggcgaccgtgaataccggcatctggaggcgcagcttaacgacgccaacgaacgtaacgacgggcatgctatcgcctccatacacggtaagctggacgccatcgacgcatggaccgttcgctcgcgcgccgccagcctgttacacggcctcggcttctctaacgatcagctggaacgtccggtcagcgacttttccggcggctggcggatgcgccttaatctggcccaggcgctgatttgccgttccgatttactgctgctcgacgaaccgaccaaccacctcgatctggatgccgttatctggctggaaaaatggctgaagagctatccaggcaccctgattctgatctcccacgatcgcgattttcttgacccgatagtggataaaattatccatatcgaacagcagactctgttcgagtacaccggtaactacagcgcgtttgaagttcagcgcgccacgcgcctggcgcagcagcaggcgatgtatgagagtcagcaggagcgtgtggcgcatctgcaaagctacatcgaccgtttccgcgccaaggccaccaaggccaagcaggcgcaaagccgtatcaagatgctggagcgtatggagttgattgcgccggctcatgtcgacaacccgttccatttcagcttccgcgcgccggaaagcctgccgaacccgctgctgaagatggaaaaagtcagcgcaggttatggcgatcgcatcattctggaatccatcaagctgaacctggtgcccggctcgcgtatcggcctgctgggccgcaacggcgcggggaaatcgacgctgatcaagctgctggcgggcgaactggaaccgttgcacggtgaaatcggcctcgccaaaggcattaagctcggctacttcgcccagcaccaactggagttcctgcgcgccgatgaatccccgctgcagcatatggcgcgtctggcgccgcaggaactggagcagaagctgcgcgactatctcggcggcttcggtttccagggcgacaaagtaacggaagagacgcaacgtttctccggcggcgagaaagcgcgcctggtactggcgctgatcgtctggcagcgtccaaatctgctactgctcgatgaaccaaccaaccacctggatctcgacatgcgtcaggcgctcaccgaagcgctgattgatttcgaaggcgcattggtcgtcgtgtcgcacgaccgccacctgattcgctccaccaccgacgacctctatctggttcacgacaaaaaggtcgaaccgttcgacggcgacctggaggattatcagcagtggctgagcgacgtgcagaagcaggaaaaccaggccgacgacgcaccgaaggaaaacaacgccaacagcgctcagtcacgcaaagatcagaagcgtcgcgaagccgagctacgcactctaacgcagccgctgcgtaaagagattacccgtctggaaaaagagatggaaaagctcaacgcccaactggcgcaggcggaagagaagcttggcgacagcagcctgtatgacccaagccgtaaagcggagatgaccgagtgtctgcaactgcaggccagcgccaaatccgggctggaagaatgtgaaatggcatggcttgaggcgcaggagcagcttgagcagatgatgcagaacgactaa

SEQ ID NO: 9717 - DNA, 909 bp, Salmonella typhi
  CDS (1)...(909)
  misc_feature (1)...(909): n = A,T,C or G
atgttcgcagcaatcattatcggtatttttattatcagcgtcatttatgcgcattcacgcggggtggaaaaacaaaaactttcccgtcagctctttgaccactcgacgtttatggcgccgatcaatatgttcatgactcgcttctcaacgttaccggcaaagcagccgtactttgataccacggcatttccagagctgcagaagctgacggaaaactggcaggtgattcgtgaagaggcgctacggcttcagcatcacataaaagccgcgcaggccaataacgacgccggattcaacacctttttcaagcgcggctggaaacggttttatcttaaatggtattccgatgcccacccgtcggcagaaacgttatgcccgataacgacaaagctggtcaacagcatcccctctatcaaagcggcgatgttcgccgagttgcctcccggggcctatctgggaaaacatcgcgacccctatgccggttcagtacgttaccatcttggattaagcacaccgaatgatgaccgctgttttattgaagttgatcgacagcgccatagctggcgcgacggcgaagccgtcatcttcgacgaaacctacgttcattgggcggaaaataaaactgagcagacgcgtattatcntcttttgcgatattgagcgcccaatgaaatggcgctgggcgcagagcgtaaaccactgggtcggcgcatcgttgatgtccgccgccagttcgccaaacgacgagaacgatcgcaccggtgcgattaatcgcatctttaaatacgttcacgcagcacgcgatgccgggcaacggctgaaaaagaaaaaccgtactctctattacgcgctgaaatatctcgttattgccgctatttttgccgcgataatccttttcagcctcctctga

SEQ ID NO: 9718 - DNA, 1959 bp, Salmonella typhi
  CDS (1)...(1959)
  misc_feature (1)...(1959): n = A,T,C or G
atgagccaaacacataaacacgccattcccgccaacattgcggatcgttgcctgataaatccagagcagtatgagactaaatataaacagtctattaacgaccccgatacgttttggggcgaacagggaaaaattctcgattggatcacgccgtaccaaaaagtgaaaaacacctcctttgcgccaggcaatgtgtcgattaaatggtacgaggacggcacgctgaatctggcggcgaactgtcttgaccgccatttgcaggaaaatggcgatcgcaccgccattatctgggaaggcgatgacgcgtcgcagagtaaacatatctcttatcgcgaactgcatcgcgatgtctgccgtttcgcgaatacactgctggatctgggcattaaaaaaggcgatgtggtagcgatttatatgccgatggtgccggaagcggcggtggcaatgttggcctgcgcccgcatcggtgcggtgcattcggtgatcttcgggggcttctcgccggaagccatcgccggacgcattatcgactccagctcgcggctggtgatcaccgctgacgaaggtgtacgtgccggacgcagtatcccgctgaaaaagaatgtcgatgacgcgctgaaaaacccgaatgtcactagcgttgagcatgtgatcgtcctgaagcgcaccggcaacgacattgactggcaagaaggccgcgacctgtggtggcgcgatttgattgaaaaagccagccctgagcaccagcctgaagcgatgaatgccgaagatccgctgtttatcctttatacctccggctccaccggcaagccgaaaggcgtgctgcacaccaccggcggctatctggtctacgccgcgaccacctttaagtatgtctttgattatcaccctggcgatatttactggtgtaccgccgatgtgggttgggtgacggggcacagctatctgttgtatggcccgctggcctgcggcgcgaccaccttaatgtttgaaggcgtgccgaattggccaacgcccgctcgcatgtgccaggtggtcgacaaacaccaggtcaacattctctataccgccccgacggccatccgcgcgctgatggcggaaggcgataaagccattgaaggcaccgaccgttcttcactacgcattctgggttccgtcggcgagccgatcaatcccgaagcgtgggaatggtactggaagaagatcggcaaggaaaaatgtccggtcgtcgacacctggtggcagactgaaacaggcggttttatgatcacgccgctaccaggcgctatcgaactgaaagccggttccgccacccgtcctttctttggcgtacagcctgcgctggtggataacgaaggccatccgcaagaaggcgcgacggaaggcaatctggtcatcaccgattcctggccgggccaggcgcgcactctgttcggcgatcatgaacgttttgagcagacctatttctctacctttaagaatatgtatttcagcggcgacggcgcgcgtcgcgatgaggacggctattactggatcaccggtcgcgtggatgacgtgttaaacgtctccggccaccgtctgggtacggcggaaatcgagtcagcgctggtggcgcatccgaagatcgccgaagcggcggtggtgngtattccacacgctatcaaaggccaggcgatttacgcttatgtgacgctcaaccacggcgaggagccgtcgccagaactgtacgcggaggtgcgcaactgggtacgtaaagagattggcccactggcgacgccggacgtgctgcactggaccgactcactgccaaaaacccgttccggcaaaattatgcgccgcattttgcgcaaaatcgcggcgggcgataccagcaatctgggcgatacctcgactctcgccgatcctggcgtggtggagaaactgctcgaagagaagcaggccatcgcgatgccgtcataa

SEQ ID NO: 9719 - DNA, 654 bp, Salmonella typhi
  CDS (1)...(654)
  misc_feature (1)...(654): n = A,T,C or G
atgcaacaatatgaggttcgcgcgagtgacctggaacctgcatcgcagctattaaaatgctacgtggaaatggtacactcacgcgtttacactatttatgaaacgtattcaggagactcaattatggccagcagaggcgtaaacaaggtgattctcgttggtaatctgggccaggacccggaagtacgctatatgccgagtggcggtgctgtcgccaacttaacgctggctacttctgaatcctggcgcgataagcagaccggcgaaatgaaagagcagactgaatggcaccgggtggtgatgttcggcaaactggcggaagtggccggcgaatatctgcgtaaaggttctcaggtgtatatcnaaggtcannngcgtacccgcaagtggaccgatcagagtggccaggaacgctatacgactgaaattaacgttccgcagatcggcggcgtgatgcagatgctgggtggtcgccagggcggcggcgcancngcnnncggncagcagcagggnggttggggtcagccgcaacaacctcagcagccgcagggcggtaaccagttcagcggcggcgcgcagtcgcgtccacagcaatccgcgccagcgccgtctaacgaaccgccaatggattttgacgacgacattccgttctga

SEQ ID NO: 9720 - DNA, 2826 bp, Salmonella typhi
  CDS (1)...(2826)
  misc_feature (1)...(2826): n = A,T,C or G
atggataagatcgaagttcggggcgcccgcacccataatctcaaaaatattaacctcgtcatcccccgcgacaaactgattgtcgtgancgggctttcgggttcaggcaaatcctcactggctttcgacactctgtatgccgaagggcagcgtcgttacgtagaatcgctctccgcttacgcgcggcagtttttgtcgctcatggaaaaaccggatgtcgaccatattgaggggctatcgcccgcgatctcaattgaacagaaatcgacatcgcacaacccgcgctctacggtgggtactattaccgagatccacgactacctgcgcctgctgtttgcccgcgtgggcgagccgcgttgtccggaccatgacgtgccgctggcggcgcaaaccgttagccagatggtcgataacgtgctgtcgcagccggaaggcaaacgcctgatgctgctggcgccgattattaaagagcgtaaaggcgaacacaccaaaacgctggaaaatctggcaagccagggttacattcgcgcccgtattgacggcgaagtctgcgatctctccgatccgccgaagctggagctacaaaaganacataccattgaggtggtgatcgatcgcttcaaagttcgtaacgatctttcccaacgcctggcggagtcgttcgaaacggcgctggaattatccggcggcacggcggttgttgccgatatggacgatgagaaagcggaggagcttctgttctccgccaattttgcntgcccgatttgcggctacagtatgcgcgagctggaaccgcgtctgttctcgttcaacaacccggcaggcgcctgtccgacctgtgacgggctcggcgttcagcaatatttcgatccggaccgcgtgatccagaatcccgacctgtcgctggcaggcggcgcgattcgtggttgggatcgtcgcaatttntactactttcaaatgctcaagtcgctggcggaacactataagttcgacgtggatgcgccgtgggcaagcctcagcgccaacgtacacaaagtcgtgctgtacggttccggcaaagagaacatcgaatttaaatatatgaacgatcgcggcgatacctccgtgcgccgccatccgttcgaaggcgtgctgcataatatggagcgccgttataaagagacggaatccagcgcggtgcgcgaagagctggcgaaattcatcagtaatcgcccctgcgccagctgtgaaggaacgcgactgaatcgcgaagcgcgccatgtatttgtggaaaatacgccgctgcctgctatttccgatatgagcattggccatgcgatggattttttcactaatctcaagctttccgggcaacgggcgaaaatcgccgaaaaagtgctaaaagagatcggcgatcgcctcaagtttctggtgaacgtcggcctgaactatctcacgctctcccgctcggcagagacgctttccggcggcgaagcccagcgtattcgtctggcgagccagataggcgccgggttagtcggcgtgatgtatgtgctggatgaaccgtccatcggtctgcaccagcgcgataacgaacggctgctgggtacgctgattcatctgcgcaatcttggcaataccgtgattgtggtggaacacgatgaagacgccatccgcgccgccgaccatgtgattgatattggccccggcgcgggcgttcacggcggcgaggtggtggcggaaggcccgctggaagccattatggcggtaccggaatcgctgaccggccagtacatgagcggtaaacgcaaaattgaagtgccgaaacaacgcgtgccggcaaatccagaaaaagtgctcaaactcaccggcgcgcgcggcaacaacctgaaagatgtgacccttacgctaccggtagggctgtttacctgtatcaccggcgtctcgggttccggtaaatcgacgctgattaacgatacgctgttccccatcgcccagcgtcagttaaacggggcgactatcgccgaaccggcgccgtatcgggatattcaggggctggaacatttcgataaagtgatcgatatcgaccagagcccgatcgggcgcaccccgcgttccaacccggcgacctatacgggcgtctttaccccggttcgtgagctttttgctggcgtgccggagtctcgctcgcgcggctacacgccagggcgattcagcttcaacgtgcgcggcggtcgctgcgaagcgtgccagggcgatggcgtcattaaagtcgaaatgcactttctgcnggatatttacgtgccgtgcgaccagtgcaaaggcaagcgctataaccgggaaacgctggagattaagtacaaaggcaagaccatccacgaagtgctggatatgaccattgaagaagcgcgtgagttctttgatgcggttccggcgctggcgcgtaagctgcagacgctgatggacgtggggctgacctatatccgtcttggtcagtcggcgacgacgctttccggcggcgaggcccagcgcgtgaagctggcgcgcgaactgtcgaaacgtggcaccgggcagacgctgtatattctcgacgagccgaccaccggcctgcactttgccgatattcagcagttgcttgacgtgctgcatcagttgcgcgatcagggcaacaccatcgtggtgatcgaacacaacctggacgtcattaaaacggcggactggattgtcgacctcggcccggaaggcggcagcggcggcggcgaaattctcgtcgccggtacgccggaaaccgtggcggagtgcgaggcgtcgcataccgcccgcttccttaaacctatgctcaaataa

SEQ ID NO: 9721 - DNA, 537 bp, Salmonella typhi
  CDS (1)...(537)
atggcttctaaaggtgtaaacaaagttattctggtgggaaatctgggacaggatcctgaggtgcgttatatgccaaatggcggtgccgtggtaaacctcagtctggcaacctcagatacctggacagataaacagaccggtgacaaaaaagagcgcactgaatggcacagggtggttctttacggcaagctggccgaaattgccagtgagtatctgcgtaagggctcccaggtatacatcgaaggtgcattacgcacccgcaaatggacggatcagtctggcgttgaaaagtacactacagaagtggtcgtcagccagtcaggtacgatgcagatgttgggcggacgaaatagtgcgggaagtgggcagcaacagggcggctggggtcagcctcagcaaccagcagcgccttctcacagcgggatgccacctcaacagcatcctgcaaatgagccgccaatggacttcgacgatgatatcccgttcgcgccgttcgggcacagtgtggccagacatgcgctttatgtgctgtcctga

SEQ ID NO: 9722 - DNA, 1995 bp, Salmonella typhi
  CDS (1)...(1995)
  misc_feature (1)...(1995): n = A,T,C or G
atgcgtctggtgttgtgtgaaaaaccttctcagggcagagatattgcgaagtttcttggcgccactcaaagaggcgaaggattcctgaatggtccgggagttacagtcacctgggctcgcggccatctgctggagacagctgaaccggaagtatatggcgaacagtatggtaagccatggcgcaccgatgtgcttcctttattaccacagcagtggaaactggtagtcaaagcggatgcaaaagcccaattcgcggtaattaaccgtctgcttaaacaggtagatgaggtggtaattgccacggatgctgaccgggaaggtgaagtaatcgcccgtgagttgctggattactgcaagtttcaggggcgtgtattccggttgtggatgtcagctctggatgatgccagtatccggtcagcgttagctgatttgtggccgtcttcccgaactgaatcgctttattatgctggcgtgggcaggagcagggctgactggctgatcggtatgaatctgactcgcctgtttacactcctggggcgtgaagcgggtatcggtaacgtactttcagttggncgggtacaaacgccaacgctggcgatagtggtaaagcgtgatcgtgaaattgataacttcgtgtcgaaaccgtacttcgaagttattgccacgatggccgtgaatggcgtgttgtttccatccaaatgggtaccggctgcacagtattgcgatgaagagaagcgttgtatccagtcgggggtagcggcacaggtggttcagttgtgtcggcaaacgccaacggctgcgataatcaattgccagatcgagaggaaaaaacaatcagcgccgctggctttcagcctgagcacactacaacaggcctgctcccgacactgggggatgccagcccagacggtacttgatatcgcccagaagttatatgaaacccacaaactgacgacctatcccagaactgactgtggttatctgccgttatcgatgcgagaagaaatcccacaggtactgtctgctgtggtcggaactgatccggcgctacagccggtggtcgcgagtctggacactcagtttgtgtcacgtatctggaatgataaaaaaattaccgctcatcacggtatcattccgacaaaacatactggtgatctgagcaaactcagtgatgctgagcgcaatgtctatcagctggtcaggttgcactacctggcccagttcctgccccagatggaaattgacgtgactgaggccacatttaatattggcggtcagcttttccgtacccgtggtaacgttttggtgaaacccggctggaaatctctgtttggcaaaatgtccgaagatgatgaggataatactggtgaaaccacactgcccgccatgcaggcgggccaggtctgccaggtgcagggcgctgagcagaaggtactgcagacaaaaccgcctgctccgtacaacgatggaactcttattgccgcgatgaccaatgcggcggcgttcgttactgacgccgcgctgaaaaaggtgctcaaagagaatgcggggataggaactgaagcaacacgggccgggataatcgacacgctgttgaagcgtgggtttctggtgcgtgagaaaaagacgcttaagtcaacacctcttggacgtaacctggtggatgtgttgccaggaacgttaacgaatcccggacttacggcactgtgggaacagatgctggatgaggtagctgcaggcagggtgagcctggatgactttatggcaaagcaaagtcagtgggtcagtcagctggtcgctcaggggagatcacagccactgactatgcaggcgccaccttcaccaccctgtcctgtatgtggcggcaagacgttgcagcgcaatggaaagagtggcttgttctggggctgcctgaaatatccggagtgcaaaggtatcgtgaacaatggtaacaagggccccagaggacgcagacgaaaaccttcgccagcctag

SEQ ID NO: 9723 - DNA, 1431 bp, Salmonella typhi
  CDS (1)...(1431)
  misc_feature (1)...(1431): n = A,T,C or G
gtgacagttaaaaacgacagcatacagagcacattcctcttccacgattacgaaaccttcggtacgcatccggccctcgacagacctgcgcaattcgccgcgctccgtacggataacgacttcaacgttattggcgagccggaggtgttttattgcaaacccgccgatgattatctaccgcagcccggcgcagtgctgattaccggcatcacgccgcaggaagcgcgtgagaaaggagaaaacgaagccgctttcgccagacgcattcatgcgctgtttaccgttcctaaaacctgcgttgtgggctacaacaatgtacgttttgatgatgaagtcacgcgcaatattttttatcgcaacttttacgatccctacgcctggagctggcagcatgataattcacgttgggatctattggatgtcatgcgcgcctgttatgcgctgcgcccggagggaattaactggccggaaaacgacgacggcctgcccagctttcgtctggaacatttaacccaggcgaacgggatcgaacacagcaacgcgcatgatgcgatggcggatgtctacgccactattgcgatggcgcaactggtgaaaacacgccagccgcgactgtttgattatctttatagccaccgcagtaaacataaactggcggcgctgattgacgttccgcaaatgaagccgctggtgcatgtctccggcatgtttggcgcgtggcgcggtaatacaagctgggtcgcgccgctggcgtggcatcctgaaaaccgtaacgcggtgatcatggtcgatttagcaggcgatatttctcctcttcttgagctgnacagcgacaccnttcgcgagcggctntatacggccaaagccgatcttgncgatcacgccgnagtgccggtaangctggtgcatatcaatanatgtccggtactggcgcaggcgaatacnttgcgcccggaggatgccgaccggctgggaattaaccgccagcattgcctggataacctgaaagtgctgcgtgaaaacccgcaggtccgcgacaaagtggtggcgattttcgccgaagccgaaccttttgccacctcggataacgttgatgcccagctctatgatggttttttcagcgatgccgatcgcgcagccatgaaaatcgtactcgaaaccgagccgcgtaacctgcccgcgctggacattacctttgtcgataagcgcattgagaagctgctgtttaattaccgcgcacgcaattttcccggtacgctggatgacgcagagcagcagcgctggctggagcatcgccgtcaggtactgacgccagagtttttacaacagtatgccaatgaattgcagatgctttctcagcagtatgcggaagataaaacgaagctggggctgctgaaatcactgtggcagtacgcaactgagattgtgtaa

SEQ ID NO: 9724 - DNA, 1407 bp, Salmonella typhi
  CDS (1)...(1407)
atgtccaagcaacagatcggcgtcgtcggtatggcagtgatggggcgcaacctcgcgctcaacatcgaaagccgtggttataccgtctccgttttcaaccgctcccgtgaaaagaccgaagaagtgattgccgagaatcccggcaaaaagctggtgccttattacacggtgaaagagtttgttgaatccctcgaaacgcctcgtcgtatcctgttaatggtgaaagcgggtgcaggtactgatgcagctatcgattcgctgaaaccgtatctggaaaaaggcgatatcattattgatggcggtaacaccttcttccaggacacaatccgtcgcaatcgcgagctgtctgcggaaggttttaactttatcggtaccggtgtttccggtggtgaagagggcgcgctgaaagggccatctatcatgcctggcggtcagaaagatgcctatgaactggtggcgccgatcctgacgaagattgctgctgtggcagaagatggcgaaccgtgcgtgacctatatcggcgccgatggcgcgggtcactacgttaagatggtccacaatggtattgaatatggcgatatgcagcttatcgctgaagcttactccttgctgaaaggcggcctgaatctcagcaatgaagagttggcgaacacttttactgagtggaataacggcgagctgagcagttatctgatcgacatcactaaagacatcttcactaaaaaagatgaagacggtaattacttgatagatgttattcttgatgaagccgccaacaaagggaccggtaaatggaccagccagagcgcgctggatctgggcgaaccgctgtcgctgattaccgaatccgtctttgcgcgttacatctcttcgctgaaagcgcaacgtgttgccgcatctaaagtgctctccgggccgaaagcgcagccggcgggcgacaaagcggaatttatcgagaaagtgcgtcgcgcgctgtatcttggcaagatcgtctcctatgcgcagggcttctcgcagctacgcgccgcgtctgatgaatatcactgggagcttaactacggcgagattgctaagattttccgtgcgggctgtatcattcgcgctcagttcctgcagaagatcaccgatgcttacgcagaaaacgccggtatcgctaacttgctgttagcgccttacttcaagaaaattgctgatgagtaccagcaggcgctgcgtgatgttgtggcttacgcggtgcagaatggcattccggtgccgacattctctgcggcagtggcctactatgacagctatcgcgccgcagtactgccagctaacttaattcaggcgcagcgtgactactttggtgcgcacacctataaacgtactgataaagaaggcattttccataccgagtggttggaataa

SEQ ID NO: 9725 - DNA, 1395 bp, Salmonella typhi
  CDS (1)...(1395)
  misc_feature (1)...(1395): n = A,T,C or G
atgacaaatctaaaaaagcgcgaacgagccaaaaccaatgcatcgttaatctctatggtgcaacgcttttcagatatcaccatcatgtttggcgggctgtggttcatctgtgaagtcagtggactgccattcctgtacatgcacctgttggtggcgctgattacgctggttgtttttcaaatgctgggcgggatgaccgatttttatcgctcctgncgcggcgtcnaaatgtcgacagagttaacgctgttactgcaaaactggacgctgagcctgatcttcagcgccggtctggtggcgtntaatgatgactttgacaaccgcctcgccacctggttggcctggtatgcgctgtccagcctgagcttagtgttgtgccgtccatctattcgtttcggcgcgggctggctacgcaatcgtggttatcacactcgccggggcgccgtcgccggggatntgcctgccgggcacgcgttgctggatagcttccgtaatgagccgtggctgggtnttgangtggngggcgtctatcacgatcctaaaccgggcggcgtctctgctgactgggccgggaacttcgaacagttaattgacgatgcgaaagcctcgcgaattcacaatgtttatatcgccatgtcaatgagcgacggcgccatggtgaaaaaactggtgcgcgagctggccgacaccacctgctcggtgatccttattcccgatgtgttcacctttaatattctccactcgcgcgtggaggagatgagcggcgttccggtcgttccgctgtatgacacgccgctatcagggattaaccgtctgcttaaacgggcagaagatatcgtgctggcgtcgctgattctgctgctcatctcaccggtactgtgctgcattgcgccggcggtcaaattgagctcgcccgggccggtgattttccgtcagacgcgctacgggatggacggcaagccgagcaaagtctggaggttccgctcaatgaaggtgatggagaacgataaggtcgttacccaggcgacgcaaaacgatccgcgcgtcacccgggtaggtaactttttgcgtcgtacctcgctggatgaattaccgcagtttatcaacgtattaaccggcgggatgtctatcgtcggtcctcgcccgcacgcggtggcgcataacgaacagtatcgtcagttgattgaaggttacatgctacgccacaagatgaagccgggcatcaccggctgggcgcaaattaatggctggcgcggtgagaccgatacgctggagaaaatggaaaaacgcgtggaattcgacctggaatacatccgcgaatggagtatttggttcgatatcaaaatcgtttttctgacgatttttaaagggtttgttaataaagcggcgtattaa

SEQ ID NO: 9726 - DNA, 810 bp, Salmonella typhi
  CDS (1)...(810)
atgactataaggattaaagctatgggttttctttccggtaagcgcattctggtcactggcgtggccagtaaactgtccatcgcctacggtatcgcacaggcgatgcaccgcgaaggagctgaactggcgttcacctaccagaacgacaaactgaaaggccgcgtagaagaatttgctgcccagctgggttccagcatcgttttaccgtgtgatgtcgctgaagatgccagcattgacgctatgtttgcggagctgggtaacgtttggccgaaatttgacggtttcgttcactcgatcggtttcgcgcctggcgatcagctggacggcgattatgttaatgcggttacccgcgaaggctttaaaatcgctcacgatattagctcttacagttttgttgccatggcgaaagcctgccgcaccatgctgaatccgggttctgcgctgttgaccttgtcttatctgggagcggagcgcgccatcccgaactacaatgtcatgggtctggcgaaagcctctctggaagccaacgtgcgttatatggcaaacgctatgggaccggaaggggttcgcgtcaacgccatctctgcgggcccgatccgcacgctggcggcgtccggtattaaagacttccgtaaaatgctggcgcattgtgaagccgttacgccaattcgtcgcaccgtgaccattgaagatgtgggtaactcagcggcgtttctgtgttccgatctctcggcaggcatttctggcgaagtcgtccatgttgacggcgggttcagcattgcggcaatgaatgaactggaactgaagtaa

SEQ ID NO: 9727 - DNA, 870 bp, Salmonella typhi
  CDS (1)...(870)
gtggaatattcaatattaagtaacaaccttaaaatgcctatggtgggttttggcgtttttaaggtaaccgacaaagaagaatgtcagcagtcagtgttaagcgctattcgcagcggttatcgtcttatcgataccgctgcggtatacggcaatgaagatgccgttggtgacgctgttcgtgaagccatcgcgacaggtctgtgtacccgtgaggagttatttattacttctaaactgtgggtgcaagatatggctaactacgatctggccaaagcaggtattgaagcgtcgctgaaaaaatccgggttagattattttgatctctatttattgcatcaggcaatgggcgattattttagcgcgtggcgcgcgctggaagacgcttatgaagccggtaaactaaaagccattggcgtgtccaacttctatgcgcatgtgttagccaacttctgtgaaaccgtcagaattacgccaatggtaaaccaggtcgaattgcatccatactttgcacaacccgccgcgctggaaaccatgaagcattataacgttcagcctgaagcgtgggcaccgttaggcggcgggagacataaaccgtatgaaaatgtcatgcttcaaaggattgccgatgcccatcaaaaaaccatcgcgcaggttgtcctgcgttggaacgtgcagcgtggcgtcacggttattcctaaatccactcgacaggaacgtattgaagagaactttgccatctgggatttctcactaacggataacgaaatggctcaaatcaacgcccttgatttaggctacgttggcgaagcggtgaagcattttaatcctgaatttgttcgcggttgtcttggcgttaaaatccacgattga

SEQ ID NO: 9728 - DNA, 3447 bp, Salmonella typhi
  CDS (1)...(3447)
atgcctgaaaaacaacgttacacgctgccgacaaaagcgggcgatcagcgccagttgggcgaacttaccggtgccgcctgcgctacgctggtggcggagatagctgaacgccatgccggtccggtggtactcatagcgcctgacatgcaaaatgctctgcgattgcatgatgaaatccgccagtttaccgatcagatggtcatgaacctggcggactgggaaacgctaccgtatgacagcttctccccgcatcaggaaattatctcttcgcgcctgtccacgctctaccagttgccgtcaatgcagcgcggcgtcttgattgtaccggtaaacaccctgatgcagcgcgtttgtcagcatagctatctgcatggtcatgcgctggtgatgaaaaaaggccagcggctgtcccgcgacgctctgcgcgcgcagcttgacagcgccggttatcggcatgtcgatcaggtgatggagcatggcgaatacgcgacgcgcggcgcgctgttggatctctttccgatgggcagcgaacagccttatcgcctcgacttttttgatgatgaaattgacagcctgcgtctgtttgacgcggatacccagcgtacgctggaggaggttgaggccatcaatttgttgcccgcgcacgaatttcctaccgacaaagccgctattgagcttttccgtagccagtggcgcgatacctttgaggtaaaacgcgacgccgagcacatctatcagcaggttagcaaaggcactctgcccgccgggatcgaatactggcagccgctctttttcagcgaaccgttaccgccattatttagctatttccccgccaatactctggtggtgaataccggctcgctggaaaccagcgccgaacgctttcaggccgatacgctggcgcgttttgaaaatcgtggcgtcgatcctatgcgcccgcttttgccgccggaagccctctggctacgggtggatgggctcttttccgagcttaaacgctggcctcgcctccagcttaaaaccgaccatctgccggaaaaagccgccaataccaatctcggtttccagaaattaccggatttggctatccaggcacagcagaaagcgccgctggacgcgctgcgtaagttcctcgaatctttcagcggtccggtgattttttcggtggaaagcgaaggacgccgcgaagctctgggagagctcctggctcgcataaaaatcgcgccgaagcgaatattacgcctggacgaggcgcaggatgcgggacgctatctgatgattggcgccgcagaacatggctttatcgacacccaacgcaatctggcgctgatttgtgaaagcgatcttttgggtgagcgggtggcgcgtcgccgcctggattcccgccgcacgatcaacccggatacgttgattcgtaacctggcggagctccacgtcggtcaaccggtagtgcatctggagcacggcgtcggacgctatgccggcatgaccactctggaggctggcggcatcaagggtgaatatctgatgctcacttacgccaatgacgccaaactgtatgtgccggtctcctcattgcatctgattagccgctatgccggcggcgcggaagaaagtgcgccgctgcataaactgggcggcgacgcctggtcgcgcgcccggcagaaagcggcggaaaaagtgcgcgatgtcgcagcggaactgttggatatttatgcgcaacgagcggcaaaagagggttttgcctttaagcatgatcgtgagcagtatcagttattctgcgacagcttcccgtttgaaacgacgcccgatcaggcacaggcgattaacgccgtattgagcgatatgtgccaaccgctggcgatggacaggctggtgtgcggcgacgtcggcttcggcaaaaccgaagtggcgatgcgcgccgcgttcctggcggtggaaaaccataaacaggtggcggtactggtgccgactacgctgctggcgcagcaacactatgacaacttccgcgaccgtttcgccaactggccggtacgcattgagatgctgtcccgctttcgcagcgccaaagagcagacgcaaatcctggcggaagccgccgaaggtaagatcgatattctgatcggtacgcataaactgctacaaagcgatgtgaagctacgcgacctcggcctgctgattgtcgatgaagagcaccgtttcggcgtgcgccacaaagagcgaattaaggcgatgcgcgccgatgtcgatattctgacgctcacggcgacgccgatcccgcggacgctgaatatggcgatgagcggtatgcgcgatctctccattatcgccactccccctgcccgtcgtctggcggtaaaaacctttgtccgcgagtatgatagcctggtggtaagggaagcgattctgcgtgaaatcctgcgcggcggtcaggtttactatttgtacaatgacgtcgaaaatattcagaaagccgcagagcggctggcggaactggtgccggaagcgcgaatcgctataggccacgggcagatgcgcgaacgtgagctggaacgggtcatgaacgatttccaccatcaacgttttaacgtgctggtgtgtactaccattatcgaaacggggatcgacattcccaccgctaacacgatcatcattgaacgcgcggatcatttcggcctcgcgcagttgcaccagctgcgtggccgcgtagggcgctcgcaccaccaggcctacgcctggctgttgacgccacatcctaaggccatgaccgccgatgcgcaaaaacggctggaggcgattgcgtcgctggaggatttaggcgccgggtttgcgctggcgacccacgatctggagatccgcggcgcgggcgagctgcttggcgaagagcaaagcggctcaatggaaaccattggcttctcactctacatggaattgctggaaaacgccgttgatgcgctgaaagcaggccgcgaaccctcgctggaagatctcaccagtcagcaaacggaagtcgagctgcgaatgccgtcgttactgccggatgattttattccggatgttaatacccggctgtcattctataaacgcattgccagcgcgaagaacgaaaacgagctggaagagatcaaagtggaattgatcgaccgcttcggcctgctgcccgatccggcgcgtaatctgctggatatcgcccgcctgcgccaacaggcgcaaaagctcggcatccgaaaactggagggtaacgagaaaggtggaacgattgagttcgccgagaaaaaccacgttgaccccgcctggcttatcgggttactgcaaaaacagccgcagcatttccgtctggatggcccgacgcgcctcaagtttattcaggatttaagcgaacgtaaaacgcgtatagactgggtacgccagttcatgcagcaactggaagaaaacgctattgcataa

SEQ ID NO: 9729 - DNA, 702 bp, Salmonella typhi
  CDS (1)...(702)
  misc_feature (1)...(702): n = A,T,C or G
atgaataagatcctgttgcaatgcgacaacctgtgcaaacgctatcaggaaggcaccgtacaaaccgacgtgttgcacgatgtcagcttcagtatcggcgaaggcgaaatgatggcgatcgtcggcagttccggttcgggtaaaagtacgttgctgcatctgttaggcgggctggatacgcctacctctggcgatgtgatttttagcggccagccgatgagcaaactctcttctgcggcaaaagcggaattacgtaaccagaaactggggtttatctatcagtttcatcatctcctgccggattttacggcgctggaaaacgtggcgatgccattattgattggcaaaaagaaaccggcggagattgacgctcgggcgcgagaaatgttgcatgctgtagggctggagcatcgcgcaacccatcgaccttcggaactttccggcggtgagcgccagcgtgtcgcgatagcgcgcgcgttggtgaataacccgcgtctggtactggcggatgagccgaccggtaatctggatgcgcgtaatgccgacagtatttttgagcttctgggcgagttaaatcgtctgcagggaaccgcgtttctggtggtgactcacgatttgcaactggcgaaacgtatgagccgncagcttgagatgcgcgatggccgcctgacagcggaactgagcctgatgggggctgagtaa

SEQ ID NO: 9730 - DNA, 1206 bp, Salmonella typhi
  CDS (1)...(1206)
atgatgaaaactcatcacctcattcgggtagtggcctcgctggcaatgttggcaacatcaggcctggcttatgctgaagagtacaaagccagcacggacgaaaaagcaataaaaatgacgaacgtagcctctctggaagcgcgcgttcaggccagaatggagaaaggggcatttggttatattcgcggtggagccgaagatgagaataaccttcgcagcaacaccgaaagctttgacaaaaaatatattatgccgcgcgtattacagggcattgagttaaaagagatcgatttatcaacgcagctactgggtattccgcttaaaacgcctataatccaggcaccgatggcggcgcagggcctggcccacgcctccggagagttggcgacggcgaaaggcatggcgcaggtcggttcgattttctcgttgagcacttatggcaacaagaccatcgaagaggtggctaacgtttccgggaaaaacccgttcttcttccagctttatatgagtaagaataatcaatttaacgaatttattcttgcacaagcggtaaaacatggcgctaaagcgattattctgaccgtagattcacctgtcggcggttatcgggaagaagatattaaaaataacttccagttcccgctgagttttgcaaacctggaaatgttcgccaggaaaaatgacgatggttcaaaaaccggcaaaggggcagggataagtgaaatttacgcgcaggctaaacaagcctttacgccggaggatattgcctatgtacatcgtatttccggtctgccggttattgtaaaaggcattcagtcgccggaggatgctgaaattgctatccaggctggggccgcaggaatatgggtttctaatcatggtggccgtcaattagacagcgggccgtcctcattcgatatgcttcctgcgattgcaaaagtcgtcaacaagcgagtgcctgttatttttgacagtggagtacgccgtggttcgcacgtattcaaggcgttagccagcggggcggatattgtggcggttggccgacctgtattatacggtcttaatcttggcggcgctcagggtgtggcatcagtgattgaacagctaaacaaagagctgacaattaacatgatgttgggtggcgccaggaatattgaacaagtgaaaacgacacgcttgttaactgaaaaagatctgccacagtaa

SEQ ID NO: 9731 - DNA, 1446 bp, Salmonella typhi
  CDS (1)...(1446)
  misc_feature (1)...(1446): n = A,T,C or G
atgacgatatgggaaaatgctatgcaatatcaattactgattaatggcgtgctggtggacggcgagggagaaaggcagtccgtttataacccggcgacaggcgaggtcatacttgagattgcggaagcgtcgcccgtgcaggttgacgccgcagtgctggccgccgatagcgcgtttgccgaatgggggcagaccacacccaaagcacgggcggaatgtctgttaaaactggcggacagcatcgagcaaaacgcccttgagttcgcccggcttgaatcgcaaaactgcggtaagcctttgcactgcgtaattaatgatgaaattccggcaatcgtggatgtctttcgcttttttgccggcgcggcccgttgtttgagtgggctggcggcgggcgaatatctggaaggacatacgtcgatgatccgccgggatccgattggcgtggttgcctctatcgcgccgtggaattatccgctcatgatggcggcctggaagctggcgccagcgctggcggcaggtaactgcgtggtgattaagccttctgaaatcacgccgctgacggcgcttaaacttgccgcgctggcgaaggatatctttccgccgggggtgctcaatgtcctgttcggacgagggcaaactgttggtgatgtattgaccggccatgaaaaagtacgcatggtctctttaaccggttctatcgcgaccggggagcatattctgcgccatactgcgccagcgataaaacgtacgcatatggaactcggtggtaaagccccggtgattgtttttgatgacgccgatctggatgcggtggcgcagggtgtccggactttcggtttctataatgccggacaggattgtactgcggcgtgccgtatatacgcgcagcgcggtatctatgatgcgctggtcgaaaagctagggaacgcggtgagcagcctgaaaatgggcgcgccggaggataagtcgacagagctggggccgttaagttcgctggcgcacctgaagcgcgtcacagcggctgtagaggaggcgaaggccctcagccatatccgtgtgattactggtggaagtcaaacggaaggtaaaggttactatttcgctccgacgttgctggcagacgcaaaacaggaagatgccatcgtgcaacgcgaggtcttcggcccggtggtcagtataaccgtctttgatgatgaagatcaggttctgaggtgggccaacgattctcgctatggtctggcatcctccgtctggactcaggacgtcnggcgggcgcaccggcttagcgccagattgcagtatggctgtacctggattaatacccatttcatgttggttagcgaaatgccgcatggagggcaaaaacagtcgggatacggcaaagatatgtcattgtatggtctggaagactacacccttgtccgccacatcatggttaagcattaa

SEQ ID NO: 9732 - DNA, 1068 bp, Salmonella typhi
  CDS (1)...(1068)
atggattatgccaggcatgaggagaatagaatgaagcaacagaccaaccgaaatcgtcgttgggttttggcctcgcgtccccacggcgcgccgcagatggataacttccgcctcgaagaagatgacgtcgcgacgcccggtgaagggcaggtgctattgcgtaccgtttttttatcactcgacccttatatgcgtggccgcatgagcgatgaaccctcttatgcgccgccagttgaacctggctgcgttatggttggcggtacggtcagtcgcgttgtcgcgtcgaatcatcctgattaccgaccagacgaatgggtgttgagttacaatggttggcaggattatgacatttcagatggcgaagggttggtaaagctgggtgataatccgcaacatccttcctggtcgttgggagttttagggatgccggggtttaccgcctatatggggttactggatatcggccagccgaaagagggcgaaacgctggttgtcgccgccgccaccggccccgtaggcgcaacggttgggcaaattggcaagctgaagggctgccgggtcgtgggtattgccggcggcgcggaaaaatgccgtcatgcgacagacgttttgggatttgatctgtgccttgatcatcacgctgataatttcccacaacagcttgcgcaggcctgcccgcagggtatcgatatctattatgagaatgtcggtggtaaagtctttgacgccgtcttaccgctactgaatacgtcggcgcggattccgctctgcggtctggtcagcggctacaatgcgacaacgttgccggacggtccagacagactgccactgctgatggcgacattacttaaaaagcgtattcgcctgcaaggttttatcatcaaccaggactatggtcaccggatacatgagtttcagcaagaaatggggcgttggatcaaagaagggaaaatacattaccgggagcagattactgatgggctggaaaatgcgccagaagcgtttatagggctgctggcggggaagaactttggcaaagtcgtgatacgtttagcggacgatgcgtaa

SEQ ID NO: 9733 - DNA, 1401 bp, Salmonella typhi
  CDS (1)...(1401)
gtgaggggtaaaatgacacgacaaaacgagaattataaccgttatctcttgagtgactggcgacccgaaaatccagccttctgggagaataaagggaaaggcatcgccagaagaaacttatggatttcagtaagttgtttgctccttgcattttgcgtctggatgttgtttagcgctgttgccgtcaacctcaataaaattggatttgattttacgaccgaccaactctttttattaaccgcattaccttctctttccggcgcaatattacgcgttccctactcctttatggtaccactgtttggtggtcgtaaatggaccgtattaagtaccgtaatattgattattccttgcgcctggctgggattcgccgtgcaaaatcctgccacccctttcggggtatttatactcatcgctctgttgtgcggttttgcgggggcaaatttcgcgtccagtatgggcaacatcagttttttctttccaaaagccagacaaggtagcgcgttgggtattaacgacggactgggaaatcttggcgtcagtgtgatgcagttgattgcgccgctggttatttttttgccgatatttacttttttaggcgtccggggcgtgccgcaacctgatggctccctgctcgccctcactaacgccgcctggatctgggtgccgttactggctgttgcgacgcttgccgcctggtttggtatgaacgatatcggcagttcaaaagcgtctgtcgcctcgcaattgccggtgctaaaacgtctgcacctgtggctgcttagcctgctgtacctggcgacattcgggtcattcatcggcttttccgcaggtttcgccatgctcgccaaaacgcaatttcccgacgtaaacattctgcaactggcgttctttggcccctttatcggcgcgctggcgcgatcggcaggcggcgtgatctccgataaattcggcggcgttcgcgtcacgctcattaattttatctttatggcgctgtttaccgccctgctattcctcacgctgccaggctccggcgcaggcagctttagcgcgttctatcttgtttttatgggcctgtttttgacagcgggtctcggcagcggttctaccttccagatgattgcggtgatcttccggcagatcacgctctacaacgtcaaactgcgcggcgggagcgatgagcaggcgcagcgcgaagcggtgacggataccgccgccgcgctcggttttatctccgctattggcgctgtgggcggcttctttattccaaaagcgtttggcacctctttggccttgaccggctcgccggtgggcgccatgaaaatctttttgctgttttacatcgcttgcgtcctgctgacctggctggtctacgggcgtcttaagcctaaacaacaataa

SEQ ID NO: 9734 - DNA, 1011 bp, Salmonella typhi
  CDS (1)...(1011)
atgaaagctgctgttgtcacacaagatcatcaggttgatgttactgagaaaacgctgcgtccccttcgccacggtgaagctttgctaaaaatggagtgctgcggtgtatgccataccgatctacacgtgaaaaacggagatttcggtgacaaaaccggcgttattctgggacacgaaggcattggcgtcgtggcggaagtcggtcctggtgtcacctcgctgaaacccggcgatcgcgcgagtgtcgcgtggttttatgaaggatgcggacactgtgagtattgcaatacgggcaatgaaaccttatgccgcaacgtgaaaaatgccggttacacggtagatggcggcatggccgaagagtgtattgtcgtcgcggattatgcggtgaaagtaccggaaggcctggactctgcggcggcaagtagtattacctgcgcgggcgttaccacctataaagcggtgaagatttctcatattaaacctggccagtggattgccatctacggtctgggcggtctgggtaatctggccttgcagtacgcgaaaaacgttttcaatgcgaaagtgatcgccattgatgtcaatgatgggcaactgaaactggccgaggaaatgggcgcagatctgaccattaattcacgtacggaagatgcggctaaaattgtgcaggaaaaaaccggtggcgcgcacgcagcggtggttaccgcggtcgctaaggcggcgtttaattccgcagtagatgccgttcgcgccggaggccgcgtggtggcagtcgggctgccgccagaagccatgaaccttgatatccctcgcctggtgctggatggcattcaggttgtcggttcgttggtggggacacgccaggatctgaccgaagccttccagttcgcggcggaaggaaaagtcgtgccaaaagtcgctttacgtccgcttgaagatatcaacgttatttttaaagagatggaacagggacaaattcgtggccgtatggtcatcgatttccgtcgttaa

SEQ ID NO: 9735 - DNA, 1026 bp, Salmonella typhi
  CDS (1)...(1026)
atgaaagtcaaagctgtgttcattaataagcctggtgaagttgaaacccgctgggtggattatccccataagaaagaaaatgaagtattaattaaggttgatgccgcaggcatttgcggatcggatatcggggcttttcgtggaacgaacccacttgttacttacccaagaattattgggcatgaagtgaccggaattgttcttcaggaaggcaccggaatgccggacaatattaaaaaaggcgaccgcgtgattgttgacccctatatttattgtggtcactgctacccttgctctgtcggcagaactaattgttgtgaaaatttaaatgtcattggcgtgcatatcgatggcgcaatgcaggaggtggttactcatcccgcacatttaattcataaaataccagataatgtgccttctgaaatggcgccgctggcagaaccgctgaccatcgctctacacgcgctgcatcgggcaaacgttaaggccggggaatatgttgccatcatcggcgcgggggccattggtcttatggcggcattaagcgcgcgtcattacaaggcaacgcctattctgatcgatattgtggaagaaaggctacgctatgcgcaaaagcttggcgttccttatgtactgaacgccgctgacgatcaggttatcgacgctattaaaaatatcacccacggcaccatggcgcaggtcgtgatagaagcctccggcgcaaatagcgctattcgaaatacgcttgatttagcatcgtttgctggtcgtatttcgtttaccggatggccaaaacaggaaacgtcgctgccgacgaacctgatcacctacaaagaactggatttacgcggctcccgcaccagtgccggtgaatttgatgaggcattacgcatgctgtcaacgctggagattaatccgcaagatgttgtcagtaaggtcgtcaatcttgatgagatccctgatgcagttaaagaacttgatcgctatccggagcgttacttaaagattaatgctgttttccattga

SEQ ID NO: 9736 - DNA, 1230 bp, Salmonella typhi
  CDS (1)...(1230)
atggataaactacttgagcgttttttacactacgtatcgctggatacccaatcaaagtcgggtgttcggcaggttcccagcactgaggggcagtggaagttactacgtttgctcaaacagcagctcgaacagatggggctggttaacattacattaagtgaaaaagggacgttgatggcgacgctcccggccaatgttgagggggatattcccgccattggttttatctcccatgtggatacctctccggatttcagcggtaaaaacgttaacccgcagattgtcgagaattatcgcggcggcgatatagcattagggattggcgatgaggtgttgtcacccgtgatgttcccggtactgcatcaattactgggacagacgctgattactaccgatggtaagacattgctgggcgcggacgataaagccggtgttgcggagatcatgaccgcgctggcggtgctgaaaggtaatcctattccccacggcgaaattaaagtggcgtttacgcctgacgaagaggtagggaaaggcgcgaagcacttcgatgttgaggaatttggcgcgcagtgggcctatacggtcgacggcggcggcgtgggagaactggagtttgaaaacttcaatgccgcctcggtgaatatcaaaatcgtcggcaataacgtgcatcctggtacggcgaaaggcgtgatggtcaatgcgctgtcgttggcggcgaggattcacgcggaagtgccggcggatgaagcgcctgaaaccactgaaggttacgaagggttttatcatctggccagcatgaaaggcaccgttgaccgggccgaaatgcactacatcattcacgatttcgaccgtaagcagtttgaagcgcgtaaacgcaaaatgatggagattgccaaaaaagtcggcaaggggctgcatccggactgctatatcgaactggtgattgaagacagttattacaatatgcgcgaaaaagtggttgagcatccgcatattctcgatatcgcccagcaggccatgcgcgactgtcatattacgccggagatgaaaccaattcgcggcggtacagacggggcgcaactgtcgtttatgggcctgccgtgtcctaatctctttaccggcggatataactatcatggtaaacatgagtttgtgacgctggaggggatggaaaaagcggtacaggtgattgtacgtatcgcggagctgacgggtaagcgcggccagtag

SEQ ID NO: 9737 - DNA, 1149 bp, Salmonella typhi
  CDS (1)...(1149)
  misc_feature (1)...(1149): n = A,T,C or G
atgataaaactggaaaatctcaccaaacaatttgtacagaaaaagggtcagccgctaaaagccgtcgacaacgtcaacctgaacgtgccggaaggcgaaatgtgcgtcttactcggtccctccggctgcggcaaaaccaccacgttaaagatgatcaaccggctgatcgcgcccagcagcggtaatattcttatcaacggcgagaataccaacgatatggatacggtaacgctacgccgcaatattgggtatgttatccaacagatcggcctgtttcctaatatgacgattgaagaaaatattaccgttgtgccgcgcatgttgggttgggacaaagcgcgctgcaagcaacgcgccgaagagttgatggacatggtggcgctggatgccagaaaatttctgcatcgctatccaaaggagatgtccgggggacagcaacagcgtattggcgtgatccgcgctctggccgccgatccgccggtactgctgatggatgagcccttcggcgcggtggaccccattaaccgcgaagtgatccagaaccagtttctggatatgcagcgtaagctaaaaaagaccgtgatgctggtcagccatgatatcgacgaagcgctaaaactcggcgaccgtatcgccgtgttccgtcaggggcgaattgtacagtgcgccagtcctgatgaactgctggccaagccggctaacgagtttgtcgggtcgtttgtcggtcaggacagaacgttaaagcgtatgctactggtctccgcaggcgatgtgaccgaccaacagccaaccattaccgnncggccttccatgccgttaagcgaggcgttcggcattatggatgatcacgatattcgcgccnttaccgtcattgacaacgacggtaagccactgggatttgtgaagcgccgggaggcgcggaacgccagcggaatctgcgccgatatcacccatcctttccgtattacgggcaaagcggaagataatctgcgtattgtgctgtccagattgtacgaaagtaataccagctggatgccgatcgttgatgaagacggacgctataacggtgaaatctctcaggattacatcgccgattatctcagctcaggccgcactcgtcgggcgctaaatattcacgaaagcagctaa

SEQ ID NO: 9738 - DNA, 1530 bp, Salmonella typhi
  CDS (1)...(1530)
  misc_feature (1)...(1530): n = A,T,C or G
atgcgaattggcataccaaaagagcggttacccaatgaaacccgtgtcgctgcgacgccgaaaacggtagagcagctactgaagctggggtttagcgtcgctatcgaaagcggggcgggtcaactggcaagttttgacgacaaagcgtttgcgcaggctggcgcggatattgtagacggcaatgctatctggcaatcggaaattattctcaaggttaatgcgcctgaagaagaggaaatcgctttactgaaccccgggactacgctggtcagttttatctggcctgcgcaaaatcctgggttaatggagaaacttgccgaacgtaaggttacggtgatggcgatggactccgtgccgcgtatttcccgcgcgcagtcgctcgacgcgttaagctcaatggcgaatatcgcgggttatcgcgccattgtagaggccgcgcatgaatttgggcgcttctttaccgggcaaatcactgccgccgggaaagtgccgccggcgaaggtgatggtgattggcgcgggcgttgccggtcttgcggctatcggcgcggcaaacagcctgggggcgattgtccgcgcgtttgacactcgtcctgaagtcaaagagcaggtccagagtatgggggctgagttcctcgaactggattttaaagaggaagccggtagcggcgatggttacgccaaagtgatgtccgaggcgtttatcaaagcggaaatggcgctcttngccgcccaggccaaagaagtcgatatcattgttaccaccgcgttgattccgggcaaacgtgcgccgaagctgattacccgcgatatggtcgattctatgaaggccggcagcgtgattgtcgacctggccgcgcagaacggcggtaactgcgaatataccgtcgccaatcaggttgtgacgacggacaatggcgtaaaagtgattggctacaccgatctaccggggcgtttgccgacgcagtcatcccagctttatggcaccaacctggttaacctgctgaagctgctgtgcaaagagaaagacggcaatattgacgtggattttgacgatgtcgtgatccgtggcgtgacggtgattcgtgacggcgacattacctggcctgcgccgccaatccaggtttccgcgcagccacaggccgcgcctaaagcagcacctgcgccaaaagagccggaaaagcccgcttccccctggcggaagtatgcgttaatggcgctggcgatcattctttttggctggctggccgatgtcgcgccaaaagagttcctcggccattttaccgtgtttgcgctcgcctgcgtggttggttattacgtggtgtggaacgtgtctcatgcgcttcatacgccattaatgtcggtgaccaacgcaatttcagggattattgttgtcggggcattattgcaaattggtcagggcggctgggtcagcttcctgagctttatcgcggtgcttatcgccagcattaatattttcggtggcttcaccgtgactcagcgtatgctgaaaatgttccggaaaaactaa

SEQ ID NO: 9739 - DNA, 1371 bp, Salmonella typhi
  CDS (1)...(1371)
atggaattatcctcactgaccgccgtttcccctgtcgatggacgctacggcgataaagtcagcgcgctgcgcggaatttttagcgaatacggtttgctgaaatttcgtgtacaagtcgaagtacgttggctgcagaaattagccgcgcacgcagcgatcaaggaagttcctgcttttgctgccgacgcaaacggttacctggatacgcttgtggcaaacttcaatgaagaagatgccgcgcgcattaaaaccattgagcgcaccacgaatcacgatgtgaaagcggttgagtattttctgaaagaaaaagccgccgcgatcccggcgctacatgacgtttccgaatttatccactttgcctgcacctctgaggatattaacaacctgtcgcacgcgttaatgctcaaaactgcgcgcgatgaagtgatcctgccttactggcgtcaggtgattaacgcggttaaagatctcgccacgcagtatcgcgatattcctctgctctcccgcacccacggccagccggcaacaccttccactctgggtaaagagatggcgaacgtggcgtatcggatggagcgtcagttccgccagctcaatcaggtggagatcctcggtaaaattaacggcgccgtaggcaactataacgcgcatatcgccgcctatccggaagttgactggcatcagttcagcgaagagttcgtcacctcgctgggcatccagtggaacccttacaccacccagattgaaccgcatgattatattgcggaactgtttgactgtatcgcgcgctttaacaccatcctgatcgatttcgatcgcgatgtctggggctatattgcgttgaaccatttcaaacagaaaaccatcgccggagagatcggttcttctaccatgccgcataaagttaaccccattgactttgaaaactcagaaggcaacctcggtctgtctaatgcagtgttgcaccatctggcaaacaaactgccggtttcccgctggcagcgcgatctgaccgactcaaccgtcctgcgtaacctgggtgtcggcatcggctatgcgcttatcgcttatcagtcgaccctgaagggcgtcagcaagctggaagtgaaccgcgatcatctgcttgacgaactggatcacaactgggaagtattagccgaaccgatccagaccgtcatgcgccgctatggcattgaaaaaccatatgaaaaactgaaagagttgacccgtggcaagcgtgtcgatgccgaaggaatgaaacagcttattgatagtctggccctgccggaagcagaaaaaacgcgccttaaagccatgacgccggcaaattatatcggtcgcgctgtgaatctggtcgacgaacttaaataa

SEQ ID NO: 9740 - DNA, 1152 bp, Salmonella typhi
  CDS (1)...(1152)
  misc_feature (1)...(1152): n = A,T,C or G
gtgatagaatacgccgccttgaagttcaatgtcgcgagtattccaatgtcagaaagcccaaaaaaagtgatcgtcggcatgtccggcggtgtcgattcctccgtttccgcctggctgttgcaacaacagggttatcaggtagaaggcctgttcatgaagaactgggaagaggacgatggtgaggaatactgcaccgcggcagccgatctggctgacgcgcaggccgtgtgcgacaagcttggcattgaactgcataccgttaattttgccgcagaatattgggataacgtctttgaactgttccttgaagagtacaaagcgggccgtacgccgaatccggatattctgtgcaataaagagatcaaatttaaagccttccttgaatttgccgcagaagatttaggcgccgactatatcgccaccggtcactacgttcgccgcgcggatgtaaacggcaaaagccggttgttgcgcgggctcgacggtaacaaagatcagagctacttcctctatacgcttggccatgagcagattgcgcaaagtctgttcccggttggcgagctggaaaaaccgcaggtgcgtaaaatcgccgaagatttggggctggtaaccgccaagaaaaaagattctaccggtatctgctttatcggcgagcgcaaattccgcgactttttanggcgctatctgcctgcgcagccggggaaaatcattactgttgacggcgatgaaatcggcgagcatcagggtctgatgtatcatacgctcggtcagcgtaaagggctgggaattggcggcaccaaagacggtagcgaagacccctggtatgtggtggataaagacgttgaaaacaatgtgttaattgtcgcccaggggcatgagcacccacgcctgatgtcggtaggcctcatcgcccagcagctacattgggtcgatcgcgaaccgttcaccggcaccctgcgctgtacggtaaaaacccgctaccgccagaccgatattccgtgcacgattaacgcgctggatgacgatcgtatcgaggtcatttttgacgagccggttgccgccgttacgccgggccagtccgctgtcttttacagcggagaagtctgcctgggcggcggcattatcgagcagcgactgccgctgacggtctga

SEQ ID NO: 9741 - DNA, 1251 bp, Salmonella typhi
  CDS (1)...(1251)
atggaaagcaaagtagttgttccggtggaaggtaagaagatcaccctgcaaaacggcaaactcaacgttcctgagaatccgattatcccgtttattgaaggcgatggtatcggtgttgatgtcactccagccatgcttaaagtggtcgatgccgccgtcgagaaagcctataaaggcgagcgtaaaatttcctggatggaaatttacaccggagaaaaatccacacaggtttacggccaggatgtctggcttcccgctgaaacccttgatttaattcgtgactaccgcgtagcgattaaaggtccattgaccacgccggttggcggcggtatccgctctctgaacgttgccctgcgtcaggagcttgacctgtacgtttgtctgcgtcccgttcgttactatcagggcacgccaagtccggtgaaacatccggagctgaccgatatggtcatcttccgtgaaaactctgaagacatctacgccggaattgaatggaaagctgactctgcagacgctgagaaagtgatcaagttcctgcgcgaagagatgggcgtgaagaaaattcgcttcccggagcactgcggtatcggtatcaaaccgtgttctgaagaaggcactaaacgtctggttcgcgcggcgattgaatacgctattaccaacgatcgcgattccgtcacgctggtacataaaggcaatatcatgaagttcaccgaaggcgcgtttaaagactggggctaccagttggcgcgcgacgagttcggcggtgagcttattgacggcggtccgtggctgaaaattaagaacccgaacacgggtaaagagatcgtggttaaagacgttatcgccgatgcgttcctgcaacaaatcctgttgcgtccggcggaatacgacgttatcgcctgtatgaacctgaacggtgactatatttccgatgccctggcggctcaggttggcggtatcggtattgcaccgggtgcgaatatcggcgacgaatgcgcgttgtttgaagcgactcacgggactgcgccgaaatatgcgggccaggataaagtcaacccaggctccattattctgtctgcggagatgatgctgcgccacatgcagtggttcgaagcggcggatctgattgttaaaggtatggaaggcgcgattgccgcgaagaccgtgacctatgactttgaacgcctgatggacggcgctaagctgctgaaatgtagtgagtttggcgacgcgattatcgcaaatatgtaa

SEQ ID NO: 9742 - DNA, 1434 bp, Salmonella typhi
  CDS (1)...(1434)
  misc_feature (1)...(1434): n = A,T,C or G
atgtggcagacatcaaatcaagaatcagaggtgtctatgagtcactcatccgccccggaaagggcaactggcgctgttatcacggaatggcgtccggaagatccggcgttctggcagcagcgcggccatcgtgtcgctagccgtaatttgtggatttctgtcccgtgtttactgctggcgttttgcgtctggatgctattcagcgcagtggcggtgaacctgccgaaagtgggatttaattttacgaccgatcagctctttatgttgactgcgctgccatctgtttccggcgcgctgctacnggtgccttactcctntatggtgccgctatttggcggacgtcgctggacagcgttcagtaccggtatcctcatcgtgccttgcgtatggttaggcttngccgttcaggataccagtacgccatttagcactttcattattatttccttgctgtgtggnttnnccggcgcgnantttgcctccagtatggcgaacatcagctttttctttcctaaacaaaagcagggcggcgcgctgggtctgaacggcggtctgggcaatatgggcgtgagcgtgatgcagctggntgcgccgctggtggtttcgctctctatctttgccgcctttggcagccacggtgtagagcagccggacggttctcagctctatctggcgaacgcagcctggatttgggtgcctttcctggccatttttacgctggcagcgtggttcggcatgaacgaactggcgacgtctaaggcctcgctaaaagagcaactgccggtgctcaaacgtggtcatctgtggatcatgagtctgctgtatctggcgaccttcggatcgtttatcggtttctccgcggggttcgctatgctgtctaaaacgcaattcccggatgtgcagatcctgcattatgcgtttttcggtccgtttatcggcgcgctggcgcgttcggcaggcggcgcaatttctgaccgtctgggggggactcgcgtcacgcttatcaactttgtcctgatggcgattttcagcggtctgctgttcctgacattacctactggcggcgttggcggtagctttatcgcattctacggggtatttctggcgctattcctgacggcggggctggggagtggttctaccttccagatgatctccgttatcttccgtaaactgacgatggaccgggtaaaagcggaaggcgggtcggacgaaagagccatgcgtgaagcggcgaccgatacggcggcggcgctgggctttatttccgcgattggcgcgattggcggcttttttattccgaaagcgtttggttcatctttagcattaaccggttcgccagtcggcgcgatgaaagtctttcttattttctatatcgcctgcgtcgttattacctgggcggtatatggacgtcattctaaaaataaaaagtaa

SEQ ID NO: 9743 - DNA, 3744 bp, Salmonella typhi
  CDS (1)...(3744)
  misc_feature (1)...(3744): n = A,T,C or G
atgagtaaattcctggaccggtttcgctacttcaagcagaagggcgaaacctttgccgatgggcacggccagcttctcgaaacaaaccgggactgggaggacggataccgccaacgttggcagcatgacaaaattgtgcgctcaacccatggggtgaactgcaccggttcttgtagctggaaaatttatgtcaaaaatggtctggtgacctgggaaacacagcaaaccgattacccgcgcacccgtcctgatatgccaaaccatgaacctcgcggctgcccgcgcggggcaagttactcctggtatctctacagcgctaaccgactgaaatatccgctaatgcgcaaacgtctgatgaagatgtggcgcgaggcgaaaaaactgcatcgcgatccggtagaggcatgggcctccatcattgaagatgccgataaagccaaaagcttcaaacaggcgcgtggtcgtggcggctttgttcgctcctcatggcaggaagtgaacgagctgatcgccgcttccaacgtgtacaccgtgaaaacctatggccctgnccgcgtngcgggcttctcacccattccggcgatgtcgatggtttcctacgcttccggcgcacgttatctttcgctgattggcggtacctgcctgagcttctacgactggtactgcgacctgccgccagcctccccgcaaacctggggcgagcagaccgacgtgccggaatccgctgactggtacaactccagctatattatcgcctggggctctaacgtgccgcaaacccgtacgccggatgcccacttctttaccgaagtacgttacaaaggcactaaaaccgtcgcggtgacgccggactatgccgaaatcgccaaactgtgcgatctgtggctggcgccgaagcaggggaccgatgcggcgatggcgctggcgatgggccacgtcatgctgcgcgagttccacctcgacaacccgcgccagtacttcaccgattatgtccgtcgctataccgacatgccaatgctggtgatgcttgaagagcgtgatggttattatgccgcaggtcgtatgctgcgcgctgccgatctcgttgattcgctggggcaggaaaataacccggaatggaaaaccgtcgctatcaacagcaacggtgaaatggtggcgccaaacggttcaattggtttccgctggggcgaaaaaggcaaatggaacctcgaacagcgcgacgggactaccggtgcagaaactgaattgcagctcagcttgctgggcagccaggatgagattgctgacgtgggcttcccgtatttcggcggcgagggttcagagtactttaatcatgtggcgctggataacgtcctgctgcataaactgccggcaaaacgtctgcaactggccgatggttcttcagcgttagtcactaccgtttacgatctgaccatggcgaactatggtctggaacgcggcctgaacgatgaaaattgtgccgccagttatgatgataccaaagcatatacgccagcatgggccgagcagatcaccggcgtgccgcgggcgcagatcatccgtatcgcacgggaattcgccgataacgcggacaaaacgcacgggcgttcaatgattatcgttggcgccggtctgaaccactggtatcacctcgatatgaactatcgcgggctgatcaatatgttggtgttctgtggttgcgttggtcagagcggcggcggctgggcgcactacgtcggccaggaaaaactgcgtccgcagaccggctggcagccgctggcgtttgcccttgactggcagcgtcccgcgcgtcacatgaacagcacctcttacttctataaccactccagccagtggcgctacgagacggtgaccgccgaggagttactgtcgccgatggcggacaaatcccgctatagcggccatctgattgacttcaatgtgcgcgccgaacgtatgggctggttgccgtcggcaccgcagttaggcaccaacccgctgtatattgcgcgtgaagcggaaaaagccggtatgacgccggtagattataccgtcaaatccctgaaagacggttcgattcgctttgccgccgagcagccggaaaacggtaaaaaccatccacgtaacctctttatctggcgttccaacctgcttgggtcttccggtaaaggtcacgagtatatgctgaaatatctgctgggtactgagcatggtattcaggggctggatctcggcaagcagggcggtgtgaagccggaagaagtggaatggcgtgacaatggcctggacggcaaactggatctggtggtgacgctggacttccgcctgtcgagcacctgcctgtactccgatatcgtactgccgaccgccacctggtatgaaaaagacgatatgaatacctcggatatgcatccgtttattcatccgctgtctgccgccgtagatccggcctgggaatcgaaaagcgactgggaaatctacaaaggcattgcgaagaaattctccgaagtctgtgtaggccacctgggtaaagagactgacgtcgtgacgctgccgatccagcacgactctgccgctgaactggcacagccgctggacgtgaaagactggaaaaaaggtgaatgcgatctgatcccagggaaaaccgcgccgcacatcatgaccgttgagcgcgattatccggccacctatgagcgctttacctctattggcccgctgatggagaaaatcggcaacggcgggaaagggattgcctggaacacgcagagcgaaatggacttgctgcgtaagctcaattacaccaaagcggacggtccggcgaaaggccagccgatgctcaacacggcgattgacgcggcagagatgatcctgacgttagcgccggaaaccaacggtcaggtggcagtgaaagcctgggcggcgctgagcgagtttaccggtcgcgaccatacgcatctggcaactaataaagaagaagagaaaatccgcttccgcgatattcaggcccagccgcgcaaaattatctccagcccgacctggtctggtctggaagatgagcatgtttcttataacgccggttataccaacgttcacgagctgatcccgtggcgtacgctgtctggtcgccaacagttgtatcaggatcaccagtggatgcgcgacttcggcgaaagtctgctggtgtatcgcccaccgatcgacacccgctcggtgaaagcggtgatggggcgtaaatccaacggtaatccggagaaggcgctcaacttcctgacgccgcaccaganatggggtatccactcgacctacagcgataacctgttgatgctgaccttgtcgcgtggcggcccgattgtatggatgagtgaaaccgacgccaaagagctgggcattgaagataacgattggatcgaagtcttcaacagcaacggcgcattgaccgcacgcgcagtggtcagccagcgtgtaccggcgggcatgaccatgatgtaccacgcgcaggaacgtatcgtaaacctgccggggtcggaaattacccagcagcgcggcggtattcataactcggtgacgcgtattacgccgaaaccgacccatatgatcggcggctatgcgcagttagcctacggctttaactactacggtaccgtcggctccaaccgcgatgagtttgtggtggtacgtaagatgaagaacattaactggttggatggcgaaggcaatgaccaggtacaggagagcgtaaaatga

SEQ ID NO: 9744 - DNA, 669 bp, Salmonella typhi
  CDS (1)...(669)
atggtacaatcccgccaatctttatttcactcaggtgaggtcctgcgaccaatggcacagctatatttctactattcggcaatgaatgcgggtaagtcgactgcactgctgcaatcttcatacaattatcaggaacgcgggatgcgtaccgtcgtatatacggcggaaatcgacgatcgtttcggcgcaggcaaagtcagctctcgtatcggtttgtcgtcgccggcaaaattgtttaaccaaaatacatccttgtttgaagagattcgtgccgagagcgcgcggcagacaatacattgcgtgttagtcgacgaaagccagtttttgactcgccagcaggtttatcaattatccgaggttgtcgacaaattagatattccagtactctgctatgggctacgaacagactttcgtggggagctctttgtcggcagccaatacttgctggcatggtcagataagctggtggaattaaaaactatctgtttctgcggtcgtaaagccagtatggttttgcgccttgatcaggacggcaggccttataacgaaggcgaacaggtggttattggcgggaatgaacgctacgtttcagtttgccgtaagcattataaggacgcgctggaggagggctcactgacggcgattcaggagcgccatcggcacatatga

SEQ ID NO: 9745 - DNA, 2679 bp, Salmonella typhi
  CDS (1)...(2679)
  misc_feature (1)...(2679): n = A,T,C or G
atggctgttactaatgtcgctgaacttaacgcactcgtagagcgtgtaaaaaaagcccagcgtgaatatgccagtttcactcaagaacaggtcgacaaaatcttccgcgccgccgctctggcagccgctgatgcccgcattccgctggccaaaatggccgtcgccgaatcaggtatgggtatcgtggaagacaaagtgattaaaaaccacttcgcttctgaatatatttacaatgcctataaagatgaaaaaacctgcggcgtgctgtcagaagacgacaccttcgggaccatcaccattgctgaacctatcggcattatttgcggtatcgttccaaccactaacccgacctctactgcgatcttcaaatcgctgattagcctgaagacccgtaacgccatcatcttttctccgcatccgcgcgctaaagaagcaactaacaaagcggcagacatcgttctgcaagcggctatcgctgccggcgcaccgaaagatctgattggctggatcgatcaaccttccgtagaactgtctaatgcgctgatgcaccacccggatattaacctgatcctcgccactggcggtccaggcatggttaaagctgcatacagctccggtaaaccggcaatcggcgtaggcgcaggtaacaccccggttgtcattgatgaaaccgctgatatcaaacgcgctgtggcgtctgttctgatgtctaaaaccttcgataacggcgtaatctgtgcttctgaacagtctgttgtcgttgttgattccgtctatgatgccgttcgcgaacgtttcgccagccacggcggctacatgctgcagggccaggagctgaaagcggttcaaaacgttattctgaaaaatggcgctctgaacgccgctatcgtcggtcagccagcctacaaaatcgctgaactggcaggcttctccgtaccagaaaccaccaagattctgatcggtgaagttacggtcgttgacgaaagcgaaccgttcgcacacgaaaaactgtctccgactctagcgatgtaccgtgcgaaagatttcgaagaagcggtagaaaaagcagaaaaactggtcgctatgggcggtatcggtcacacctcctgcctgtacactgaccaggataaccagccagaacgcgttgcttacttcggtcagatgatgaaaaccgcgcgtatcctgatcaacaccccggcctctcagggtggtatcggtgacctgtacaacttcaaactcgcaccttccctgacgttgggttgtggttcctggggtggtaactccatctctgaaaacgttggtccgaaacacctgatcaacaagaaaaccgttgctaagcgagctgaanncatgtngtggcacaaacttccganatctatctacttccgccgtggctctctgcccatcgcgctggatgaagtgattactgatggccacaaacgtgcgctcatcgtgactgaccgcttcctgtncaacaacggctatgcanaccagatcacctctgtgctganagcggctggcgttgaaaccgaagtcttcttcgaagttgaagcagacccgacgctttccgttgttcgcaaaggcgctgagctggctaactccttcanaccggacgtgatcatcgcgctgggcggcggttccccgatggacgccgcgaaaatcatgtgggtcatgtacgaacatccggaaactcacttcgaagaactggcgctgcgctttatggacatccgtaaacgtatctacaagttcccgaaaatgggcgtgaaagcgaaaatgatcgccgtcaccaccacttccggtaccggttctgaagtcacaccgtttgcggttgtgaccgacaatgcaaccggtcagaaatatccgctggctgactatgccctgaccccggatatggcgatcgtcgatgccaacctggtgatggatatgccgaagttcctgtgtgcgttcggtgttctggatgcgtcaactcacgcgctggaagcttacgtatccgtactggcttctgagttctctgacggtcaggctctgcaggctctgaaactgctgaaagaaaacctgccggcgtcttaccacgaagggtctaaaaacccggttgcgcgtgaacgtgttcacagtgcagcgactatcgccggtatcgcgtttgccaacgccttcctcggtgtatgtcactccatggcgcacaaactgggctctcagttccacattccgcacggtctggcgaacgccctgctgatttgtaacgttatccgctacaacgcgaatgacaacccgaccaagcagaccgctttcagccagtacgatcgtccgcaggcacgccgtcgttacgctgaaattgctgaccacctgggcctgagcgcgccgggcgaccgtaccgccgctaagattgaaaaactgctggcatggctggaaagcattaaagctgagctgggcattcctaagtctatacgtgaagcaggcgtgcaggaagctgacttcctggcacacgttgacaaactgtctgaagatgccttcgatgaccagtgcaccggcgctaacccgcgttatccgctgatctccgaactgaaacagattctgctggatacctactacggtcgtgatttcaccgaaggtgaagttgcagcgaagaaagacgtcgttgccgcaccgaaagcagagaaaaaagcgaaaaaatccgcttaa

SEQ ID NO: 9746 - DNA, 1008 bp, Salmonella typhi
  CDS (1)...(1008)
  misc_feature (1)...(1008): n = A,T,C or G
atgagcttatcagaaaccgcaactcaggcgccgcaaccggcgaatgtactgctggaggtanacgatcttcgtgttacgttcgctacgcctgatggcgatgtgacggcggtcaacgatctgaactttacgcttcgcgctggagaaacgttaggtattgttggcgagtctggatcggggaaatcgcaaacggcgttcgcattaatgggactgctggcgacgaatggtcgaatcggcggttccgcgacctttaacggacgtgaaattcttaatctacctgagcgcgaactgaatacgctgcgcgcagaacagatttcgatgatttttcaggacccgatgacctcgctaaatccttatatgcgcgttggggagcagttaatggaagtcctgatgctgcataaaggaatgagcaaagcggaagcttttgaagagtccgtcagaatgctggatgccgtaaaaataccggaagcgcgcaaacggatgaaaatgtacccgcacgaattttccggcggaatgcgtcaacgtgtgatgattgcgatggcgctgttgtgcaggccgaaactgcttattgccgatgagcctaccaccgcgcttgatgttaccgtgcaggcgcagattatgaccttgcttaatgagctaaagcgcgaatttaataccgccattatcatgattacccacgatctgggcgtggtcgcgggtatttgcgataaggtcctggtaatgtatgccgggcgtaccatggaatacggtaaggcgcgcgatgtcttttatcagcccgttcatccgtattcgataggcttgcttaatgcggtgccgcgtctggatagcgagggggcggaaatgctgacgattccgggcaatcctcccaatttattgcgtttgcctaaaggttgtccgttccagccgcgttgtcctcatgcgatggagatctgcaataatgcgccgccacttgaagcgttcagtcctggtcgcttgcgcgcctgttttaaaccggtggaggaactgctatga

SEQ ID NO: 9747 - DNA, 774 bp, Salmonella typhi
  CDS (1)...(774)
  misc_feature (1)...(774): n = A,T,C or G
gtgatctgtgttagatcacttattacttcattgtgggtatattcatcacgcttttataaccataacgatggagcgggtatgaaaaaatttacagtggcggcactggcgttaacaactcttctctcaggcagcgcgttcgcgcacgaagccggagaattctttatgcgtgcaggtccggcaaccgtcagacctacagaaggggcgggtggtacgctggggcatttaaacgggtttgatgtgagtaataacacgcaactcggcctgacattcacttacatggcgacggacaatatcggggttgaattgctggcggccacgccgttccgccataaggtgggtacgggcgcgacgggtgatatcgccacggtccacctgttaccgccaacgttaatggcgcagtggtacttcggcgattccagcagcaaagtgcgtccttatgtcggcgtgggggtgaactacaccaccttcttcgataacgactttaacgataatggtaaaaagaccgggctgtccgatctgagctttaaggattcctgnggcgcggcagggcaagttggggtagattacctgattaaccgcgactggttaattggcgcctctgtctggtacatggatattgatactacagccaattataaaatgggcggcgtgcagcagcatgacagcgtgcgtctggacccatgggtatttatgttctcggcaggctancgtttctantcgcgtgangttgtgacgaaaaangacccngcnaggcggggtcaaaaanngacatga

SEQ ID NO: 9748 - DNA, 1596 bp, Salmonella typhi
  CDS (1)...(1596)
  misc_feature (1)...(1596): n = A,T,C or G
atggctgatattctgctgctcgataacatcgactcgtttacctggaacctggcagatcagctacggaccaacggtcataacgtggtgatttaccgtaaccatattccggcgcagacgcttatcgatcgcctggcgacaatgaaaaatccggtgctaatgctctcccccggtccgggcatnnccagcgaggcaggctgtatgccggagctgctgacccgactacgcggcaagttaccgatcatcggcatttgtctggggcatcaggcgattgtcgaagcttacggcggttatgtcggtcaggcgggagaaatcctgcatggcaaagcctccagcattgaacatgacggtcaggcgatgttcgccggtctggcgaatccgctaccggtcgcgcgttatcattcgctggtcggcagtaatgttcctgccgggctaaccattaacgcccatttcaacggcatggtgatggcggtacgtcatgatgcggatcgcgtttgcggttttcaatttcatcctgagtccatcctgacgacacagggcgcgcgtctactggagcaaacattagcctgggcgcagcaaaagctggaaccgaccaacaccctacagccaattctggagaaactctatcaggcgcaaactctgacgcaacaagagagccatcagttgttttcggcggtcgtccgcggcgaacttaagcctgaacagctcgccgccgcgctggtgagcatgaaaattcgcggcgagcatcccaatgaaattgccggcgccgccactgcgttgctggaaaatgccgccccgttcccgcgcccggactatctgtttgcggatatcgttggtaccggcggcgatggcagtaacagtatcaatatctctaccgccagcgcctttgtcgcggcggcctgtggactgaaagtggcgaaacacggcaaccgcagcgtatccagcaaatcggggtcatccgatctgttggcggcgttcggtattaatctggatatgaacgccgataaatcacgtcaggcgttagatgaactgggcgtctgtttcctgttcgcgccgaaatatcacaccggattccgtcacgcgatgccggttcgccaacagttaaaaacgcgaaccctgttcaacgtactcggcccgctgatcaacccagcgcatccgccgctggcattgattggcgtctatagcccggaactggtgctgccgattgcggaaaccttacgggtactgggctatcagcgcgcggcggtggtacatagcggcggcatggatgaggtttcgctccatgcgccgacgattgtcgcggagctgcatgacggcgaaattaaaagctatcaacttacggcggaggattttggcctgacgccttaccatcaggatcagttggctggcggcacgccggaagaaaaccgtgacattctgacgcggttattacaaggtaaaggcgatgccgcgcatgaggccgccgtcgccgccaacgtggcgatgctgatgcgtctgcatggtcaggaagatctcaaggccaacgcgcaaaccgtgcttgatgttctgcgcaacggcaccgcatatgacagagtcaccgcactggcggcaagagggtaa

SEQ ID NO: 9749 - DNA, 903 bp, Salmonella typhi
  CDS (1)...(903)
gtgaaggcgacacctgaaggaagctctatgagcgaaaagttacaaaaagtgctggcgcgcgctggccacggctctcgccgtgaaatcgaatccattattgaagcgggacgtgtcagcgttgacggtaaaatcgccacgcttggcgatcgtgttgaagtcactcccggtttgaaaatccgtatcgacggtcacctgatttcggtgaaagagtcggcggaacaaatttgccgcgttctggcctattacaaaccagaaggtgaactgtgtacccgcaatgaccctgaagggcggccaaccgtttttgatcgcttaccgaaactgcgcggcgcgcggtggattgcggtaggacgtctggatgtcaacacctgcgggctattgttgtttaccaccgacggtgaactggcgaaccgcctgatgcatcctagtcgcgaagttgaacgtgaatatgccgtgcgcgtgttcggtcaggtggatgaatcgaaactgcgtgatttaagccgtggcgtacagttggaagatggtccggcggcatttaagaccattaaattcagcggcggcgaaggcattaaccagtggtataacgtgacgctgacggaagggcgcaaccgcgaagttcgccgactgtgggaagcggtaggcgttcaggtcagccgtctgatccgcgttcgttacggcgatatcccgctgccgaaaggcctgccgcgcggcggctggactgagctcgacttcgcgcaaacgaactatctgcgtggtctggtagagctcccgccggaaacctcgtcgaaggttgccgtcgaaaaagaccgtcgtcgtatgaaagcgaaccagatccgtcgggcggtaaaacgccacagccagatagctggcggacgccgctccggtgggcgtaataacaacgggtaa

SEQ ID NO: 9750 - DNA, 2604 bp, Salmonella typhi
  CDS (1)...(2604)
  misc_feature (1)...(2604): n = A,T,C or G
gtgaatatgggtaaagctcttgtcatcgttgagtccccggcaaaagccaaaacgatcaacaagtatctgggtaatgactacgtggtgaaatccagcgtgggtcatatccgtgatttgccgaccagtggctcagcagctaaaaagagcgccgactctacctccaccaaaacggctaaaaagcccaaaaaggatgaacgtggcgctctcgtcaaccgtatgggggttgacccgtggcacaactgggatgcgcactatgaagtgctgcccggtaaagagaaggtcgtctctgaactgaaacagttggcggaaaaagccgaccacatctatctcgcaaccgaccttgaccgcgaaggggaagccattgcatggcacctgcgggaagtgatcggcggcgatgacgcgcgctacagtcgcgtagtctttaacgaaataaccaaaaatgccattcgccaggcgtttgaacagccgggcgagctgaacattaacagggtcaacgcccagcaagcgcgccgctttatggaccgcgtggtaggctatatggtctcgccgctgctgtggaaaaagatcgcccgtggtttgtcggcaggtcgcgttcagtctgtcgcggtccgtctggtcgttgagcgcgagcgcgagattaaagcgtttgttccggaagagttctgggagattgacgctaatacgacgacgccgtctggcgaggcactaccgctacaggtcacgcatcagaacgacaagccattccggccggtaaatcgcgagcagacgcttgccgccgtcagcttgttggaaaaagcgcgctatagcgtactggagcgtgaagacaaaccgaccagcagcaaacctggcgcgccgtttatcacctccacgctacaacaggcggccagcacccggctgggctttggcgtgaagaaaaccatgatgatggcgcagcgtctgtatgaggcgggctacatcacctatatgcgtaccgactccaccaacctgagtcaggatgcggtcaacatggtgcgcggctatattggcgataatttcggcaagaaatacctgccggataacccgaaccaatacgccagcaaagaaaactctcaggaagcgcacgaagcgatccgtccttccgacgttgctgtcatggcggagtcgctgaaagacatggaggctgacgcgcagaagttgtatcagctaatttggcgtcagtttgtcgcctgtcagatgacgccagcacaatatgactccactacgcttaccgttggcgcaggcgaattccgtctgaaagcgcgtgggcgtattttgcgctttgacggctggacaaaagtgatgccggcgctgcgtaaaggcgatgaagatcgcacattgcctgccgtgaataagggcgatgcgctgacgctacttgaattgacgcctgctcagcactttactaaaccgccagcccgtttcagcgaggcttctctggttaaagagcttgagaagcgcggtattggtcgtccgtctacctatgcgtcgattatctcgaccattcaggatcgcggctatgttcgcgttgaaaaccgtcgcntctatgcggaaaaaatgggtgaaatcgtcaccgaccggctggaagaaaacttccgcgaattgatgaactacgatttnnccgcgcanatgnaagatagtctggatcaggttgcgaatcaccaggccgagtggaaagcggtgctggataacttcttcagcgattttactcagcagctcgataaagccgagaaagatccggaagaaggggggatgcgtcctaaccagatggtgctgaccagcatcgactgtccaacctgtggccgtaaaatgggaattcgtactgccagtacgggggttttccttggttgttcaggttatgcgctttcgccgaaagagcgttgtaaaacgaccattaacctggtgccggaaaatgaagttctgaacgtgctggaaggcgacgacgccgaaaccaacgccctgcgcgccaaacgtcgctgtcagaagtgcggtacggcgatggacagctatctgatcgatccgaagcgtaaattgcatgtgtgtggtaataacccgacctgtgacggctacgagattgaagaaggcgagttccgcatcaaagggtatgacggcccgatcgttgagtgtgagaaatgtggttccgaaatgcacctgaaaatggggcgttttggtaagtacatggcctgtactaacgacgaatgtaaaaatacccgtaanatnttgcgtaacggngangnngcgccgccgnaggaagatcctgttccattgccggaactgccgtgtgaaaaatcggacgcgtactttgtgctgcgcgatggcgccgcanggatattcctggcggccaatacgttcccgaaatcacgtgaaacgcgcgcgccattagtcgaggagctttaccggttccgcgatcgcntgccggaaaaantgcgttatctggcggatgcgccgcagcaggatccagaaggcaataaaaccgttgttcgctttagccgcaaaacaaaacagcagtacgttgcggcggaaaaagacgggaaggcgacgggatggtcagcgttcttcgtcgacggcaagtgggttgaaggtaagaaataa

SEQ ID NO: 9751 - DNA, 1281 bp, Salmonella typhi
  CDS (1)...(1281)
gtgattgtcggcggcggcgctggcgggctggaaatggcgacgcagttaggccataaactggggcgcaagaaaaaagcgaaaatcacgctggtagacagaaatcacagccatctgtggaaaccattgctgcacgaagtggcgactggctctctggacgaaggcgtggatgcgctgagctatctggctcatgcgcgtaatcatggtttccagttccagctggggtcggtgatggatatcgatcgcgaagcgaagaccatcaccattgccgagttgcgtgatgaaaagggcgaactgctggtgccggagcgcaaaatcgcgtatgacacgctggtgatggcgctgggcagcacctctaatgatttcaacacgccgggcgtgaaagagcactgtatcttcctcgataacccgcatcaggcgcgccgttttcaccaggagatgctgaacctgttcctcaagtattcggctaacctgggcgcgaacggtaaggtcaatatcgccatcgttggcggcggtgcgacgggggttgagctgtcggctgaactgcataatgcggtaaaacagctgcatagctatggttataaggggctgaccaacgacgcgttgaacgtgacgttggttgaggctggcgagcgtattctgcctgcgttgccgccgcgtatctccagcgccgcgcataatgaactgaccaaactgggcgttcgcgtactgacgcaaactatggtcaccagcgccgacgaaggcggtctgcatacgaaagaaggtgaatatattcaggccgatctgatggtgtgggcggcgggtatcaaagcgccagattttatgaaagaaattggtggtctggaaacgaaccgcattaaccaactggtggtggaaccgacgctgcaaaccacgcgtgatcctgatatttatgcgattggcgactgcgcttcctgcgcacgtccggagggaggttttgtgccgcctcgcgctcaggcggcgcatcagatggctacctgcgcgatgaataacattctggcgcagatgaatggcaagccgctgaaagcttaccagtataaagatcatggatcgctggtctctctgtccaacttctctaccgtgggtagtctgatggggaacctgacccgcggttcaatgatgattgaaggacgtatcgcccgcttcgtgtatatctcgctataccgtatgcaccagatagcgctgcatggatactttaaaaccggcctgatgatgctggtgggcagtattaaccgcgtcattcgtccgcgcctgaaactgcattaa

SEQ ID NO: 9752 - DNA, 930 bp, Salmonella typhi
  CDS (1)...(930)
  misc_feature (1)...(930): n = A,T,C or G
gtnaatggatctctccctctttacgctttgcgtatgtctgggcctcgttttactgatcgtgtggtaaatatgtcgttaaaaacaataaaatatttttctactctcattgtcgccgtcgtcgccgttctggccgcgtggtggttatggaattactatatgcagtcaccgtggacgcgcgatggtaaaatccgcgcggaacaggtcagcgtaacgccacaggtttctggcagcattacccaactcaatatcaaagataatcagttcgtcaacgctggggacgttctctttgtcattgataaaacgcccttccatattgcagaacttaacgcgcaggcacagttggccaaagcgcagtccgatctggcaaaagcgaataatgaagccgatcgacgtcgacatttatcgcgtaactacatctctgctgaagatctggatagcgccaatctgaatgttaaagcgatgcaggccagcgtagatgtcgcactggcaacgttaaaacaggcgcagtggcagcttagccagacggaagtaaaagcgccggtatccggctgggtgaccaacctttccacgcgtaccggtgattatgctagcaccggtaagccacttttcgccctggtagatagccattcattttatgtaatgggatatttcgaagaaaccaaactacgccatatccgcgaaggtgagcctgcattaataacactgtatagtggcaatgttaagttacagggtcacgttggcagtatcgggcgcgctatttacgaccaaagcgtggaaagtgactccggtttagtgcccgatatcaaacccaacgtaccgtgggtacgtctggcgcaacgcgtaccggtacgtatcgaatttgacgctttgccgcaggatatcacgctcgtctccggcactacctgcagcgtagccattggacagcggtaa

SEQ ID NO: 9753 - DNA, 1287 bp, Salmonella typhi
  CDS (1)...(1287)
atggagattttgatggcaagcagtaacttgattaaacaattgcaagagcgggggctggtagcccaggtgacggacgaagacgcgttggcagagcgactggcgcaaggcccgatcgcgctctattgcggcttcgatcctaccgctgacagcttgcatttggggcatctggttccattgttatgcctgaaacgcttccagcaggcagggcacaaacctgttgcgctggtaggcggcgcgaccggtctgattggcgacccgagctttaaagccgccgagcgtaaactgaacactgaagagaccgttcaggagtgggtggcgaaaattcgtaaacaggttgccccattcctggactttgattgcggcgaaaactccgccatcgcggccaataactatgactggttcggcagcatgaatgtgctgactttcctgcgcgatatcggtaaacatttttccgttaatcagatgatcaacaaagaagcggtgaagcagcgtctgaaccgtgacgatcagggtatctctttcacggagttctcttataacctgctacaggggtacgacttcgcttgtctgaataaactgcacggcgttgccttacagattggcggttctgaccagtgggggaacatcacttccggtatcgacctgacccgtcgcctgcaccagaatcaggtatttggtttgaccgttccgctgattaccaaagctgacggcacgaaattcggtaaaaccgaaggcggcgctgtctggctggatccgaagaaaaccagtccgtacaaattctaccagttctggattaacaccgcagatgccgatgtttatcgcttcctgaaattcttcacttttatggacattgaggagatcaatgccctggaagaagaagataaaaacagcggtaaagcgccgcgcgcgcagtatgtactggccgagcaggtgacgcgcctggttcatggtgaagaggggctggtcgcggcgaaacggatcactgaatgcctgttcagcggttcactgagcgcgctgagcgaagctgactttgagcagttggcccaggacggcgtaccgatggttgaaatggaaaaaggcgccgacctgatgcaggcgctggtagacgccgaactccagccgtcacgtggtcaggcgcgtaagactatcgcctccaacgctgtcactatcaatggtgaaaaacaatccgatcctgaatacatctttaacgatgaggaccgtctgtttggccgctataccttattacgtcgcggcaaaaagaactattgtctgatttgctggaaataa

SEQ ID NO: 9754 - DNA, 600 bp, Salmonella typhi
  CDS (1)...(600)
  misc_feature (1)...(600): n = A,T,C or G
atgaataagcaaaccgaacatgatacccgcgaacatctgctgnccaccggcgancagctttgtatgcaacggggttttaccggcatggggcttagcgagttgctcaaaaccgcccaggtacctaaagggtcgttttatcactactttcgctcgaaagaagcnttcggcgtcgccatgcttgagcgacattacgcctgctatcatcagcgtcttacggcgcacttcacctccggtcccggtaatcatcgcgatcgtcttctcgcctggtatcaggaaacgttaaagcagttttgccagcaaggcgccatcagcggttgcctgacggtgaaactgtcagcggaagtctgcgatctgtcggaggatatgcgctctacgatggataaaggggcgcaggagatcatggcactgcttgcacgcgcgctggaagatggccgtaatagccactgtttacatttcaccggccagccgttgccacaggcgcaggtactttatgccctgtggctgggcgccaatttgcaggccaaaatatcccgtagcgccgcgccgctggaaaatgcgttggcgcatgttaagaccatcattgcaacgcctgagcagtaa

SEQ ID NO: 9755 - DNA, 2856 bp, Salmonella typhi
  CDS (1)...(2856)
atggaaaagacatataacccccaagatatcgaacagccgctttacgagcactgggaaaagcagggctatttcaagcctaacggcgacgaaagcaaagagtccttctgcatcatgatcccgccgccgaacgtcaccggcagtttgcatatgggacatgctttccagcaaaccatcatggataccatgatccgttaccagcgtatgcagggtaaaaacaccctgtggcaggtcggcaccgaccacgccgggatcgcaacccagatggtggttgagcgcaagattgccgctgaagaaggtaaaacccgtcacgactacggccgcgatgcgtttatcgacaaaatctggcagtggaaagcggaatccggcggcaccattacccgtcagatgcgccgtctcggcaactccgttgactgggagcgcgagcgcttcaccatggacgaaggcctttccaatgccgtgaaagaagtctttgtccgcctgtacaaagaagacctgatttaccgtggcaaacgcctggtgaactgggatccgaagctgcgcaccgccatctctgacctggaagtggaaaaccgcgagtccaaaggctcgatgtggcacatccgctatccgctggccgacggcgcgaaaaccgcagacggtaaagattacctggtcgtcgccaccacccgtccggaaaccgtactgggcgataccggcgtggccgtgaacccggaagatccgcgttataaggatcttattggcaaattcgttattctgccgctggttaaccgccgcattccgattgtgggcgacgaacacgccgatatggaaaaaggtaccggctgcgtgaagatcaccccggcgcacgactttaacgactatgaagtcgggaaacgtcacgccctgccgatgatcaacatcctgacctttgatggcgacattcgcgaaagcgcggaagtgttcgataccaaaggtgaagagtctaacgtttattccagcgagattccggctgagttccagaagctggaacgctttgctgcccgtaaggccatcgttgctgccgttgacgcgctgggcctgctggaagaaattaaaccgcacgatctgaccgtcccttacggcgaccgtggcggcgtagttatcgaaccgatgctgaccgaccagtggtacgtccgtgcagacgtgctggcgaaaccggcggtggaagcggttgaaaacggcgacattcagttcgtgccgaagcagtacgaaaacatgtacttctcctggatgcgcgatattcaggactggtgtatctctcgtcagctgtggtggggtcaccgtatcccggcatggtatgacaacgacggcaacgtctacgttggccgtaccgaagacgaagtgcgtcaggaaaataacctcggtgccgacgttcagcttcgtcaggacgaagacgttcttgatacctggttctcctccgcgctgtggaccttctccaccctcggctggccagaaaacaccgacgccctgcgtcagttccatcccaccagcgtgatggtgtccggcttcgatatcatcttcttctggattgcccgcatgatcatgatgaccatgcacttcatcaaagatgaaaacggcaagccgcaggtgccgttccatactgtctacatgaccggtctgattcgcgacgacgaaggccagaagatgtccaaatccaagggtaacgttatcgacccgctggatatggtggacggcatctccctgccggaactgctggagaaacgcaccggcaacatgatgcagccgcagatggcggagaaaatccgcaagcgtaccgagaagcagttcccgaacggcatcgagccgcacggcaccgacgccctgcgctttaccctggcggcgctagcctcgaccggccgcgacatcaactgggatatgaagcgtctggaaggctaccgtaacttctgtaacaagctgtggaacgccagccgctttgtgctgatgaacactgaagagcaggattgcggcttcaacggcggcgaaatgaccctgtcgctggcggaccgctggatcctggcggaattcaaccagaccgttaaagcctaccgcgaagcactggataacttccgcttcgatatcgccgcaggcatcctgtacgagttcacctggaaccagttctgcgactggtatctggagctgaccaaaccggtaatgaccgggggttccgagtctgaactgcgtggcacccgccatacgctggtcaccgtgctggaaggtttgctgcgtctggcgcacccgatcattccgttcatcaccgaaaccatctggcagcgcgtgaaggttatctgtggcattaccgccgataccattatgctgcagccgttcccggaatataacgccgcgcaggtggatgaagccgcgttggccgataccgagtggctgaagcaggcgatcgttgccgtacgtaacattcgtgcggaaatgaacatcgccccgggcaaaccgctggaactgctgctgcgcggctgtagtgaagaagccgttcgtcgtgttaacgacaaccgtagcttcctgctgaacctggcgcgtctggaaagcatcaccgtgctgccagccgatgacaaaggtccggtttccatgaccaaaatcatcgacggtgccgaactgctaatcccgatggcgggcctcatcaacaaagaagatgagctggcgcgtctggcgaaagaagtggcgaaaatcgaaggcgagattgcccgtatcgaaggcaaactgtccaacgaaggtttcgttgcccgcgcgccggaagcggtgatcgccaaagagcgtgagaagctggacggttatgcagaagccaaagcgaagctgattgagcagcaggcggttattagcgcgctgtaa

SEQ ID NO: 9756 - DNA, 1512 bp, Salmonella typhi
  CDS (1)...(1512)
  misc_feature (1)...(1512): n = A,T,C or G
atggagttcagtgtaaaaagcggtagcccggaganacagcggagtgcctgcattgtcgtgggcgtctttgaaccgcgtcgcctttctccgattgcagaacagctcgacaaaattagcgacggatacatcagcgcattgctgcgtcgcggcgaactggaaggaaaaccggggcagactctgttgctgcaccatgttcctaacgttctttccgagcgaatcctcctcattggttgcggcaaagagcgcgagcttgatgaacgtcagtataagcaggttattcagaaaacgataaatactctgaatgatactggttcgatggaagccgtctgtttcctgaccgaactgcacgttaaaggccgcaacaactactggaaagtgcgtcaggccgtcgaaacggccaaagagacgctttatagctttgatcaactcaagaccaacaagagcgagccgcgccgcccgctacgtaagatggtctttaatgtgccgacccgccgtgagctcaccagcggcgaacgcgccattcagcacggtctggccatcgccgccgggattaaggctgcgaaagatctcggcaacatgccgcccaatatctgtaacgccgcctacctggcgtcacaggcgcgccagttggccgacagctacagcaaaaatgtcatcacccgcgtgatcggcgaacagcaaatgcgcgaactgggtatgaacgcttatctggcggtcggccacggttcgcagaatgaatcgctgatgtcggtgattgagtacaagggcaatccgtccgaagacgcgcgcccgatcgtgctggtaggtaaaggcctgaccttcgactccggcggcatctccatcaagccatctgaagggatggacgagatgaagtacgacatgtgcggcgcggcggcggtttacggcgtgatgcgtatggtcgccgagcttaagcttccgattaacgttatcggcgtactggcgggctgtgaaaacatgccgggcggacgcgcttatcgccctggcgacgtgctgaccactatgtctgatcaaaccgttgaagtcctgaacaccgacgccgaaggccgtctggttttgtgcgacgtgctgacctacgttgagcgcttcgaaccggaagcggtcattgacgtcgcgacgctaaccggcgcctgcgtgattgcgctgggccatcacattaccggtctgatgtcgaaccataacccgctggcgcatgaactgatcggcgcgtccgagcaagcgggcgaccgcgcgtggcgtctgccgctgggcgatgagttccaggaacaactggagtccaactttgcggatatggcgaacattggtggtcgtcctggcggcgctatcaccgcgggctgcttcctgtcgcgctttacccgtaagtacaactgggcgcacctggatatcgccggtaccgcctggcgttccggtaaagccaaaggtgccaccggtcgtccggtagcgctgctgtcgcagttcctgctcaatcgtgcgggctttaacggcgaagagtaa

SEQ ID NO: 9757 - DNA, 954 bp, Salmonella typhi
  CDS (1)...(954)
  misc_feature (1)...(954): n = A,T,C or G
atggtatttaaaggagacgttatggaaaacaaacgcacactggtcgtcgcgctgggcggcaatgcgctgctcaaacgcggcgaaccgctggaggctgatattcagcgtaaaaatatcgaactggcggccagaaccatcgcccagcttacccggcaatggcgcgtagtgttagtgcatggcaacggcccacagatagggctgctggcgctacaaaatagcgcctacgctaacgttacgccctacccgctcgatattctcggtgcggaaagccagtgcatgattggctacatgctgcaacaggcgctgaagaatcatctgccggagcgtgaaatcagcgtcctgctcacccaggtcgaagtcgatgccaacgacccggcattcctcaatccaaccaaatatatcggccccatntacgacgaagcgcaggcccgtgcgttacaggcagaaaagggctgggtattcaaagccgacggtaacgccttccgccgcgttgtgccctcctcgcagccgaaacgcattgtggaaaacgatgccatccgcgcgctgattagccgcgatcacctggttatctgtaacggcggcggcggtgtgccggtcgtggaaaaagccgatggctaccacggtatcgaggcggtgatcgacaaagatctgtccgccgccctgcttgccagccaaattcacgccgacgcgctgctcattctgaccgatgtcgacgcggtgtatctcgactggggcaaacccacccaacgcccgctggcgcaggttacgccggagctgcttcgtgaaatgcagttcgacgccggttcgatgggcccgaaagtgaccgcctgcgctgagtttgtcagccattgctgcggcattgccggaatcggctcgctggcggatgggcaagccattctcgcgggcgagaaaggtactttgattcggtgtgaaaccgccgacgttgacgcataa

SEQ ID NO: 9758 - DNA, 1260 bp, Salmonella typhi
  CDS (1)...(1260)
atggcgtggaatcagcccggtaataacggacaggaccgcgacccgtggggaagcagcaaacctggcagcaactctgggggaaatggaaacaaaggtggccgcgatcagggacctcccgatctggatgatatcttccgtaagctgagtaaaaaactcggtggttttgggggcggtaaaggcaccggttccggcggcggtagctcatcgcaaggcccgcgtccgcaactgggaggccgtattgtcgccatcgccgcggcggcagtagtcattatctgggcggccagcggtttttataccattaaagaagccgagcgcggcgttgtgacgcgttttggtaaattcagccatctggtagagccaggtctgaactggaagccgacatttattgacgacgtcacgccggtgaacgtcgaagcggtgcgcgaactggcggcgtcaggcgtgatgctgacgtctgatgaaaacgtcgtgcgcgttgaaatgaacgtgcaataccgcgtcaccgatccgcagaaatatctgtttagcgtgaccagcccggacgatagcctgcgtcaggccaccgacagcgcgttgcgtggcgtcattggtaaatacacgatggatcgcattctgaccgaaggtcgtaccgttattcgtagcgatacccaacgcgagctggaagagactatcaaaccgtacaacatggggattaccctgctggacgtgaacttccaggctgcgcgtccgccggaagagatgaaagccgcctttgacgacgcgattgccgcacgtgaaaacgagcagcagtacattcgtgaagcggaagcgtataccaacgaagttcagccgcgcgccaacggtcaggcgcagcgtattctggaagaggcacgtgcctataaaacccagactatcctggaagcgcagggtgaagtcgcccggtttgcgaagattttgccagaatataaagccgcgccgcagattacgcgcgagcgtctgtatattgaaacgatggaaaaagtgctgagccatacccgtaaagtactggttaacgacaagagcggtaatttaatggtgctgccgttagatcagatgctgaaaggcgggaatgcgccggcggcaaagagcgacaatagcgccagcaacctgctgcgcctgccgccgtccacaaagtctaacgccagcggagcaagcaacacgtcgtcctcaaatcagggcgatattatggaccaacgccgcgcgaatgcgcagcgtaacgactaccagcgtcagggggaataa

SEQ ID NO: 9759 - DNA, 1299 bp, Salmonella typhi
  CDS (1)...(1299)
  misc_feature (1)...(1299): n = A,T,C or G
atgggtaacaacgtcgtcgtactgggcacccaatggggtgacgaangtaaaggaaagatcgtcgatcttctgactgaacgggctaaatatgttgtacgctaccagggcggtcacaacgcaggccatactctcgtaatcaacggtgaaaaaaccgttctccatcttattccatcaggtattcttcgcgagaatgtaaccagcatcatcggtaacggtgttgtgctgtctccgagcgcgctgatgaaagagatgaaagaactggaagaccgtggcatccccgttcgtgagcgtctgctgctgtctgaagcctgtccgctgatccttgattatcacgttgcgctggataacgcgcgtgagaaagcgcgtggcgcgaaagcgatcggcaccaccggtcgtggaatcgggcctgcttatgaagataaagtggcacgtcgcggtctgcgtgttggtgaccttttcgacaaagaaacctttgctgaaaaactgaaagaagtgatggaatatcacaacttccagttggttaactactacaaagctgaagcggttgattaccagaaagttctggatgatacgatggctgttgccgacatcctgacttctatggttgttgacgtttcagacctgctcgaccaggcgcgtcagcgtggcgatttcgtcatgtttgaaggtgcgcagggtaccctgctggatatcgaccacggtacttatccgtacgtaacttcttctaacaccactgcgggtggcgtggcgaccggttccggcctgggcccgcgttatgttgattacgttctgggtatcctcaaagcttactccactcgtgtaggtgcaggtccgttcccgaccgaactgtttgatgaaaccggcgagttcctctgcaagcagggtaacgaatacggcgccactaccggccgtcgtcgtcgtaccggctggctggacaccgttgccgttcgtcgtgcggtacagctgaactccctgtctggcttctgcctgaccaaactggacgtgctggatggcctgaaagaggtgaaactctgcgtggcttaccgtatgccggatggtcgcgaagtgactaccactccgctggcagctgacgactggaaaggtgtagagccgatttacgaaaccatgccgggctggtctgaatccaccttcggcgtgaaagatcgtagcggcctgccgcaggcggcgctgaactacatcaaacgtatcgaagaactgaccggcgtgccgattgatattatttctaccggccccgatcgtactgagacgatgattctgcgcgatccgttcgacgcgtaa

SEQ ID NO: 9760 - DNA, 396 bp, Salmonella typhi
  CDS (1)...(396)
  misc_feature (1)...(396): n = A,T,C or G
atgcgtcattacgaaatcgtttttatggtccatcctgaccagagcgaacaggttccgggtatgatcgagcgttactctgctgccatcactggcgcagaaggcaagatccaccgtctggaagactggggccgccgtcagctggcttacccgatcaacaaactgcacaaagcgcactacgttctgatgaacgttgaagcgccgcaggaagtgatcgatgagctggaaactaccttccgcttcaacgatgccgttatccgcagcatggttatgcgtactaagcacgctgttaccgaagcatctccgatggttaaagcganagacgagcgccgtgagcgtcgcgatgatttcgctaacgaaaccgcagatgatgctgaagctggggattctgaagagtaa

SEQ ID NO: 9761 - DNA, 228 bp, Salmonella typhi
  CDS (1)...(228)
atggcacgttatttccgtcgtcgcaagttctgccgtttcaccgcggaaggcgttcaagagatcgactataaagatatcgctacgctgaaaaactacatcaccgaaagcggtaagattgtcccaagccgtatcaccggtacccgtgcaaaataccagcgtcagctggctcgcgctatcaaacgcgctcgctacctgtctctgctgccgtacactgatcgccatcagtaa

SEQ ID NO: 9762 - DNA, 450 bp, Salmonella typhi
  CDS (1)...(450)
atgcaagttattctgcttgataaagtagcaaacctgggtagcctgggtgatcaggttaacgttaaagcgggctatgctcgtaacttcctggtaccacagggtaaagctgttccggctaccaagaaaaacgttgaatacttcgaagcacgtcgcgctgaactggaagctaaactggctgacgttctggctgctgcaaatgcacgcgcagagaaaatcaacgccctggaaaccgttactatcgcgtctaaagcaggcgacgaaggtaaactgttcggttccatcggtactcgcgacatcgctgacgctgtgactgcagctggcgttgacgtggctaagagcgaagttcgtctgccgaacggcgttctgcgtaccactggcgaacacgaagtgaacttccaggttcacagcgaagtattcgcaaaagttatcatcaacgtggttgctgagtaa

SEQ ID NO: 9763 - DNA, 927 bp, Salmonella typhi
  CDS (1)...(927)
  misc_feature (1)...(927): n = A,T,C or G
gtgattatgcgtttccggcagttattacctctttttggcgcgctttttgccttgtacatcatttgggggtctacctattttgttatccgcataggcgttgaaagctggccgccgctaatgatggcaggcgtacgttttctctcggcggggatgttgctcatggcgtttttgctgttgcgcggcgaaaaacttccgccgctgcgccagaccatcaacgccgcgctgattggcctactgctgctggcggtgggtaacggtctggtgacggtggcggagcatcaaaacgtgccatcgggcattgctgccgtcgtggtcgccactgtcccgctatttacgctgtgctttagctacttttttggtattaaaacgcgcaaattagaatgggtggggattgccattggacttgccgggattattctgctgaacagcggcggtaatttaagcggcaatccgtggggcgcgattttgatcctgataggttcgatgagctgggcatttggttccgtttacggctcgcgcatcgccctgcctgtgggcatgatggcgggcgcgattganatgctggcggcgggcgtggtattgctttgcgcggcgtttctttccggcgaaaagctcgccacgctgcctggtttatcggggtttatggccgtcggctacctggcgttattcggttctattatcgccattaatgcctatatgtacctgattcgcaacgtcagnccggcgctggcgnccagctacgcctatgtgaatccggttgtcgccgtgttgcttggcactggcctnggcggtnagaggttatcgcccgttgaatgggccgcgctgggcgtgattgtgtttgccgtagtgctagtgactctgggtaagtacctgtttcccgccagggcggtgatcacaccgtgtaaaacggaagattcacgccagtag

SEQ ID NO: 9764 - DNA, 972 bp, Salmonella typhi
  CDS (1)...(972)
  misc_feature (1)...(972): n = A,T,C or G
atgagtaagatttatgaagataactcgctgactatcggtcatacgccgctggttcgactgaatcgtatcggtaatggacgcattctggcgaaggtggagtcgcgcaacccgagcttcagcgtcaagtgccgtatcggcgccaatatgatttgggatgccgaaaagcgtggcgtactgaaacctggcgtggaactggtggagccgaccagcggcaataccggtattgcgctggcgtatgtcgccgccgcgcgcggttacaaactcaccctgaccatgccggaaaccatgagcattgaacgccgcaagctactcaaagcattaggcgcgaatctggtgctgaccgaaggggcgaaagggatgaaaggcgctattcagaaagccgaagaaattgtcgccagcgatccgcaaaaatatctcctgctccagcagttcagcnnccctgccaacccggaaatccatgaaaaaaccaccggcccggaaatctgggaagacaccgatggtcaggtggatgtgtttatctccggcgtcggcactggcggtacgttaaccggcgtcacgcgttatatcaaagggacgaagggtaaaaccgatcttatcaccgttgcggtagaacccactgactccccggttatcgcccaggcgctggctggtgaagagatcaaaccgggcccacataaaattcagggcatcggcgcaggcttcatcccgggcaacctggatctgaaactgattgataaagtggttggcatcaccaatgaagaagccatttctaccgcgcgccgtctgatggaagaggaaggtattctggcgggaatttcttccggcgccgcggttgctgcagcgcttaagctgcaggaagatgaaagctttaccaataagaatattgtggttatcctaccctcatcaggtgagcgttatctgagcaccgcgttgttcgccgatctctttactgagaaagaactgcaacagtga

SEQ ID NO: 9765 - DNA, 1449 bp, Salmonella typhi
  CDS (1)...(1449)
  misc_feature (1)...(1449): n = A,T,C or G
atgatttcaggcattttagcatccccgggtatcgctttcggcaaagcactgctgctgaaagaagacgaaatcgtcattgaccggaaaaaaatttctgccgacaaggttgatcaggaagttgaacgttttctgagcggtcgtgccaaggcatctgcgcaactggaagcgatcaagacaaaagctggtgaaacgttcggtgaagaaaaagaagccatctttgaagggcatattatgctgctcgaagatgaggagctggagcaggaaatcatagccctgattaaagataagcacatgacggctgacgcagccgcacatgaagttatcgaaggtcaggccactgncctggaagaactggatgacgaatacctgaaagagcgtgcggctgacgtacgtgatatcggtaagcgcctgctgcgcaacatcctgngtctggccattatcgatctgagcgcgattcaggaagaagttatcctggttgccgctgacctgacgccgtcagaaaccgcacagctgaacctgcagaaagtgctgggcttcatcaccgacgcgggcggacgcacgtctcatacctccatcatggcgcgttctctggaactgccagcgatcgtaggtaccggtagcgtcaccgctcaggtgaaaaacggcgactatctgattctggatgccgtaaacaaccaggtttacgtcaacccgaccaacgatgttattgagcaactgcgcgccgtccaggagcaggttgcgaccgagaaagcggaactcgcaaaactgaaagatctgccggcaatcacgctggatggacatcaggttgaagtttgcgccaacatcggtaccgttcgtgacgttgaaggcgctgagcgtaacggcgcggaaggcgttggtctgtatcgtactgaattcctgtncatggatcgcgacgcgctgccgacngaagaagagcagtntgccgcctataaagcgttcgctgaagcgtgcggctcgcagacgatnatcgtccgtaccatggacattggcggcgacaaagagctgccatacatgtacttcccgaaagaagagaacccgttcctgggctggcgcgccgtgcgtatcgccatggatcgcaaagagatcctgcgtgaccaggttcgcgcgattctgcgtgcctccgctttcggtaaattgcgcattatgttcccgatgatcatctctgttgaagaagttcgcgcgctgcgcaaagagattgaaatctncaaacaggaactgcgtgacgaaggtaaagcatttgacgaaagcattgagattggcgtgatggtggaaacaccggctgcggcgacaattgcgcgtcatttagccaaagaagttgatttctttagtatcggcnccaatgatttaacgcagtacacnntggcagttgacngtggtaatgatatgatttcacacntttaccagccaatgtcnccgtcnngtanctga

SEQ ID NO: 9766 - DNA, 2016 bp, Salmonella typhi
  CDS (1)...(2016)
atggaaccaatcgaacaacaactgacagaactgcgaaccacgcttcgccatcatgaatatctgtatcatgtgatggatgcgcccgagattctcgacgccgaatatgaccgcctgatgcgggaactgcgagagctggaggcgcaacgtccggaccttatcacgccggattcgcccacgcagcgcgttggcgcggcgccgctgacggcattcaaccagattcgccatgaagtaccgatgctgtcgctcgataacgtatttgatgaagaaagcttcctggcgtttaacaagcgagtgcaggatcgtctaaaaagcacggaaaatgtcatctggtgctgcgagctaaaactggatggcctggcggtcagcattctgtatgaaaacggcgtgctggtgagcgctgcgacgcgtggcgacggcaccaccggtgaagatatcacttcaaacgtgcgcacgattcgcgccattccgttaaagctgcacggcgataacattccggcgcgtcttgaagttcgcggagaggtatttttaccgcagaccgggttcgaaaagatcaatgaagacgcgcgccgtactggcggcaaagtgtttgctaatccgcgtaacgcggcggcgggctcgttgcgtcagctcgatccgcgtattacggcgaagcgaccgctaacatttttctgctacggcgtcggtattctggaaggcggagagttgccggatacgcatctgggacggttgctgcaatttaaagcgtgggggttaccggtcagcgatcgcgtgacgctgtgcgattctccccaggcagtactggatttttatcacaacgtcgaaaaagatcgccccacgctcggttttgatatcgacggcgtggtgattaaggtcaactcgctggctttgcaggaacagctgggctttgtggcccgcgcgccgcgctgggcggtggcgtttaaatttcctgctcaggagcagatgacttttgtgcgcgacgttgagtttcaggtcgggcgcaccggggcgattacgccggtggcgcgtctagaaccggttcaggtggctggtgtgctggtcagcaatgccacgttgcataatgccgatgaaattgagcggcttggcttgcgcattggcgataaggtggttatccgtcgggcaggcgatgtgatccctcaggtggtcaacgtggttctgtccgaacgccctgaagagacgcgtccgattgtgtttccaacgcactgtccggtgtgcggatcggacgtagagcgcgtcgaaggcgaagccgttacccgttgtaccggcgggctgatttgcggcgcgcagcgtaaagagtcgctgaaacattttgtgtcgcgccgggcgatggatgtagacgggatgggcgataagatcatcgaccaactggtggaaagggagtatgtccatacgccagcggatctgttccgtctgacggcgggtaaactgaccggcctggaccgaatggggccaaagtccgcgcaaaatgttgttaacgcgctggaaaaagccaaagcgacgacttttgcgcgttttctctatgcgctgggcatccgtgaagtgggtgaagcgacggcggcggggctggcggcgtacttcggcacgctggaggcgctgcaggctgccaccattgacgagttgcagaaagtacccgacgtggggattgtggtcgctacgcacgtctttaacttttttgccgaagagagcaatcgtgacgtgattgggcagctactggcggaaggggttcactggcccgcgccggtagtcattaatgcgcaagagatcgatagcccgtttgccggtaaaaccgtggtactaaccggtagcctgagccagatgtcccgcgatgacgctaaagcgcgtttagtggctctgggcgcgaaagtggcaggcagcgtatcgaagaaaaccgatctggtgattgccggtgaagcggcgggctccaaactggccaaagcgcaggaactgggtattaccgtgattgatgaagcggaaatgatccgcttactgggtgcctga

SEQ ID NO: 9767 - DNA, 1536 bp, Salmonella typhi
  CDS (1)...(1536)
  misc_feature (1)...(1536): n = A,T,C or G
atgacaacgaactatatttttgtgaccggcggggtcgtatcctctctgggtaaaggcattgccgcagcctccctcgcagccattctggaagcccgtggtctcaacgtgaccatcatganactggatccgtacatcaacgtcgatccgggtactatgagcccaatccaacacggggaagtgttcgttactgaagacggcgctgaaaccgacctggacctggggcactacgagcgtttcatccgcaccaagatgtctcgccgcaacaacttcacgactggccgtatctactccgacgttctgcgtaaagaacgccgtggcgactatctgggcgcaaccgtacaggtcatccctcacatcactaacgcgattaaagagcgcgtgctggaaggtggcgaaggccacgatgtggtgctggtggaaatcggcggtaccgtcggtgatatcgaatcgctgccgtttcttgaggcgattcgtcaattggcggtagatatcggtcgtgaacacgcgctgtttatgcacctgacgctggtaccttacctggcggctgcgggcgaagtgaaaactaaaccgactcagcactccgtgaaagagctgctgtctatcggtattcagcccgatattctgatttgtcgttccgaccgtgcggttcctgccaacgagcgtgcaaaaattgcattgttctgtaatgtgccggaaaaagccgttatttcaatgaaagatgtcgattccatttataaaattccaggcctgttgaaatctcaggggcttgatgattatatttgtaaacgattcagcttgaactgtccggaagctaacctgtctgaatgggaacaggtcatttacgaagaagcgaacccggcaggcgaagtgactatcggcatggtcggcaaatatattgaactgccggatgcctataagtcggtgatcgaagcgctgaaacacggtggtctgaaaaaccgcgttaccgtcaacatcaaattgatcgattcgcaagatgttgaaacgcgcggcgtcgaaattctgaaagatttggacgctatcctgatccccggcggcttcggctatcgtggcgttgaaggtaaaatcgccactgcgcgctatgcgcgtgaaaacaatattccttatctgggcatttgcctggggatgcaggttgcgttgattgagttcgctcgtaacgtggccggcatggacaacgccaactcaacggaatttgtgccagactgtaagtacccggttgtggcgttaattaccgagtggcgcgatgaagacggtaacgttgaagtccgtagcgagaaaagcgatctgggcggcaccatgcgcctgggcgcgcagcagtgccagcttagcgatgacagcctggtacgtcagttgtacggcgcgtcgacgattgttgaacgtcatcgccatcgttacgaagtcaacaatatgttgttgaaacaaattgaagcagcgggtntgngtgtnncnggccgttccggtgatgatcagttagtcgagatcattgaggtaccgaatcatcngtggntcgtgncctag

SEQ ID NO: 9768 - DNA, 1299 bp, Salmonella typhi
  CDS (1)...(1299)
  misc_feature (1)...(1299): n = A,T,C or G
atgtccaaaatcgttaaagtcatcggtcgtgaaatcatcgactcccgtggtaacccgactgttgaagctgaagtacacctgnaaggtggtntcgtaggtatggcggcggctccgtcaggtgcttctactggttcccgcgaagcgctggaactgcgcgatggcgacaaatcccgtttcctgggtaaaggcgtaaccaaagctgttggcgcggttaacggcccgatcgctcaggctattcttggcaaagacgctaaagaccaggctggcatcgacaaaatcatgatcgacctggacggtactgaaaacaaatctaacttcggtgcaaacgccattctggctgtctctctggctaacgccaaagctgctgctgccgctaaaggtatgccgctgtacgagcacattgctgaactgaacggcacgccgggcaaatactccatgccggttccgatgatgaacatcatcaacggcggcgagcacgctgacaacaacgtcgacatccaggaattcatgatccagccggttggcgcgaaaacggttaaagaagccatccgtatgggttctgaagttttccatcacctggcaaaagtgctgaaaggcaaaggcatgaacaccgctgtgggtgacgaaggcggctatgcgccgaacctgggttccaacgctgaagcgctggctgttatcgctgaagcggttaaagcggctggttacgagctgggtaaagacatcaccctggcgatggactgcgcagcatctgaattctacaaagacggtaaatacgttctggctggcgaaggcaacaaagcattcacctccgaagaattcacccacttcctggaagaactgaccaaacagtacccgatcgtttccatcgaagatggtctggacgagtctgactgggacggttttgcataccagaccaaagtactgggcgacaaaatccagctggttggtgacgacctgttcgtaaccaacaccaaaatcctgaaagaaggcatcgagaaaggcatcgctaactccatcctgatcaaattcaaccagatcggttctctgaccgaaactctggctgcaatcaagatggcgaaagacgctggctacactgctgtcatctctcaccgttctggtgaaactgaagacgctaccattgctgacctggctgttggtaccgctgcaggccagatcaaaaccggttctatgagccgttctgaccgtgttgctaaatacaaccagctgattcgtatcgaagaagctctgggcgaaaaagcaccgtacaacggtcgtaaagagatcaaaggccaggcgtaa

SEQ ID NO: 9769 - DNA, 711 bp, Salmonella typhi
  CDS (1)...(711)
  misc_feature (1)...(711): n = A,T,C or G
atggcagccactttattggacgtttgcgccgtggtnccggcggccggatttggccgccgaatgcaaacagaatgtcctaancagtatctctcaatcggtaataaaaccattctggagcactcagttcatgcgctgctggcgcatcctcgggtgacacgcgttgttattgctatcagccctggcgatcatcgctttgcccaacttccgctggcgaatcatccgcaaatcaccgttgtggatggcggcaacgaacgcgctgattccgttttggccgggttacaggccgttgcaaaggcgcagtgggtgctgntgcacgacgcggcaagaccctgtttgcatcaggatgaccttgcgcggttactggccatcagcgaaaacagccgggtcggcggtattctcgccagtccggtgcgcgacaccatgaaacgcggcgaaccggggaaaaacgctattgcccataccgtagagcgcgccgatttatggcacgcgctcaccccgcagtttttcccccgcgaactcttgcacgattgtctgacgcgtgcgctgaatgaaggcgcgaccatcaccgacgaggcgtcagcgctggagtattgtggttttcatccggcgctggtagaaggtcgcgcggataacatcaaggtcacccgtccggaagatctggcgctggcggaattttatctgacccgaaccatccaccaggagaaagcataa

SEQ ID NO: 9770 - DNA, 897 bp, Salmonella typhi
  CDS (1)...(897)
atggaacaggatttagcgcgtattgagcagtttctggatgccctgtggctggaacgaaatctggcggaaaatacattaagcgcgtatcgtcgcgatttatcgatggtcgttgcgtggttgcatcatcgcggaaaaacgcttgcgacggcgcaggctgatgatttacaaacgctattggctgaacgggtggagggcggatacaaagcgaccagctccgcacgcctgttaagcgctatgcggcgctttttccagcatctgtaccgtgaaaagtatcgtgaggatgatccgagcgcacagttggcctcgcctaagcttccgcagcgtttaccgaaagaccttagcgaggcgcaggttgaacggctcttgcaggcgccgcttattgatcaacctttggagttgcgcgataaagctatgttggaagtgctgtatgccaccggtttgcgcgtgtcggaactggtggggctgacaatgagcgatatcagtctgcggcagggcgtggtgcgggttatcggtaaaggcaataaagagcggttggtgccgttaggcgaagaggcggtatattggctggaaacgtatctggagcatgggcgtccctggttactcaatggcgtatcgattgacgtattattccccagtcagcgtgcgcagcagatgacgcgacagaccttctggcaccgtattaaacattatgcggtactggctggaattgatagcgaaaaactatcgccgcatgttttacgtcacgctttcgccacgcatttgctgaatcacggcgccgacttgcgcgttgtacaaatgctacttgggcatagcgatctttcgacgacacaaatttatacgcatgtcgcaacggagcgtttgcgtcaacttcatcaacagcaccatccgcgggcatga

SEQ ID NO: 9771 - DNA, 2568 bp, Salmonella typhi
  CDS (1)...(2568)
  misc_feature (1)...(2568): n = A,T,C or G
atgaatgagtcatttgataaggacttctccaaccacacccccatgatgcagcagtatctcaagctgaaagcccagcatccggagatcctgctcttttatcgtatgggagacttttacgagctgttttatgacgacgcaaagcgtgcgtcgcagttgctcgatatttcgctgaccaaacgcggcgcatcggctggcgaacctatccctatggcgggtatcccgcaccacgccgtagaaaactacctcgcgaaactggtcaatcagggcgaatccgtcgctatttgcgaacagattggcgatccggccaccagcaaaggtcccgttgaacgtaaagtcgtgcgtatcgttacgcctggcaccatcagcgatgaagccctgttacaggagcgtcaggataacctgctggcggctatctggcaggatggtaaaggctacggttacgccacgctggatatcagctccgggcgctttcgtctgagcgaacccgccgaccgtgaaacgatggccgcagagctgcagcgcaccaatcccgccgaactgttgtatgccgaagattttgctgaaatggcgttaatagagggacgccggggtctgcgccgtcgcccgttgtgggagtttgagattgataccgcccgccagcagttaaatctgcaattcggtacgcgggatctggtcggtttcggcgtcgaaaatgcctcgcgtggattatgtgcggcaggctgcctgttacagtacgtaaaagatacccagcgcacctccctgccgcatattcgttccattacgatggaacgccagcaggacagcatcattatggatgccgcgacccgccgcaatctggaaattacccagaacctggccggcggtgtcgaaaataccctcgccgcggtgcttgactgtaccgtgacgccaatgggtagccgaatgcttaaacgctggctgcatatgccggtacgaaataccgacatattacgtgaacgccagcagaccatcggcgccttgcaggataccgtcagcgaactgcaaccggtgctgcgtcaggtcggcgatctggagcgcatccttgcgcgtctggcgctgcgcaccgcgcgtccgcgcgatctcgcccgaatgcgtcacgccttccagcagctgcnggaattgcacgctcagcttgaaaccgttgacagcgcgccggtacaggcgttgcgtaaaaaaatgggcgatttcgccgaactgcgcgacctcctggagcgcgccattattgacgcgccgccggtactggtccgcgacggcggcgttattgcgcccggctaccatgaagagctggatgaatggcgcgcgctggcggacggcgccaccgattatctcgatcgtctgganattcgcgaacgcgagcgtaccgggctggatacgctgaaagtcggctataacgcggtacatggttattacattcagattagccgtggtcaaagccatctggcgcccatcaattatgtgcgtcgccagacgctgaaaaatgccgaacgctacattattcctgagcttaaagagtacgaagataaagttctgacctcgaaaggcaaagcactggcgctggaaaaacagctatatgacgaattgtttgatctgctgttgccgcatctggccgatttacagcagagcgccaacgctctggcggagctggatgtgctggttaacctggccgaacgcgcctggacgctgaattacacctgcccaacatttaccgataaacccggtatccgtattaccgaaggtcgccacccggtggttgaacaggtactgaatgagccgtttatcgctaacccgctcaatctgtcgccgcagcgccggatgttgatcattaccggccccaatatgggcggtaaaagtacctatatgcgacaaacggcattgatcgccctgctggcctatatcggcagttacgttccggcgcaaaacgtggaaatcggccccatcgaccgtatttttacccgcgtcggcgcagcggacgacctggcttccgggcgttcgacctttatggtggagatgaccgaaaccgcgaacattctgcataatgcgacggaaaacagtctggtattgatggatgaaatcgggcgcggtacctccacgtatgacgggctgtcattggcctgggcctgcgcggagaatctcgcgaataagattaaagcgttaacgctgttcgctacccactacttcgagctgacccaattaccggagaaaatggaaggcgtggcgaacgtccacctggatgcgctggaacacggcgatactatcgcgtttatgcacagcgtgcaggacggcgcggcaagtaagagctatggcctggcggtcgcggcgcttgcgggcgtccctaaagaagtcatcaaacgcgcgcgccaaaaactccgcgagctggaaagcatctcgcccaatgcggcggcaacgcaggtggacggcacgcaaatgtcgttgcttgccgccccggaggagacatcgcccgccgttgaagcgctggagaatctcgatccggactccctgacgccacgccaggcgctggagtggatctatcggctgaaaagtctggtgtaa

SEQ ID NO: 9772 - DNA, 1734 bp, Salmonella typhi
  CDS (1)...(1734)
gtgaaacaacagagacaacttcgtcggcgcgaggctgatgagacggcggaactccccgccgatcttcctccattactacgacgtctatatgccagccggggcgttcgtagcgcccgcgaactggagcgcagcgtgaaaggaatgctgccctggcaacagcttagcggcatagataacgcggtggagatcctctacaacgcctttcgcgaaggtacccgcattattgttgttggcgattttgacgccgacggcgcgaccagtactgcgctaagcgtattgggaatgcgtgcgttgggatgtgacaacatcagttatctggtgcctaatcgctttgaggacggctacggtttaagcccggaagtggtcgatcaggcgaaggcgcgcggcgcacagcttatcgtcaccgtagacaacggcatttcatcccacgctggcgtagcgcatgcaaagacgttgaggattccggtgatcgtgaccgatcaccacctgcctggcgacacgttgccggatgccgaagcgattattaatcccaatctgcgcgactgcgaattcccgtctaagtcgctggcgggcgtcggcgtggcgttttacctgatgctggcgttgcgaacatttttgcgcgacaaaggatggttcgacgagcgcggcatcgcgccgccgaatctggcggagctgctggatttagtggcgttgggaacggtagcagacgttgtgccgctggacgccaacaaccgtattctgacctggcaagggctaagtcgtattcgtgccgggaaatgccgtccgggaattaaagcgttgctggagatatcgaatcgcgatccgcagcagcttgccgccagtgatttaggcttcgcgttggggcctcgtctgaatgccgccggcaggctggatgatatgtccgttggcgtggcgttactgttgtgcgacaacctcggcgaagcgcgtgttctggccagcgagctggatgcgcttaaccagacgcgcaaagaaatagagcaggggatgcaggcggaagcgcttatcctgtgcgaaaagcttgagcgcagtagtgaaacgcttccgggcggtctggcgatgtatcatcctgaatggcatcagggcgtggtcggaattctggcgtcgcgcattaaagagcgttttcaccgcccggtgatcgcctttgcacctgcgggcgacggcacgctaaaaggctcaggccgttcgattcaggggttgcatatgcgcgatgcgctggaaaggctggatacgctttaccctgatctgatgatcaagttcggcggtcatgcgatggcggcgggattgtcgctggaagagcataaattcgagcagtttcagcaacgttttggcgagctggtgacggaatggctcgatcctgccctgttgcaaggcgaggtgatctccgatggtccattaagcgcggcggagatgtctatggaagtggcgcaactgttgcgggatgccggaccgtgggggcaaatgttcccggaaccgttattcgatggtcgtttccgtctgctacaacagcgtctggtgggcgagcgccacctcaaggtgatggtggagcctgtcggcggcggcccgctgttggatggcatcgcatttaatattgatacgacctgttggccggataacggcgtgcgggaggtagaactggcttataaactggacattaacgagtttcgcggcaaccgtagtttacagattattatcgatgatatttggccgctatga

SEQ ID NO: 9773 - DNA, 249 bp, Salmonella typhi
  CDS (1)...(249)
atgaatatggatattgaagcaagagtcaaaaaagtgatcacctcctgtattgccgttgatgttgatagtatcaatggtcagacccatctggttgaggatctttacgctgactcattggatttaattgatattgtatttggtcttagtgaggagtttgacattagttgtaatgaaaacgatcttcctgatatgacgacctttgcggatatatgccgtgttgttaaaaaaagtcttgagtccagggtgtag

SEQ ID NO: 9774 - DNA, 987 bp, Salmonella typhi
  CDS (1)...(987)
  misc_feature (1)...(987): n = A,T,C or G
atgaatcncgtaataccttnaaaacccgttcgaagatcctgnccggtattcngccagtttatggttgctcgcggctttatggaagtcgaaacgccgatgatgcaggtgatcccaggcggcgcgtctgcccgtccgtttatcacccatcacaacgcgctggatctggacatgtanctgcgtatcgcgccagaactgtacctgaagcgtctggtggttggcggcttcgaacgcgtattcgaaattaaccgtaacttccgtaacgaaggcatctccgtgcgccataatcctgagttcaccatgatggaactctatatggcgtatgcggactacaaagacctgatcgagctgactgagtctctgttccgtacgctggcgcaggatgttctgggcaccacccaggttccatacggtgatgaagtgtttgacttcggtaagccgttcgaaaaactgaccatgcatgaagcgatcaagaaatatcgtccggaaacggatatggctgatctggacaacttcgactccgcgaaggcgattgctgaaagcatcggcattcacgtcgagaagagctggggtctgggccgtatcgtcaccgagatctttgacgaagtcgctgaagcgcatctgattcagccgaccttcatcaccgaatatccggctgaagtgtctccgctggcgcgtcgtaatgatgtgaacccggaaatcactgaccgcttcgagttctttatcggcggtcgtgaaatcggcaatggctttagcgagttgaacgatgcggaagaccaggcgcagcgtttcctggatcaggttaatgcaaaagcggcgggcgacgacgaagccatgttctacgacgaagactacgtgacggcgctggaacacggtttaccgccgacagcgggtctgggaattggtatcgaccgtatggtgatgctgtttactaacagccacacgattcgcgacgttattctgttcccggcgatgcgtccggtgaaataa

SEQ ID NO: 9775 - DNA, 873 bp, Salmonella typhi
  CDS (1)...(873)
atgtgtacgacttgcggttgcgctgaaggcaacctttatatagaaggcgatgaacataatccgcactcagcgtttcgtagcgcgccctttgccccagcggctcgcccggcgctgaatattaccggcattaaaacgcctgactttaccccaagtcagaccgcagaaggcgatctgcattacggccacggcgaagccggaacccacgcgcctggtatgagtcagcggcggatgctggaggttgaaatcgacgtgctggacaaaaataatcgtctggctgagcgcaaccgcgcccgtttcgccgcccgccagcaactggtgctcaacctggtgtccagccccgggtccggtaaaaccactctgctgaccgaaacgctgatgaaattgaaagaccgtgtaccgtgcgcggtgattgaaggcgaccagcagacagtgaacgacgccgcccgcatccgcgctaccggcacgcccgccattcaggtcaacaccggtaaaggctgccatcttgacgcgcaaatgatcgccgacgccgcgccgcgcctgccgctggatgaccacggtattctgtttatcgaaaacgtcggaaatcttgtctgcccggccagcttcgatctgggcgaaaagcataaagtcgcagtgctttccgtgaccgaaggtgaagataagccgctgaagtatccccatatgtttgccgcggcgtcgctcatgctgctcaataaagtcgatctgctgccctacctcaattttgacgttgagaagtgcatcgccagcgcgcgtgaagtgaacccggagattgaaattatcctgatttccgccaccagcggcgaaggcatggatcagtggctggcctggctggaggcgcagcgatgtgcatag

SEQ ID NO: 9776 - DNA, 2631 bp, Salmonella typhi
  CDS (1)...(2631)
atgagcaagagcaccgctgagatccgtcaggcgtttctcgactttttccatagtaaagggcatcaggtagttgccagcagttccctggtgcctaacaatgaccccactctgttgtttaccaatgccgggatgaaccagttcaaggatgttttccttgggctcgataaacgtaattattcccgtgcaaccacttcccagcgttgcgtacgcgcggggggtaaacacaacgatctggaaaacgtcggatacactgcacgtcaccatactttcttcgaaatgctgggcaacttcagcttcggcgattatttcaaacacgacgccattcagttcgcatgggaattactgaccggcgaaaactggtttgctctgccaaaagagcgcttatgggtcaccgtctatgaaaccgacgacgaagcctatgagatctgggaaaaagaagtcggcatcccgcgcgagcgtatcatccgtatcggtgacaataaaggcgcgccatacgcatcggataacttctggcagatgggcgacaccggtccctgcggtccgtgcaccgaaatcttctacgatcatggcgaccacatctggggcggccctccgggaagcccggaagaagacggcgatcgctatattgaaatctggaacatcgtctttatgcagttcaaccgtcaggctgacgggacgatggaaccattgccgaaaccgtctgtagataccggtatggggctggagcgtattgccgcggtactgcaacacgttaactctaactatgacatcgacctgttccgcacgttgattgaagcggtagcgaaagtcaccggctccaccgatttgggtaataaatcgctgcgcgttatcgccgaccacatccgttcttgcgcattcctggttgccgatggcgtgctgccgtcgaatgaaaaccgtggctatgtgctgcgtcgcattattcgtcgcgcggttcgtcacggcaacatgctgggcgcaaaagagaccttcttctacaagctggttgggccgctgattgaggtaatgggctccgcaggcgaagagttgaaacgtcagcaggcgcaggtcgagcaggttctgaaaacggaagaagagcagttcgctcgtacgctggagcgcggtctggcgctgctggatgaagaactggcgaaattgcagggcgacaccctggacggcgaaaccgctttccgtctgtatgatacttatggtttcccggtcgatctaacggcggacgtctgccgtgagcgcaacatcaaagtcgacgaagccggttttgaagccgccatggaagagcaacgccgtcgcgcgcgcgaagctagcggttttggcgcggactacaacgcgatgatccgcgttgacagcgcttctgaatttaaaggttatgaccatctggaactgaacggcaaagtgactgcgctgtttgtcgatggtaaagcggttgaagcgattaacgcgggacaggaagctgttgtcgtgctggatcagaccccattctatgcggaatcaggcggtcaggttggcgataaaggcgagctgaaaggcgctggatttactttcgctgtggacgacacgcaaaaatatggtcaggcgattggtcacctcggcaaattgtctgcgggcgctctgaaagtgggcgatgcggtacaggctgacgtagatgaagcgcgccgcgcacgtatccgtctgaaccactccgccacgcacctgatgcacgcggcgttgcgccaggtgcttgggacacacgttgcgcagaaaggttcgctggttagcgataaagtgctgcgcttcgacttctcgcacaatgaagcgatgaagccgtcggagattcgtgaggttgaagatttggtgaatgcgcaaattcgccgcaacgtgccgattgaaacgaacatcatggatctcgacgcggcgaaggcgaaaggggccatggcgctgtttggcgagaaatacgacgaacgtgtacgcgttctgagcatgggcgatttctctaccgaactgtgcggcggtactcacgccagtcgtaccggtgatatcggtctattccgtattatctctgagtccggcaccgcagcgggcattcgtcgtattgaggcggtaaccggtgaaggcgctatggccaccgttcacgcgcaaagcgatcgcttaaacgatattgcgcatctgctgaagggcgacagccagaatctgggcgacaaagtgcgtgccgtgctggaacgtacgcgtcagctggaaaaagagttgcagcagttgaaggaccaggccgcagcgcaggagagtgcaaatctttccagtaaagcggtcgatctcaacggcgtgaagctcctggtcagcgagcttgctggtattgagccgaaaatgctgcgaaccatggttgatgatctgaaaaatcaactggggtctaccgttatcgtactggcaacggttgttgaaggtaaggtttctctgattgcgggcgtgtcgaaggatgtgaccgaccgggttaaagcaggggaattgattggtatggtcgctcagcaggtgggcggtaagggtggcggtcgtccggacatggcgcaagccggtggtacggatgcggcagctctgcctgcagcgttagccagtgtacaaggctgggtcagcgcaaaattgcaataa

SEQ ID NO: 9777 - DNA, 1095 bp, Salmonella typhi
  CDS (1)...(1095)
atggcccaacagacgcctttgtacgaacaacacacgctatgcggcgcccgcatggtcgattttcatggctggatgatgcccctgcattacggctctcagcttgatgaacaccacgctgtgcgcaccgatgccgggatgtttgatgtatcgcatatgaccattgtcgatcttcatggtagccgtacacgagagtttctacgttatctgctggcaaacgacgtcgcgaagctaacgaagacgggtaaagccctctactccggtatgcttaacgcatcgggcggtgtgatagatgacctgattgtctactacttcactgaagatttcttccgtctcgttgttaactccgccacccgcgaaaaagacctctcctggattacccaacacgctgaaccttatgccatcgacatcaccgttcgtgacgacctgtcgctgattgcggtacaggggccgaatgcgcaggaaaaagcggcgactctgtttactgaccaacagcgccatgcagtagaaggtatgaagccgttcttcggcgttcaggcgggcgatctgtttatcgccaccaccggttataccggcgaagcgggctatgaaatcgccatgccgaatgaaaaagcggcggatttctggcgtgcgctggtggaggcgggcgtgaagccgtgcggtcttggcgcgcgcgacacgctgcgtctggaagcaggcatgaacctgtacggtcaggagatggatgaaggtatctctccgctggcggctaatatgggatggactatcgcctgggaacctgctgaccgcgactttattggccgtgaggcgctggagatgcagcgtgaaaaaggccatgagcagcttgtcggtctggtgatgaccgagaaaggcgtattgcgtaatgaactgccggtgcgttttaccgatgcgcagggcaatcagcaagaaggcattatcaccagcgggacgttttccccaacgttgggctacagcattgcgctggcgcgcgttccggcgggcatcggcgagacggcgattgtacaaattcgtaaccgtgaaatgccggtaaaagtgactaaacctgtttttgtgcgtaacggcaaagccgtcgcgtga

SEQ ID NO: 9778 - DNA, 273 bp, Salmonella typhi
  CDS (1)...(273)
  misc_feature (1)...(273): n = A,T,C or G
atgtcacataccatccgggacaaacaaaagcttaaagccagaaccagcaagattcaggggcaggtgatagcgctaaaaaanatgctggatgaaccgcatgaatgcgcggccgtgttacaacagatcgcggcgattcgcggcgcggtaaatggcttaatgcgcgaggtgattaaagggcatctgaccgagcatatcgttcatcagagtgatgaagccagacgtgaagaagatctggacgtaatattaaaggtgctggattcttatataaaatag

SEQ ID NO: 9779 - DNA, 1209 bp, Salmonella typhi
  CDS (1)...(1209)
atggcggtgtcattttgcgctgaggtggtaatgaaagaggttgtgatagtgggggctttacggacacccatcggctgttttcagggaacgctggcccgtcattccgccgtcgagctggggagtatggtcgtaaaagcgttaattgagcgcaccggcgtggacgctaatgctatcgatgaggtcatcctcggtcaggtactgacggctggcgccgggcagaatccggcgcgccagtcagccatcaaaggagggctgccgactaccgtttccgctattaccattaatgacgtttgtggttccggtttaaaagcgttgcacctggcgacgcaggctattcagtgcggcgaagcggacattgttattgcgggcgggcaggagaatatgagccgtgcgccgcatgtcctcaatgacagccgtaccggcgcgttgcctgatgccgacaatctggtggatagtctggtacatgatggcttatgggatgccttcaacgattatcacattggcgtgacggcagaaaacctggcgcgggaatatggcatcagccgcgagttacaggatgcttatgcgctcagttcgcaacaaaaagccagggccgcgattgataccggacgttttaaagatgagattgtccccatcgtcacgcaacgtaatgggcagaccgcaattgtcgatacggatgaacaaccgcgggccgacgccagtgcggaggggttagccctgctgcatccggcgtttgatagtttaggttcggtgacggcgggtaatgcctcttcaatcaacgatggcgccgccgcggtgatgatgatgagcgagacgaaagcccaggcgctggggctgccggtgctggcgcgcatccgcgcgtttgccagcgtcggcgtcgatcctgcgctaatggggattgcgccggtatatgctacccggcgctgtctggagcgtgccggctggcaactgacggaggtcgaccttatcgaagccaacgaagcgtttgccgcccaggcgttgtcggtaggaaaaatgctggaatgggatgagcgacgggtaaacgttaatggcggcgcgattgcgctggggcatcccattggcgcttccggttgtcgaattctggtttcactggtgcacgaaatggttaaacgcgacgcgcgaaaaggtctggcgacgctgtgtatcggtggcggccagggcgttgctttaaccattgaacgcgactga

SEQ ID NO: 9780 - DNA, 762 bp, Salmonella typhi
  CDS (1)...(762)
atgattttgaatgcattttctcttgaaggtaaagtcgcggttgtgacggggtgcgataccggattgggacaggggatggcgttagggctggcggaagcgggctgtgacattgtcggtattaacattgttgaaccgacggaaactattgcgcgcgtcaccgctctgggacgacgttttttaagcctgacagccgatctgcgtcaaatcgatggtattccggcgctactggaacgggcggtggcggaatacggtcatattgatattctggtgaataacgcgggtttgatccgtcgtgaagatgcgattgatttcacggaaaaagactgggatgacgtcatgaacctgaacatcaagagcgtgttctttatgtctcaggcggcggcaaaatattttattgcccagggcaacggcggcaaaattattaatatcgcgtctatgctttccttccagggcggcattcgtgttccgtcttataccgcgtcgaaaagcggcgtaatgggaataacgcgtctgatggcgaacgagtgggcgaaacacaatatcaatgtaaacgccatcgcgccgggctatatgtccacgaataatacccagcaattgcgcgctgatgcacaacgtagcgccgaaattctcgaccgtattccggctggacgttgggggctaccgggcgatttaatggggccggtagtcttcctggcatccagcgccgctgattatattaacggctataccatagcggtagatggcggttggctggcgcgttaa

SEQ ID NO: 9781 - DNA, 390 bp, Salmonella typhi
  CDS (1)...(390)
atgagcaacgtacccgcagaactgaaatacagcaaagaacacgaatggctgcgtaaagaagcggatggcacttacaccgttggcattactgaacacgctcaggagctgttgggcgatatggtttttgttgatctgccggaagtcggcgcgaccgtaagcgcgggcgacgactgcgccgtggcggagtccgtaaaagcggcgtccgacatttatgcgccggtaagcggcgagatcgtggcggtaaacgatgcgctgagcgactccccggagctggtgaacagcgaaccgtatgccggtggctggatctttaaaatcaaagccagcgatgaaagcgagcttgaatcgctgctggatgccaccgcgtatgaggcattgttagaagacgaataa

SEQ ID NO: 9782 - DNA, 2247 bp, Salmonella typhi
  CDS (1)...(2247)
atgctcactcgcctgcgcgaaatagtcgaaaaagtggccagtgcgccgcgtctgaacgaggcgctgaatattctggtcacggatatctgtcttgcgatggatacagaggtttgctcggtttacctggccgatcatgaccgacgctgttattacctgatggcgacgcgggggttgaaaaaaccgcgtggtcgaaccgttgcgcttgcgtttgatgaggggatcgtcggtctggtgggcaggctggcggaacccattaaccttgccgatgcgcaaaaacatcccagctttaaatacattccttcggtaaaagaggagcgttttcgcgcgtttctcggtgtgccgatcattcagcgtcgccaacttctcggcgtgctggtcgtgcagcagcgcgaattgcgccagtacgatgaaagcgaagagtctttcctcgtcacgctcgctacgcagatggcggctatcctgtcacagtcgcaggtcacagcgctattcgggcaataccggcagacgcgaattcgcgcgcttcctgcggcgccgggcgtggctatcgcaacgggctggcaagacgcgaccatgccgctgatggaacaggtttacgaagcgtctacgctggatacctctcttgaacgcgaacgattgaccggcgcgctggaagaggcggcgaacgaattccgacgatacagcaaacgctttgccgccggcgcacaaaaagagacggcagccattttcgatctgtactcacacctgctttcagacgccagactgcgtcgcgaactcttcgccgaggtcgacaaaggcgctgttgcggagtgggccgttaaaaaaatcatcgaaaaatttgccgagcaatttgcggcgctaaccgataactacctcaaagaacgtgcgggagacttacgcacgctggggcagcggctgttattccatcttgatgattcagttcaggggccaaacgcctggccggaacgttttattctggtcgcggatgagctgtcggcgaccaccctggcggagctgccgcaggacaggctggcgggcgttgtggtgcgcgacggcgcggcaaactcgcatgcggcgattatggtgcgcgcgctcggtatccccaccgtcatgggcgcggatatccagccttcggtgctacatcgccgtacgttggtggtggatggctatcgcggtgaattactggtcgatcctgaacccgtgcttattcaggaatatcagcggctcattagtgaagagatagaactcagtcgtctggcggaggacgacgtcaatcttcccgcccaactgaaaagcggcgagcgtatcaaagtgatgctgaatgccgggctcagccccgagcatgaggaaaagttaggcagtcggatcgacggtatcggcctgtaccgtactgaaattcccttcatgctgcaaagcgggtttccctcggaagaagagcaggtggcgcagtatcaagggatgctgcaaatgtttaacgataaaccggtgacgctgcggaccctggatgtgggagcggataagcaactgccctatatgccgatcagcgaggagaacccgtgtctgggctggcgcgggatccgcattacgctggatcagccggagatctttttgatccaggtccgcgcgatgctgcgtgccaatgcggcgactggcaacctcagcattttgttgccgatggtcaccagtattgatgaagtcgatgaagcgcggcgtctgatcgaacgcgccgggcgcgaggtcgaggagatgatcggctatgcgatcccgaaaccgcgtatcggcattatgctggaagtaccatcaatggtatttatgctgccgcatctggctaaccggatcgactttatctcggtcggcaccaacgatttaacgcaatatatcctggcggtagatcgcaacaatacccgcgtggccagtatttatgacagtttgcatccggctatgctgcgcgcactgtccatgatcgcgcaggaagccgaaaaacatggtctcgatcttcgcttgtgcggcgagatggcgggcgatccgatgtgcgtggcgattcttatcggtctgggatatcgccatctttcgatgaatggccgttcggtagcgcgtgtgaaatatctgctgcggcatatcgattttgaagacgcgcaaacccttgccagacgcagccttgaggcgcagatggcgaccgaagtgcgtcatcaggtggcggcgtttatggagcgccgcgggatggggggattgattcgcggagggttgtaa

SEQ ID NO: 9783 - DNA, 1434 bp, Salmonella typhi
  CDS (1)...(1434)
atgagaaaactcaccctgccaaaagattttttatggggcggcgcggttgccgcacaccaggttgaaggcggctggaataaagacggtaaaggccccagcatctgcgacgtgctaaccagcggcgcacacggcgtgccacgcgaaatcacccagaatgtcgttgctggcaaatactatccgaaccacgaggcggtggatttttacggacattacaaagaagacatccgtcttttcgccgaaatggggttcaaatgcttccgtacttctattgcctggacgcgtatcttcccgaatggcgacgaatcccagccaaacgaggccggtctgaaattctacgacgacatgtttgatgagttactcaaatacaacatcgaaccggtcatcaccctttctcactttgaaatgccattacatctggtacagcactacggcggctggaccaatcgtaaagtggttgatttctttgtccgttttgctgaagtcgtgtttgaacgctacaaacataaggtcaaatactggatgaccttcaacgaaattaacaaccagcgaaactggcgcgcgccgctgtttggctactgctgttccggcgtggtgtataccgagcatgagaatccagaagaaaccatgtatcaggtcttacatcatcagtttgtcgccagcacgctggcggtaaaagcggcacgtcgtattaatccacagatgaaagttggctgtatgctggcgatggtcgcgctgtatcctttctcctgtaaaccagaagatgtgatgtttgctcaggaatcgatgcgtgaacgctacgtctttaccgatgtgcagctgcgcggctattacccgtcctatgtgttgaacgagtgggagcgccgcggatttaacatcaaaatggaagatggcgatcttgaagtgctgcgcgaaggcacctgcgattatcttggtttcagttattacatgaccaacgcggtcaaagccgaaggcggtagcggcgatgcgatttccggttttgaaggcagcgtaccgaacccctatgttaaagcatctgactggggctggcagattgacccggtgggtctgcgctattcattgtgtgaactgtacgaacgctatcaaaagccgctatttattgtcgaaaacggttttggtgcttacgacaaagtagaagaagatggcagcatcaacgacgactatcgcattgactacctgcgcgcccatattgaagagatgaaaaaagcggtgacttacgatggtgtcgacctgatgggctacacgccgtggggctgcatcgactgcgtgtcgttcaccaccggtcagtacagcaagcgctacggcttaatctacgtgaacaagcacgatgacggtacgggcgatatgtcgcgttcgcgtaagaagagcttcaactggtacaaagaggtgattgccagcaacggcgagaagctttaa

SEQ ID NO: 9784 - DNA, 918 bp, Salmonella typhi
  CDS (1)...(918)
  misc_feature (1)...(918): n = A,T,C or G
atgtcaaaacgattacctcctttaaatgcgttacgcgtttttgatgctgccgcgcgccatttgagttttacgcgagcagcggaagaactttttgtgacgcaggccgcagtaagccaccaaattaagtcacttgaggattttttggggctaaaactgttccgccgccgcaatcgttcgctgctgctgacggaagaaggccaaagctattttcttgatattaaagagatattttcccagctaacggaagcaacgcgtaagctccaggcgcgcagtgccaaaggggcgctgacggtgagtttaccgcccagttttgccatccagtggctggtgcccaggctctccagctttaactcagcttatccgggaattgacgttcggatacaagccgttgatcgtcaggaagataaactggcagacgatgtcgatgtcgcgattttttatggccggggaaactggccgggcttgcgcgtcgaaaaattatacgcagaatatttattgcccgtctgttctcctttattgctcacaggcgaaaaaccgttaaaaacgccggaggatctggcgaaacatacgttattgcacgatgcctcccggcgtgactggcaggcctatactcgtcagttagggctcaaccatattaacgttcagcaagggccgatatttagccacagcgcgatggtgctacaggcggctattcacggacaggggatcgcgctggcgaataatgttatggcgcagtcggaaattgaagccgggcgactggtgtgtccatttaacgatgttctggtgagtaagaatgctttttatctggtttgtcatgacagccaggcagaactgggtaanntagccgccttccgtcagtggattttggcgaaggcggcgacggagcaagaaanattncgtttncgttacgaacantaa

SEQ ID NO: 9785 - DNA, 930 bp, Salmonella typhi
  CDS (1)...(930)
atgaaaaccgcaggtaatctcatcgtccttggcagcattaatgccgatcatatccttaatcttgagtccttccctaccccgggtgaaacggtaaccggtagccattatcaggtcgcgtttggcgggaaaggcgcgaatcaggcggttgctgcgggacgtagcggggcaaatattgcgtttatcgcctgcacgggcgatgacgatattggcgacagtattcgtaaacaattagtcagcgatcgtattgatatcgcgccagttagcgtcattaaaggcgagtctaccggggtagcgctgattttcgttaatggcgaaggcgagaacgtcatcggtattcatgccggagcgaatgccgcgttatcgccggcgttggttgatgcgcaacgtgaacgtatcgcgcaggcggatgcgttactgatgcagctggaatcgccgctggaaagcgtactggcggcggcgaaaatcgcccatcaacatcatactactgttgcgcttaacccggcacctgcccgtgagttaccggatgaactgctggcgctggtggacatcatcacgccaaatgaaacggaagctgaaaagctgacgggcgtgcgtgtggaaaatgacgacgatgtcgcgaaagctgcgcaggttttacatgataaaggcattcgaaccgtattaattaccttaggaagccgtggcgtctgggccagcgtaaacggcgagggtcgccgcgttcctggatttagcgttgaggctgtcgataccattgccgccggagatacgtttaacggcgcctttatcaccgcgatactggaggagacgccgttgccggaagcgattcgctttgcccatgccgccgccgcgattgccgtaacgcgtaaaggcgcgcaaccttccgttccgtggcgcgaagagatagaagcgtttttacatcagcaggggtaa

SEQ ID NO: 9786 - DNA, 990 bp, Salmonella typhi
  CDS (1)...(990)
  misc_feature (1)...(990): n = A,T,C or G
atgaaagatgttgcccgcctggcgggagtctctacatcgacggtctctcacgttattaacaaagatcgctttgtgagtgagacgattactgaaaaagttgaagcggcgattaaatcacttaactatgcgccttccgcgctggcgcgaagcctcaagttaaaccagacccgcacgattggtatnntgattaccgccagtaccaaccctttttattccgaactggtgcgcggcgttgagcgaagctgttttgagcgcggttatagtctggtgctgtgtaataccgaaggcgatgagcaacggatgaaccgcaacctagagacgctgatgcaaaaacgggtagacggtttactgctgctgtgtactgaaacgcatcagccttctcgtgaaatcatggaacgttatccgtctattcctaccgtcatgatggactggtcgccgtttgatggtgagggcgatagcgatctcattcaggataattcgttgttaggcggcgatcttgcgacccaacaccttatcgataaaggatttacccgaatagcctgtattaccggcccgctggacaaaacgcctgcgcgtttgcggctggaagggtatcgggcggcgatgaaacgcgcagggctggctattccgcaaggctatgagatcaccggcgattttgaatttggcggcggctttgacgccatgcaggcgttactcgcccatcaacagcgaccgcaagcggtttttaccggaaacgatgcgatggctgtcggcgcctatcaggcgctatatcaggcggggcttcgtatcccgcaagatatggcagtcattggctatgatgatattgagctagcgcgctatatgacgccgccgctgacgactatccatcagccgaaagatgaattgggcgagcttgctattgatgtgttgattcatcggatggcgcagcccgccttgcaacaacagcgacttcagcttactccggttttgacggtgcgtgggtcggtttag

SEQ ID NO: 9787 - DNA, 1350 bp, Salmonella typhi
  CDS (1)...(1350)
atgttggataaaattgtcatcgccaaccgcggcgagatcgcactacgtattcttcgagcctgtaaagaactcggcatcaagaccgtcgctgtgcactcaagcgcggatcgcgatttaaaacacgtattgctggcggatgagacggtctgtattggcccggcaccgtccgtaaaaagttatctgaacatcccggctatcattagcgccgctgaaatcaccggcgcggtggcaatccacccgggttacggcttcctttctgagaacgccaattttgccgagcaggttgaacgctccggctttatctttatcggcccgaaagcggacaccatccgcctgatgggcgataaagtgtccgcgattaccgcgatgaaaaaagcgggcgtgccgaccgtaccaggatctgacggcccactgggcgacgatatgaatgcgaaccgcgctcatgccaaacgtattggctatccggtgatcatcaaagcgtccggcggcggcggcggccgcggtatgcgcgtggttcgtagcgatgctgaactggcgcagtccatctccatgactaaagcggaagcgaaagcagctttcagcaacgacatggtatacatggaaaaatacctggaaaatccacgccacatcgaaattcaggtgctggcggacggccagggcaacgctatctatctggcggaacgcgactgctccatgcagcgtcgccaccagaaagtggttgaagaagccccggcgccaggcattacgccggaactgcgtcgctatatcggcgaacgctgcgcgaaagcgtgcgtagacatcggctatcgcggcgcaggaacgttcgaattcctgttcgaaaacggcgagttctatttcatcgaaatgaacacccgtattcaggttgaacacccggtaactgaaatgattaccggcgtcgatttgatcaaagagcagttgcgcatcgcggcgggtcagccactgtcgatcacacaggacgaagttgtcgttcgaggccatgcggtagaatgccgtatcaatgccgaagatccgaacaccttcctgccaagccctggcaaaatcacgcgcttccatgcgcctggcggctttggcgttcgctgggaatctcatatctacgcgggctacacggtgccgccgtactatgattccatgatcggcaaactcatctgctacggtgaaaaccgcgacgtggcgattgcccgtatgaaaaatgccctgcaggaactgattatcgatggtatcaaaaccaatatcgatctgcagacccgcatcatgaatgacgagcacttccagcacggtggaaccaacatccactatctggagaaaaaactcggtcttcaggaaaagtaa

SEQ ID NO: 9788 - DNA, 471 bp, Salmonella typhi
  CDS (1)...(471)
atggatattcgtaagattaaaaaactgatcgagctggttgaagaatcaggtatctccgaactggaaatttctgaaggcgaagaatctgttcgcatcagccgcacaacggcaaacgccggtttcccggtgatgcagcaggcttatgcggcgccgatgatgcagcaacccgctctgtctaacgctgtcgcgccagcggctactccagcaatggaagcgcctgccgcagcggaaatcagtggtcacatcgtacgctccccaatggttggtactttctaccgcaccccaagcccggacgcgaaagcgttcatcgaagtgggccagaaagtgaacgtgggcgataccctgtgcatcgttgaagccatgaaaatgatgaaccagatcgaagcagacaaagcaggcactgtgaaagcgattctggtcgaaagtggtcaaccggtagaatttgacgagccactggtcgtcatcgagtaa

SEQ ID NO: 9789 - DNA, 966 bp, Salmonella typhi
  CDS (1)...(966)
atgacaacccaggctgtttctggtcgccgttatttcactaaagcgtggcttcttgagcagaagtcgctcattgccctgctggtgttgatcgcgattgtttcgacgttgagccccaacttttttaccgttaataatctgttcaatattcttcaacagacctccgtcaacgccattatggcggtggggatgacgttggtgattctgacatcggggatcgatctgtccgtcggttccctgctggcactcaccggtgcggttgccgcttcaatcgtcggcgttgaagtgaatgcgctggtcgcggttgccgccgcgctggcgctgggcgctgcgattggcgccgtcactggcgttatcgtcgcgaagggccgcgtacaggcgtttatcgctacgctggtgatgatgctgctactgcgtggcgtgacgatggtttacaccgacggtagcccggtcaacaccggctttaccgataacgccgatctgtttggctggttcggtatcggtcgtccgctgggcgttcctacgccggtctggatcatggctatcgtctttatcgccgcctggtatatgctgcatcacacccgtctgggacgctatatctacgcgctgggcggtaacgaagcggcgacgcgtctgtctggcattagcgtgagcaaagtgaaaattatcgtctattcactttgcggcctgacagcatcgctggcgggcatcattgaagtggcgcgcctctcttccgcgcagccgacggcgggtaccggctatgagctggatgctattgccgccgtggtgctgggcggcaccagccttgcaggtggtaaagggcgcattgttgggacattgatcggcgcattgattctcggcttccttaataatggtttgaatttgttaggtgtttcctcctattaccagatgatcgtcaaagcggtggtgattttgctggcggtactggtagacaacaaaaagcagtaa

SEQ ID NO: 9790 - DNA, 1710 bp, Salmonella typhi
  CDS (1)...(1710)
atgagtcgcaagcaactggcgctgtttgaacctgttttactcgtacaggcgctaacggatgccgtaaaaaaattaagcccacgcgcccagtggcgtaacccggtgatgtttgtggtctgggccggcagcgtgctagccactctgttaacgctcgctatggtaacaggacaaatagcgggaagcgccttgtttacaggggtgatcagcctgtggttatggttcaccgtactgttcgccaattttgccgaagcactggcggaaggccgcagcaaagcccaggcaaacagtctgaaaggggtgaaaaagaccgcgttcgctcgccgtctgcgcgccccgcgccatgatgcgcaggccgataacgtgcccgccgctgaactgcggaaaggcgacattgtcctggtcaaagcgggcgatattattccctgcgacggcgaggtcatcgaaggcggcgcctcggtggatgaaagtgcgattaccggcgaatccgcgcccgtgatccgcgagtccggcggcgatttcgcctctgtcaccggcggccgcgccgtagaagccgcgggcgatgtcgacgtgttactgctggataaaaccggcactatcacgctcggcaaccgccaggcgtccgattttatacccgcccgaggggtggacgaacgcacgctggctgacgccgcgcagctcgcttcgctggccgacgaaacgccggaaggccgcagcattgtgatcctcgccaaacagcgctttaacctgcgtgaacgcgatgtgcagtcgcttcatgccacctttgttccgtttaccgcgcaaagccgcatgagcgggattaatatcgataaccggatgatccgtaaaggctcggtggacgcgattcggcgtcatgtcgagagcaatggcggccattttcccgccgatgtcgagcaaaacgtcgagaacgtggcgcgtctgggcgcgacgccgctggtggtcgtggaaggcgcgcgcgtactgggtgttatcgccctcaaggatatcgttaaaggcggcattaaagaacgtttcgcccagctacgaaagatgggcattaaaacggtgatgatcactggcgataaccgcctgacggcggcagcgattgccgccgaagccggtgtggacgattttcttgccgaagccacgccggaagccaagctggcgttgatccgtcaatatcaggcggaaggacggctggtcgccatgaccggcgacggcactaacgatgccccggcgctggcgcaggctgacgtcgcggtggcgatgaactccggcacccaggcggcgaaagaagccggtaatatggtggatctggactctaacccgaccaagttgattgaagtggtgcatatcggtaagcagatgctgatgacgcgcggctcgctcaccaccttcagtatcgcgaatgatgtagcgaaatatttcgccattattcccgccgcgtttgccgctacctatccgcagctaaacgcgctcaacgtgatggggctgcattcgccgaactccgccattctgagcgcggtgatctttaacgccctgattatcatatttctgatcccgctggcattaaaaggcgtgagttataagccgctttccgcatcggccatgctgcgccgtaatttatggatctatggtctgggtggtctggtggtgccgtttattggcatcaaagtgattgatgtgctgctgaccctgctggatctggcgtga

SEQ ID NO: 9791 - DNA, 597 bp, Salmonella typhi
  CDS (1)...(597)
gtgaggtgtatgatgatcggtttacgtcctgctttttcgacaatgttatttctgctgttattgaccggcggcgtgtatccgcttctgaccacggcgctggggcagtggtggtttccctggcaggctaatggctcgctgattcataaagacaatctgatacgcggctcagcgcttatcggacaatcgtttaccgccgcgggctattttcatggccggccctccgccaccgccgatacgccttataatccactggcgtcgggcggaagcaacctggccgccagcaatcccgaactggatgcgcaaattcaggcccgcgtcgccgcgctacgcgccgctaacccccaggcgagttccgcggttccggttgagctgacgacggcgtcggcaagcgggctggataataatctgacgcccggcgccgcggcatggcaaatcccccgcgtggcggcggctcgccagcttcccgttgaacaggtcgcgcaactggttgcagaatatacgcacaggccgctggcgagctttcttgggcaaccagtggtgaatattgttgagcttaatctggcgctggatgcgctacagggacacagagcgaaatga

SEQ ID NO: 9792 - DNA, 2196 bp, Salmonella typhi
  CDS (1)...(2196)
  misc_feature (1)...(2196): n = A,T,C or G
atgccgctgatgaagtcgtactggtcgatctgccgcccgacgatctgcgccaacggctcaacgaaggtaaagtgtatatcgccggtcaggcggaacgcgctattgaacattttttcngngaagggcaatctgatcgccctccgcgagctggcgctacgccggacagccgatcgcgtggacgatcagatgcgcgcctggcgcgcgcatccgggcgaagaaaaagtatggcatacccgcgatgcgattttactgtgtatcgggcataacactggcagcgaaaaactggtgcgtaccgcggcgcgtctggcctcccggctcggcagcgtctggcacgccgtctatgtcgaaacgccaacgttacaccgcttaccggaaaaacaacggcgggctattttaagcgcgctgcgcctggcgcaggagcttggcgcggaaaccgccaccctgtccgatcccgccgaagagaaagcggtcgtgcgctatgcccgcgagcataatctggggaaaatcgtcatgggccgcccggcgtcgcgacgctggtggcgacgtgacgctttcgccgaccgtcttgccaggcgcgcgccggatctcgatcaggtaatcgtcgcgctggaagagccgccagcgcgcgcgttggcgcaaacgcctgataaccgaccttttaaagagaaatggcgtggacagattcagggctgtctggtcgccgtggcgctttgcgccataaccacgtttatcgctatgcagtggcttgtcaccttcgacgccgccaatctggtgatgctctatttgctgggcgtagtggtgattgcgctgctttacggacgctggccgtcggtggtggcgacggtgattaacgtggcgagtttcgatctcttttttatcgcaccacgcggtacgctcgccgtttcggacgtgcagtatttgctgacctttgccgtgatgctgacggttggtctggtgattggcaatcttactgccggggtgcgctatcaggcgcgcgtcgcccgttatcgggaacagcgtacccgccatttatatgaaatgtctaaagcgctggccgtcgggcgtagcgaacatgatatcgccgcgaccagcgagcggtttatcgcctcgacgtgtcaggcgcgcagccaaattttattacctgatactaacggtaagttgctgcctctcacccaccagcaaggcatgacgccgtgggacgacgcaattgcgcgctggagttttgataaaggccagcctgccggcgcaggcaccgatacccttcctggcgtgccttatcaaatcctgccgctgaaaagcgccgataaaacgtacggtctggctatcgtcgaaccgggtaatttgcgtcagttaatggtgccggagcagcaacgcctgctggaaacattcactctgcttgtcgccaacgcgctggaacgactgacgctgaccgccagcgaagaacaggcgcgtctcgccagcgaagaacaggcgcgtctcgccagcgagcgcgaaagtattcgcaacgctctgctggcggctctgtcgcatgatttacgcacgccgctgacggtattgttcggccaggcggaaattttgacgctggatttagccagcgcaggatcgccccacgcgcgtcaggccagtgaaatccgccagcatattctcaacaccacccggctggtgaataatttgctggatatggcgcgtattcagtccggcgggtttaatcttaaaaaagagtggctgacgctggaagaggtcgtcggtagcgcgttacagatgttagagccgggtttattgcatccgattacattgtcgctgccgcaacagttaacgcttatccatgtcgatggccccttatttgagcgtgtcctgatcaacttgctggaaaacgccgttaagtacgccgggccgcaggccagtatcggcattgatgctgcggttaaggacaatcgtttacaactggatgtctgggataatgggccgggtattcctgcggggcaagaacagaagattttcgataagttcgcccgcggcaacaaagagtccgccgtccccggcgtggggctggggctggcgatttgccatgctatcgtagaggtacacggcggcacgcttaccgcctataatcgaccgcagggcggcgcctgtttccgtgtgacgctgccgcaaggaaagccacctgaacttgacgattttcatgaggatatgtga

SEQ ID NO: 9793 - DNA, 735 bp, Salmonella typhi
  CDS (1)...(735)
atgaacattgatttaaatgcggatttgggcgaaggttgcgccagcgacagcgaattattaacgctggtctcctccgctaatatcgcctgtggttttcacgccggtgatgcgcaaaccatgctgacctgcgtgcgcgaggcgctgaaaaacggcgtggcgatcggcgcgcatcccagctttccggatcgggataattttgggcggacggcgatggttttgccgccggaaacggtatacgcccagacgctgtaccaaatcggcgcgctgggggcgattgtccaggcgcaaggcggcgtgatgcgccatgtcaaaccgcacggtatgctctataaccaggcggcgaaagatccccatctggcacaggcgattgcgaaagcggtacacgactatgatccgtcactgatactggttggactggcgggaagtgagctgatccgggccggtgaacgccatcgcctggtgacgcggcaggaggtgtttgccgatcgcggctatcaggccgacggtagcctggtgccgcgcatgcaacctggcgcgctgattcacgacgaagagcaggcgctggcgcaaacgctggatatggtacaagccgggagagtgaaaagcgttactggcgtgtggacgactgtcacggcgcaaacggtgtgcattcatggcgacggcgagtatgcgcttgcattcgcacgcaggctacgcgccgcgttcaatgcgcgtaatgtacacgttattgcctga

SEQ ID NO: 9794 - DNA, 1188 bp, Salmonella typhi
  CDS (1)...(1188)
atggagttatgtatgcctctcgctttatttgcactgacaataagtgccttcgctattggcacgactgagttcgtgattgtcggcctggtgccgaccattgcacaacaactggctgtctcgttaccttctgccggaatgctggttttaatctatgcactgggtgtggctattggcgcgccggtgctaaccgctctgaccggacgcctgccgcgtaaacagttactggtcgcgctgatggtcttgtttacggcggggaatttgctggcgtggcaggctccgggctatatgacattaatcgccgcccgtctgctgacgggcctggcgcacggcgtgttcttctcgattggctctaccatcgcgacaagtctggtgccgaaagagaaagcggcttctgctatcgctattatgtttggtggtttaacagtagcgctggtaacaggtgttccgctggggacatttatcggtcagcattttggctggcgtgagaccttccttgcggtatcactgttaggcgtgattgcgctgatgagcagtcaactgctgatccctgccaatattcctggtcgggcggccgccagcattcgtgaccaggtgaaagtactgactcatcctcgtctgctgctgatttacgccgttacggcgctgggctacggcggggtattcacggcattcaccttcctggcgccgatgatgcaggatctggcgggattctctccggcagcagtaagctggatcctactgggttatggcgtatcagtggctatcggcaatatctggggcggtaaactggcggataagcatggtgccgtgccggctctgaaattcattttcgccgcgctgtttgttctgctgatggtcttccaggtgacggcctccacgcagtatgccgcgctggctaccattctggtgatggggatctttgccttcggtaacgtaccggggttgcaggtctacgtggtacagaaagcggaacaattcacgcctaatgccgttgatgtggcgtcaggtctgaacattgcggcgtttaacattggtattgcgctgggttccgtgattggcggacaaacggtggcgcattacggtttggcgcagacgccgtggattggcgccctcattgttctggtggcttttctgctgatgggcgtcagcggacgtcttgataaacctgtgcgcattgctctggagtaa

SEQ ID NO: 9795 - DNA, 537 bp, Salmonella typhi
  CDS (1)...(537)
atgtctatgaaaaaatatttagcaatgatcacaggctcgcttcttgtctccagcagcgcgatggctgtttctgataacaccatcacctttcaaggggaagtctctgatgaaacgtgctctgtcgtgattaatggtaatcaggctaaacccgtcgtgttattgccaacagtaagtactaaagagttatcagaacaagggaaaaccgcggggccaataacgtttgatattgggctgtccgggtgtaccggttctaaggacaaaacaacaaaaatttccaccgtctttgtcggtaatcaggtcaccagtaacggtaacctgggtaatactggcagcgcgaaaaatgttgaagtccaattactcgacacttcaggggagccaatcaatctgaccggcggctttactggcgacggcgacctacagctggaaccaaatgcttctgaagcgagcgcgacttataccgcgcggtattactctaccgggaaagcagaggctgggacagtcgctgccaccctacaatacgccgtttcgtataaataa

SEQ ID NO: 9796 - DNA, 1170 bp, Salmonella typhi
  CDS (1)...(1170)
atgacagacacgacgatcctgcaaaacaacacgcatgtcattaagcctaaaaaatcggtcgcgctttccggcgtacctgccggaaataccgctctgtgtaccgtgggaaaaagcggtaacgatctgcactatcgcggttacgacattctcgatctggcggagcactgcgaatttgaagaagtcgcgcatttactgatccacggaaaattaccgacccgcgacgagctgaacgcgtataaaagcaagttaaaagcgctgcgcggattacccgccaatgtccgtaccgttctggaagcgttaccggcggcctcgcacccgatggacgtgatgcgtaccggcgtttccgcgctgggctgcaccctgccggaaaaagagggacataccgtctccggcgcgcgcgatattgccgataagctgttggcttcgctcagctctatccttctttactggtatcactacagccacaacggcgaacgtattcagccggaaaccgacgatgattccatcggcggccatttcctgcatctgctgcacggtgaaaagccaacccaaagctgggaaaaggcgatgcatatttcgctggtgctgtacgccgagcatgagttcaacgcctcgacgtttaccagccgggtaattgccgggaccggctcggatgtctactccgcgattatcggcgcgattggcgcgctgcgcggcccgaaacacggcggagcgaatgaggtgtcgctggaaattcaacagcgttatgaaacaccggacgaggcagaggcggatatccgtaaacgcgtggaaaacaaagaggtggtgattggctttggacatccggtttacaccatcgccgacccgcgccaccaggtgatcaaacgggtggcgaaacagctttcagaagaaggcggctcgctgaagatgtaccacatcgccgaccgtctggaaacggtgatgtgggagaccaaaaagatgttcccgaatctcgactggttttcggcggtctcctacaacatgatgggcgtccctaccgaaatgttcaccccgctgtttgtcatcgcccgcgttaccggctgggcggcgcacattattgaacagcgtcaggacaacaaaattattcgtccttccgccaattataccggcccggaagatcgcgtatttgtgccgatcgaaaagcgttgctaa

SEQ ID NO: 9797 - DNA, 975 bp, Salmonella typhi
  CDS (1)...(975)
  misc_feature (1)...(975): n = A,T,C or G
atgacagaccttatccatcgccctcgccgcctgcgcaaatccgctgcgctgcgcgctatgtttgaagagacaacacttagcctgaacgacctggtgttgccgatctttgttgaagaagaactcgacgattacaaagctattgatgccatgcccggcgtaatgcgtatcccggaaaagcagctggcgcgagagattgaacgtatcgcaaatgctggcattcgttccgttatgaccttcggcatttctcaccatactgatgacaccggcagcgatacctggaaagaagacggcctggtggcaagaatgtcccgcatctgtaagcaaaccgtgccggagatgatcgtcatgtccgacacctgcttctgcgaatacacctcgcacggccactgcggcgtgttgtgcgaacacggtgtggataacgatgcgacgctggccaacctcggcaagcaggccgttatcgcggcggcggctggagcagattttattgcgccctccgcggcaatggatggacaagtccaggctatccgccaagcgctggatgccgccggttttaccgatacggcaataatgtcctactccaccaagttcgcctcttctttntacggccccttccgtgaagcagcgggtaccgcgttaaaaggcgaccgcaagacgtatcaaatgaatccgatgaaccgccgtgaagcgattcgcgaatcactgctcgacgaagcccagggcgcggattgcttaatggtgaaaccggccggcgcgtatctggacgtgctgcgtgaaattcgcgaacgcacagagttgccgcttggcgcttaccaggtgagcggtgaatacgccatgattaaatttgctgctatggctggcgccatcgatgaagaaaaggtcgtgctggaaagtctgggctcgattaaacgcgccggcgccgatttgattttcagctacttcgcactggatctggctgagaaaaatattctgcgttaa

SEQ ID NO: 9798 - DNA, 1113 bp, Salmonella typhi
  CDS (1)...(1113)
atggaatgggtttttaagatggcgaaattgcgggtaggaatagtatttggcggtaagtcggcggaacatgaagtgtctttgcaatcagcgaaaaatatcgttgatgcgatcgataaaacccgcttcgacgtggtgctgttagggatagataaggcgggacaatggcatgttaacgatgcggaaaattatttgcagaatgcagacgatccggcacatatcgcgctacgtccttcggcaatcagtctggcccaggtgcctggcaaacaccaacaccaattgattaacgctcagaacgggcagccgctaccgacggtagatgttatttttcctatcgtccacggtacgctgggcgaagacggctcattgcaggggatgctgcgcgtcgcaaacttaccgtttgtcggttcagacgtgctgagctccgcagcctgcatggataaagacgtcgccaaacgactgctacgcgatgcaggactgaatatcgccccgtttattacactcacccgaacgaatcgtcacgcgtttagttttgccgaggttgaatcccgtctgggactgccgctgttcgttaagcccgccaatcagggctcttcggtcggcgtcagtaaagtcgctaacgaagcgcaatatcagcaggcggtcgcgctggctttcgaattcgatcataaagtggtggtggagcaagggatcaaagggcgcgagatcgaatgcgccgtattaggtaacgataacccacaggccagtacctgcggcgaaatcgtactgaacagcgaattttacgcctacgatactaagtatattgatgataatggcgcgcaagttgtcgtgcctgcgcagatcccttccgaggtgaatgacaagatccgcgcgatcgcgatccaggcttatcagacgctggggtgcgcgggtatggcgcgtgtcgatgtcttcttaacggcagacaatgaggtcgtgattaacgagattaatacgctgccaggttttaccaatatcagtatgtatccaaaactctggcaggcgagcggattgggctataccgatttgatcagccgcctgattgagctggcgctggaacgccatacggcgaataacgccttaaaaaccacgatgtaa

SEQ ID NO: 9799 - DNA, 960 bp, Salmonella typhi
  CDS (1)...(960)
atgagtctgaatttccttgattttgaacagccgatagcagagctggaagcgaaaatcgattctctgactgcggtaagccgccaggatgagaaactggatattaatatcgatgaagaagtccatcgcctgcgcgaaaaaagcgtagaactgacgcgcaaaatcttcgccgatctcggcgcatggcaggtagcccaactggcgcgccatccgcagcgtccgtacaccttggattatgtccgtctggcgtttgatgagtttgatgagctggcgggcgatcgcgcctatgctgatgacaaagccatcgtcggcggtatcgcgcgtctggaagggcgaccggtgatgatcattggtcatcagaaaggtcgtgaaaccaaagaaaaaattcgtcgtaactttggcatgccagcgccggaaggctaccgcaaagcgctgcgcctgatggaaatggctgaacgcttcaacatgccgattatcaccttcatcgacaccccgggcgcttaccctggcgtgggcgcggaagagcgtggtcagtctgaagctatcgcccgcaacctgcgtgagatgtctcgtctgaacgtaccggtcatctgcaccgtgattggcgaaggcggctccggcggcgcattggcgattggcgtgggtgataaagtgaatatgctgcaatacagcacctattccgttatctccccggaaggttgcgcctctattttgtggaagagcgccgacaaagcgccattggctgctgaagcgatgggcatcatcgcgccgcgtctgaaagagctgaagctaatcgattccatcattccggagccgctgggcggcgcgcaccgtaatccggaagcgatggcggcgtcgctaaaagcgcagctgctggaagatttagccgatctcgatgtgttaagcaccgatgatttaaaaaaccgtcgttaccagcgtttgatgagctacggttacgcctaa

SEQ ID NO: 9800 - DNA, 1749 bp, Salmonella typhi
  CDS (1)...(1749)
  misc_feature (1)...(1749): n = A,T,C or G
gtncgatcgttcaactggaaccgtaacaacatgcgtactagccaatacctgctctccactctgaaggagacacctgccgacgccgaggttatcagccaccagctgatgctgcgcgccgggatgatccgcaagctcgcctccgggttatatacctggctgccgaccggcctgcgcgtcctgaaaaaagtcgaaaacatcgtgcgtgaagagatgaacaacgccggtgctatcgaggtgtcgatgccagtcgttcagccagccgacctgtggcaagagagtggtcgttgggaacagtacggtccggaactgctgcgttttgtcgaccgtggcgagcgtccgttcgtactcggcccgacccacgaagaagttatcaccgacctggtgcgtaatgaactcagctcttataagcagttgccgctgaacttcttccaaatccagaccaaattccgtgatgaagtgcgtccgcgctttggcgtgatgcgttcgcgcgaattcctgatgaaagatgcttactctttccacacctctcaggagtcgttgcaggaaacctatgacgccatgtacgccgcgtatagccgtatcttcagccgtatggggctggatttccgcgcggtacaggccgataccggttctatcggcggcaacgcctcgcatgaattccaggtgctggcgcaaagcggcgaagacgatatcgttttctctgatgtttctgattacgcggctaacattgaactggcagaagctatcgcgccgcaaacaccgcgcgcagcggcgacgcaggaaatgactctggtcgatacgccaaatgccaaaaccatcgcggagctggtggaacaattcaacctgccaattgaaaaaacggtaaaaacgctgctggtgaaagcggtgaaagacagcaagtctccgctggtggctctgctggttcgcggcgatcatgaactgaatgaagttaaagcggaaaaactgccgcacgttgccagcccgctgaccttcgctactgaagaagagattcgcgccgtaattaatgccggccctggctccctcggcccggtcaatatgccgattccggtcatcatcgatcgtaccgttgccgccatgagcgattttgccgctggcgctaacatcgacggtaaacactactttggtattaactgggatcgcgatgtggcgacgcctgttgttgccgacatccgtaacgtagtcgccggcgatccgagtccggatggtcagggaacgttgcttatcaaacgcggtatcgaagtgggtcacatcttccagttaggtaccaagtactcagaagcgctgaaagcctccgttcagggtgaagatggccgtaaccagatcctgacaatgggctgctatggtatcggcgtaacacgtgtcgttgccgcggctatcgagcagaactttgacgagcgcggcattgtatggcctgacgccattgcacctttccaggtcgctattctgccgatgaatatgcacaaatccttccgtgtgcaggagctggcggaaaagctgtacagcgaattgcgcgcgcagggcattgaagtgctgatggacgatcgtaaagagcgcccgggcgtgatgtttgccgatatggagctgattggtattccacatactatcgtgattggcgatcgcaacctggataacgacgatattgagtataaataccgtcgtagcggtgaaaaatcgctgattaaaaccggcgatatcgttgattatctggtcaaggcgattaaaggctaa

SEQ ID NO: 9801 - DNA, 765 bp, Salmonella typhi
  CDS (1)...(765)
  misc_feature (1)...(765): n = A,T,C or G
atggcctacagcaaaatccgccaaccaaaactctccgatgtgatcgagcagcagctggagtttttaatccttgagggaacattgcgtcccggagaaaaactcccaccggaacgtgaactggcaaaacagttcgacgtctcccgtccctccttgcgcgaggcgattcaacgtctcgaagcgaagggattgttgcttcgtcgccagggcggcggaaccttcgtgcagagcagcctgtggcagagctttagcgacccgctggtggaactgctctccgatcaccctgaatcccagtttgacctgctcgaaacgcgccatgcgctggaaggcattgcggcttattacgcggcgctgcgcagcaccgacgaagataaagaccgtattcgcgagctgcaccacgctattgagctggcgcaagagtccggcgatctggatgccgagtccgaagccgtgctccagtatcaaatcgccgtcaccgaagcggcgcacaacgtggtattgcttcatctgctaaggtgtatggagccgatgctggcgcanaacgtgcggcagaacttcgaattgctgtatgcgcgtcgggagatgctgccgctggtgagcacgcatcgcacccgtatatttgaagccattatggccggaaaaccagaagaagcgcgtgaagcgtcacaccgacatctggcgtntatcgaagagattatgctggacagaagccgtgaggagagccgtcgtgaacgcgctntacgccgcctggaacagcgcaagaattag

SEQ ID NO: 9802 - DNA, 1428 bp, Salmonella typhi
  CDS (1)...(1428)
  misc_feature (1)...(1428): n = A,T,C or G
atgatgagtactgaaatcaaaactcaggtcgtggtacttggggcgggcccggcaggctattctgccgctttccgttgcgctgatttaggtctggaaaccgtaattgtagaacgctacaacacccttggcggtgtttgtctgaacgtcggctgtatcccttctaaagcgctgctgcacgtagcaaaagttatcgaagaagccaaagcgctggctgaacacggtatcgtcttcggcgagccgaaaaccgatatcgacaagattcgtacctggaaagagaaagtgatcacgcagctgaccggcggtctggctggtatggccaaaggccgtaaagtgaaagtggtcaatggtctgggtaaattcaccggggctaataccctggaagtggaaggcgaaaatggcaaaaccgtgatcaacttcgataacgcgatcatcgcggcgggttctcgtccgatccaattaccgtttattccgcatgaagacccgcgcgtatgggattctaccgacgctctggaactgaaagaagtgccgaagcgtatgctggtcatgggcggcggtatcatcggtctggaaatgggtaccgtataccacgcgctgggttcagagattgacgtggttgaaatgttcgaccaggttatcccggcggctgataaagacatcgttaaagtcttcaccaaacgcatcagcaagaaattcaacctgatgctggaaaccaaagtgactgccgttgaagcgaaagaagacggtatctacgtttcgatggaaggcaaaaaagccccggctgaagcgcagcgttatgatgcggttctggtggcgattggtcgtgtgccgaacggtaaaaacctcgacgcgggcaaagctggcgtggaagttgacgaccgtggctttatccgcgtcgacaaacagctgcgcaccaacgtgccgcacatcttcgctatcggcgatatcgtcggtcagccgatgctggcgcacaaaggcgttcacgaaggccacgttgccgctgaagttatcgccgggaagaaacactacttcgatccgaaagttatcccgtctatcgcgtncaccgagccanaantggcatgggttggcctgaccgagaaagaagcgaaagaaaaaggcatcagctatgaaaccgccaccttcccgtgggcagcttctggccgtgctatcgcttctgactgcgcagacggtatgaccaaactgattttcgacaaagaatctcaccgcgtgatcggcggggcgattgtcggtaccaacggcggcgagctgctgggtgaaatcggtctggcgatcgaaatgggctgtgacgcggaagatatcgcgctgaccatccatgctcacccgactctgcatgagtccgtgggcctggcggcggaaatcttcgaaggtagcattaccgacctgccaaacccgaaagcgaagaagaaataa

SEQ ID NO: 9803 - DNA, 2706 bp, Salmonella typhi
  CDS (1)...(2706)
atgctaatcaaattattaaccaaagtattcggtagccgtaacgatcgtacgctgcgtcgtatgcgtaaggccgtcagccttattaatgcgatggaaccggagatggaaaaactctccgatgacgaactgaaagcgaaaaccaacgaatttcgcgcccgtattggaaaaggcgaaagcgtagagagcttgattccggaagcgttcgcggtggtgcgtgaagccagtaaacgcgtctttgggatgcgtcacttcgacgttcagctattgggtggcatggtgctcaacgatcgttgtattgccgaaatgcgtactggtgaaggtaagacgctgaccgcaaccctgccagcctacctgaacgcgctgtccggcaaaggcgttcatgtggtgaccgtgaacgactatctggcgcagcgtgacgccgaaaacaaccgtccgctattcgaattcctcggtatgtccgttggtatcaacctgccaggtatgcctgcgccagccaaacgtgaagcttacgctgccgacatcacttacggcactaacaacgaatacggttttgactacctgcgcgacaacatggcgttcagcccggaagagcgcgtgcagcgtaaactgcattatgcgctggtggatgaggttgactccatcctgatcgatgaagcgcgtacgccgctgattatttccggcccggcggaagatagctcggaaatgtacaaaaaagtgaacaaaatcattccgcacctgattcgtcaggagaaagaagattctgacactttccagggcgaaggccacttctccgttgatgagaaagcgcgccaggttaacctgaccgaacgcggtctggtgctgatcgaagagctactggtgcaagaaggcattatggatgaaggcgagtcgctctactcgcctggcaatattatgttgatgcatcacgtcaccgccgcgctgcgcgcgcacgcgctgtttacccgtgacgtggattacattgtgaaagacggcgaagtcatcattgttgatgaacataccggtcgtaccatgcaggggcgtcgctggtctgacggtctgcaccaggcggtagaagcgaaagaaggcgttgaaattcagaatgaaaaccagacgctggcgtctattaccttccagaactacttccgtctgtatgaaaagctggccggtatgaccggtacggcggatactgaagccttcgaatttagttctatctataagctggacaccgtcgttgttccgaccaaccgtccgatgatccgtaaagatttgccggatctggtctacataaccgaagcggaaaaaatccaggccattatcgaagatattaaagaacgtaccgcgaacggtcagccagtgctggtcgggacgatttctatcgagaaatctgaagtggtctccagagagctgaccaaagcgggcatcaaacataacgtactgaacgcaaaattccacgccaacgaagcaggcatcgttgcgcaggctggttatccagcggcggtcactatcgctaccaacatggcgggtcgtggtaccgatattatgctgggcggtagctggcaggcggaagtcgctgcgctggaagcgccgacggaagaacagattgcgcagattaaagcggactggcaggtacgccatgacgcggttctggctgccggcggcctgcatatcattggcaccgagcgccatgaatcccgccgtatcgacaaccagctgcgtggccgttccggtcgccagggcgatccgggttcttcccgtttctacctgtcgatggaagatgcgctgatgcgtattttcgcctccgatcgtgtctccggtatgatgcgtaaactgggaatgaagccgggcgaagcgattgagcacccgtgggtgacgaaagctatcgctaacgcgcagcgtaaagtagaaagccgtaacttcgatattcgtaagcaactgctggaatatgatgatgtggcgaacgatcagcgccgtgcaatttatacccagcgtaacgaactgctggatgtgtctgacgtgagcgacaccattaacagcattcgcgaagatgtctttaaggcgactatcgacgcctacattccgccgcagtcgctggaagagatgtgggatatcccgggtttgcaggaacgcctgaaaaacgacttcgacctggagatgccgattgccgaatggctggataaagagccggagctgcatgaggagacgctgcgtgagcgcatcctggcgcagtccatcgaggtgtatcagcgtaaagaagaggtggttggcgctgaaatgatgcgtcatttcgaaaaaggcgtgatgctgcaaacgctcgattccctgtggaaagagcatttggcggcgatggattacctgcgtcagggtattcatctgcgcggctatgcgcaaaaagatccgaagcaggaatacaagcgcgaatccttcgctatgttcgccgcgatgctggaatcgctgaaatatgaagtgatcagtaccctgagcaaagtccaggtacgtatgccggaagaggtcgaagcgatggaaatgcagcgtcgcgaagaggcggagcgcttggcgcagatgcagcagctaagccatcaggatgacgatgccgccgtggctgccgatctggccgcccaaaccggcgaacgtaagattggacgtaacgatccttgcccttgtggttccggtaagaaatacaaacagtgtcacggtcgcctgagctga

SEQ ID NO: 9804 - DNA, 810 bp, Salmonella typhi
  CDS (1)...(810)
  misc_feature (1)...(810): n = A,T,C or G
atggccggagaggttatgagcaaacccactactatcgctgtgctgcagaaatgcaaacaagagaaaaagcgcttcgccaccattaccgcgtacgattacagcttcgccaaactcttcgccgatgaaggcatcaatgtgatgctggttggcgactcgctgggcatgacaattcangggcacgactccaccctgcctgtcaccgtggaagatatcgcctaccacacccgcgcggtacgccgcggcgcgccgaactgcctgctgctctccgacctgccgtttatggcttacgccacgccggaacaggcgtttgaaaacgcggctatcgtgatgcgtgcgggggccaacatggtcaaaatcgaaggcggcgcatggttggttgatacggtgaaaatgctcaccgaacgcgccgtgccggtgtgtggccatctgggattaactccccagtcggtgaatatcttcggcggctataaaattcagggccgcggcgatgccgggcagatactgctggatgatgcgctggccttagaagcagcgggcgctcaactgctggtgctggagtgcgtgccggttgaactggcgaagcgcgtcacggaagcgctgtcgattccggtgatcggcatcggcgcgggcaacgtcaccgacggtcagatcctggtgatgcacgatgcgtttggcatcaccggcggtcatattccaaaattcgcgaaaaatttccttgccgaggcgggcgacatgcgcgccgccgtacggcagtatatggcagaagtggagtccggcgtttatccgggcgaagaacacagctttcactaa

SEQ ID NO: 9805 - DNA, 990 bp, Salmonella typhi
  CDS (1)...(990)
  misc_feature (1)...(990): n = A,T,C or G
atgcaatatcgtacattaggcgcaaacggaccgcgagtgtcagccatcggactgggatgtatgggcatgagcgcattttacggcgctcatgacgacagcacctcaattaagacgctacattatgcgttagatcagggggtaacactgctcgataccgcagatatgtatggcccttataccaatgaaaggttagtcggaagagccatcgccgatcgtcgcgatcgggtatttttagcgacgaaatttggtatcgttctcgaccctgctaaccctatggcgcgtggcgtcaatggcagaccggagtacgttcgccgtagttgtgagcaaagcctgcaacgcctgngggtcgatcatatcgatctgtactatcaacatcgcgttgatccatcagttcccatagaagagactgtcggtgcaatggcggacctggtgcgcgagggaaaagtgcgttatctcgggctatccgaagcatcaacgcaaacgctggaacgcgcccataacgttcaccctattaccgcgctgcaaagtgagtattcgctttggtcccgcgaagcggaaatttcagcactttccacctgtgaacggttgggtataggattcgtcgcttacagcccgctgggacgcggatttctgaccggtacgattaaaacgccagaagattttgctgcgaatgacttccgtcgcacaaatcccagattcatgggtgagaacttctcgcgcaatttacgtctggctgaagcaataaaacaaatggcacgcgaaaaagagtgtacccccgcacaattagcgctggcctggctgctggcccgcaacaggcacctcgttcccattcccggcacccgccactgcgccagggtggatgaaaacctcggcgcgttatcactgaccctaagcccgcaggagctggcggcaattgaggcggtttttcctcacgacgccgcagccggcccccgctactggccggaaattatgtcgacattaaatcgctaa

SEQ ID NO: 9806 - DNA, 2541 bp, Salmonella typhi
  CDS (1)...(2541)
atgttgcggagaaaaagcatggcggggaatgaccgcgagccgattggacgtaaggggaaaccgtcacgtcctgtgaaacaaaaggtgagccgtcgtcggcagcatgacgacgattatgatgatgactatgaggatgaagaaccgatgccgcgtaaaggtaagggcaaagggcgtaagcctcgtggcaagcgcggctggctgtggctattgctaaaactgtttatcgtttttgtggtgctgttcgccatttacggcgtctatctggatcaaaaaatccgcagccgtattgatggcaaggtctggcagcttccggcggcggtatatggccggatggtgaaccttgagccagacatgcctgtcagcaaaaacgagatggtgaaattgctggaagcgacgcagtatcgtctggtgacgaagatgacccgtcccggcgaatttaccgtgcaggccaatagcattgagatgatccgtcgtccgtttgacttcccggacagcaaagaagggcaggtgcgcgcgcggctgacgttcagtgacgggcgtctggaaaccatcgtcaatctggataacaaccgccagtttggcttcttccgcctcgatccgcggcttatcaccatgctttcttcgccaaatggcgagcagcgtttattcgtcccgcgcagcggtttcccggatctgctggtcgatacgctgttggcgacggaagaccgtcgtttctatgagcatgatggcattagtctttactctatcgggcgtgcggtgctggccaacctgacggcgggacgcacggtgcagggggccagtacgctgacccagcagctggtgaagaacctgttcctctccagcgaaagatcatactggcgtaaagcgaatgaagcctacatggcgctgatcatggatgcccgttacagtaaagatcgtattcttgagctgtacatgaacgaggtctacctcggtcaaagcggggataatgaaattcgcggttttccgctggcgagcctgtattactttggtcgtccggtagaggaactgagcctcgatcagcaggcgttactggtggggatggtaaaaggggcgtcgatttataacccgtggcgtaacccgaaactggcgctggagcgtcgtaacctagtgttacgcctgttacagcagcagaaaatcatcgatcaggaactctatgacatgctgagcgcgcgtccgcttggcgtacagccgcgcggcggcgttatttcaccgcagccagcgtttatgcagatggttcgtcaggaactgcaggcgaagctgggggataaaattaaagatctctccggcgtgaagatcttcaccacctttgactccgtggcgcaggatgccgcagaaaaagccgttgtcgaaggcattccggcgttgaagaagcagcgtaaattgagcgatctggaaactgcgatggtggtagtggatcgctttagcggcgaggtacgcgcgatggttggcggggcggagccgcagtatgctggctataaccgtgccatgcaggcacgccgttccatcgggtcgctggcgaaaccggcgacctatctgaccgcgttaagtcagccgaacttataccgtctgaacacctggattgccgatgcgccgatttctctgcgccagccgaatggtcaggtctggtcgccggagaacgacgatcgtcgctacagcgaaagcgggaaagtgatgctggtggatgcgttaactcgttcaatgaacgtaccgacggtcaatctggggatggcgttaggtttaccggcggtaaccgatacctggacgaagctcggcgtgccgaaagatcagctcaatccggttccggcgatgctgttaggggcgctgaacctgacgccgatcgaagtggcgcaagcgttccagactatcgccagcggcggaaatcgcgcgccgttatcagcgctgcgttcggttattgcggaagatggtaaagtgctgtaccaaagttatccgcaagctgaacgcgccgtaccggcacaggcggcttacctgacgctctggacaatgcagcaggtcgtccagcgtggtacggggcgtcagcttggcgcgaaatatccgggtctgcatctggtgggtaaaaccgggacgacaaacaacaatgtcgatacctggtttgccggtatcgacggcagccaggtgactatcacctgggtaggccgtgataacaaccagccaacgaaattgtacggtgccagcggcgcgatggcgatttaccagcgctatctggcgaaccagacgccgacgcctttagttctgacgccgccggaagatgtggtggatatgggcgttgattacgacggtaattttgtctgtaacggcggtatgcgcactctgccggtctggacggacgatccaaatacgctgtgccagcagggcgagatgatgcagcagcaacagcagccgtcaggcaatccgttcgatcagtcgtctcagccgcagcagcctgcgcagcaacagccgccgaaagaagagaagagcgacggcgttgccggctggattaaggagatgtttggcggcaattaa

SEQ ID NO: 9807 - DNA, 891 bp, Salmonella typhi
  CDS (1)...(891)
atgcgtgagttatatcctcttactcgccgccgtttattaacggcgatggcgctctcgccgctgctgtggcaaatgaatacggcgcaggctgccgctatcgatccccgccggattgtggcgctggagtggctgccggttgagctgctgctggcgctcggtattacgccttatggtgtggcggacgtgccaaattataagctgtgggttagcgaaccgccgttgccggattcggtgattgatgtgggtcttcgcactgaacccaatctcgaactgctgacggagatgaagccgtcgtttatggtgtggtcggcaggttacggaccctcgccggagaaactggcgcggatcgcgccggggcgcgggttcgattttagcgacggcaaaaagccgctggcggtggcccgacgctcgctggttgaactggcgcagacgctgaatctggaagctgcggcagaaaaacatctggcgcaatacgatcgcttcatcgccagccagaagccacgttttatccgccgcgggggacgtccgttactgatgacgacgcttatcgatccgcggcatatgctggtgctcggcccgaattgcctgttccaggaggtgctggacgagtatggcatcgtcaatgcctggcagggtgaaaccaacttttggggcagtacggcggtcagcatcgatcggctggcgatgtataaagaagcggatgtgatctgcttcgatcacgggaatagcaccgatatgaacgcgctgatggcaacgccgctgtggcaggccatgtcgtttgtccgcgccgggcgttttcaccgggtgcccgccgtttggttctatggcgcgaccctctccacgatgcattttgtccgcatcctgaataacgtgttgggaggcaaagcgtga

SEQ ID NO: 9808 - DNA, 1281 bp, Salmonella typhi
  CDS (1)...(1281)
  misc_feature (1)...(1281): n = A,T,C or G
atgagtaagtctgaaaatctctatagcgcggcccgcgagctgatccccggcggcgtgaactcccctgttcgcgccttcactggcgtgggcggcaccccgctgtttatcgaaaaagcggacggcgcgtatctgtacgatgtcgatggcaaagcatatatcgactatgtcggttcctgggggccaatggtactggggcataaccatccggctatccgcaatgcggtgatcgaagctgcggagcgcggtttaagcttcggcgcgccaaccgaaatggaagtaaaaatggcggaactggtgaccaacctggtgccgaccatggacatggtgcgcatggtgaactccggcaccgaagcgacgatgagcgcgattcgcctggcgcgtggttttactggccgcgataagattatcaaattcgaaggctgctaccacggccacgcagactgtctgctggtcaaagccggttctggcgcgctgacgctcggtcagccgaactcgccgggcgtgccggcagatttcgcgaaacatacgctgacctgcacttataacgatctgacgtcagtgcgcgcggcgtttgaacaatatccgcaggaaatcgcctgtatcatcgtcgaacccgtggcgggcaatatgaactgcgtcccgccgctgccggaattcctgccgggcctgcgtgccttgtgcgatgagttcggcgcgctgctgattatcgacgaagtaatgaccggttttcgcgtagcgctggccggagcccaggattactacggcgtcgtgccggacctgacctgtctgggtaaaatcatcggcggcggnatgccggtaggcgcgtttggcggtcgtcgcgatgtaatggatgcgctggcgccgacgggcccggtttaccaggcgggcaccctttccggcaacccgattgcgatggcggccggtttcgcctgcctgaatgaagtcgcccagcccggcattcatgaaacgctggatgagctcaccacccgcctggcggaaggtttgctggaagctgccgaagaagcgaatattccgctggtggttaaccatgtcggcggcatgttcgggattttcttcaccgacgctgagagcgtaacttgctatcaggacgtgatggcgtgcgacgtggaacgctttaagcgtttcttccacctgatgctggaggaaggcgtgtatctggcgccatcggcgtttgaggcgggttttatgtcggtcgcacacagcatggacgacattaataatactattgacgccgcgcgtcgggtgtttgcgaaattgtaa

SEQ ID NO: 9809 - DNA, 726 bp, Salmonella typhi
  CDS (1)...(726)
  misc_feature (1)...(726): n = A,T,C or G
atggcaactgtttccatgcgcgacatgctcaaggctggtgttcactttggtcaccagacccgttactggaacccgaaaatgaagcctttcatcttcggcgcgcgtaacaaagttcacatcatcaaccttgagaaaactgtaccgatgttcaacgaagctctggctgaactgaacaagatctctgctcgtaaaggtaaaatccttttcgttggtactaaacgcgctgcaagcgaagcggtgaaagaagctgctaacagctgcgaccagttcttcgtgaaccatcgctggctgggcggtatgctgactaactggaaaacagttcgtcagtccatcaancgtctgaaagacctggaaactcagtctcaggacggtactttcgaaaagctgaccaaganagaagcgctgatgcgtactcgtgagcttgagaaactggaaaacagcctgggcggtatcaaagacatgggcggtctgccggacgcnctgttcgttatcgatgctgaccacgagcacattgctatcaaagaagcgaacaacctgggtatcccggtatttgctatcgttgataccaactctgatccggacggcgttgacttcgttatcccgggtaacgatgacgcaatccgtgctgttagcctgtacctgggcgctgtcgctgcaaccgttcgtgaaggccgttctcaggatctggcttcccaggcggaagaaagcttcgtagaagccgagtaa

SEQ ID NO: 9810 - DNA, 924 bp, Salmonella typhi
  CDS (1)...(924)
  misc_feature (1)...(924): n = A,T,C or G
atggccccctttttcacttttatatctgtgcggtttgatgccgggcagatcaaatctttcgaggattttagaatggctgaaattaccgcatccctggtaaaagagctgcgtgagcgtaccggcgcaggcatgatggattgcaaaaaagcgctgactgaagcgaatggcgacattgagctggcaatcgaaaacatgcgtaagtccggcgctatcaaagcggcgaacaaagcangcaacgtggctgctgacggcgtaatcaaaaccaaaatcgacggtaacgtcgctttcattctggaagttaactgccagactgacttcgtggctaaagatgctggcttccaagcatttgctgacaaagtgctggacgccgctgttgctggcaaaatcactgacgtagaagtcctgaaagcgcagttcgaagaagagcgcgttgctctggttgcgaaaatcggcgagaacatcaacattcgtcgcgtcgcttccctggaaggcgacgtgctgggttcttaccagcacggtgcgcgcatcggcgttctggttgccgctaaaggcgctgacgaagagctggttaagcagctggcgatgcacgttgcggcaagcaagccggaattcgttaagccggaagacgtgtctgctgacgtggtagagaaagagtaccaggtacagctggacatcgcgatgcagtccggtaagccgaaagaaatcgcagagaaaatggttgaaggccgcatgaagaaattcaccggcgaagtttctctgactggtcagcctttcgtcatggaaccgagcaaatctgttggccaactgctgaaagagcacaacgctgacgtgactggcttcatccgctttgaagtgggcgaaggcattgagaaagtcgagactgactttgcagcagaagttgctgcgatgtctaagcagtcctga

SEQ ID NO: 9811 - DNA, 558 bp, Salmonella typhi
  CDS (1)...(558)
gtgattagcgatatcagaaaagatgctgaagtacgcatggaaaaatgcgttgaagcgttcaaaacccaaatcagcaaagtgcgcacgggtcgtgcttctcccagcctgctggatggtattgtcgtagaatactatggcactccgaccccgctgcgccagttggcaagcgtaacggtagaagactcccgtaccttaaaaattaacgtgtttgaccgttctatggggccagccgttgaaaaagcgatcatggcgtcagacctcggtttgaatccaagctctgcgggcaccgatattcgcgttccgctgccgccgctgaccgaagaacgtcgtaaagatctgacgaaaattgtccgtggagaagcggagcaggcgcgtgtcgccgtacgtaacgtccgccgtgatgcgaacgataaagtaaaagctctgctgaaagataaagcgatcagtgaagatgacgatcgtcgctctcaggaagaagtacagaaaatgaccgacgcggcaattaagaaagtggatgcggcgttggcagataaagaagcagaactgatgcagttctga

SEQ ID NO: 9812 - DNA, 759 bp, Salmonella typhi
  CDS (1)...(759)
atgttgtctgcaactcaaccagtaagcgaaaatttgccagcacatggctgccgtcatgttgccataattatggatggcaatggccgctgggcgaaaaagcaagggaagatccgggcctttgggcataaagccggggcgaagtccgtccggcgagcggtctcttttgctgccaataacggtattgatgcgttaacgctgtatgcctttagtagtgaaaactggaaccgaccagcgcaggaagtgagcgcgttaatggagctgtttgtgtgggcgctggatagcgaagtcaaaagcctgcaccgccataacgttcgcctgcgtattatcggcgatatcagccgatttaactcacgtttacaagaacgtattcgcaaatcagaagcgcttaccgcccataatacggggctaacgttgaatatcgctgcgaattacggcggacgttgggatattgtccagggagtccgacaactggcggagctggtgcaggctggagtgctgcgccccgatcagattgatgaagagagactaggccagcaaatctgtatgcatgagctggcgcctgtggatttagtaattaggactgggggagagcatcgcattagtaactttttgctttggcaaattgcctatgccgaactttactttacggatgttctctggcccgatttcgatgaacaagactttgaaggtgcgctgcatgcctttgctaatcgagagcgtcgtttcggcggtaccgagcctggtgatgacaaagcctga

SEQ ID NO: 9813 - DNA, 372 bp, Salmonella typhi
  CDS (1)...(372)
  misc_feature (1)...(372): n = A,T,C or G
gtgctggactttgaagaaggtcgttttctgcgtgcggtgaaaaatgtctccgtcaacgagccgtttttccaggggcatttcccgggcaaaccgattttgccaggcgtgctgattctggaagcgatggcgcaggcaaccggtattctggcgtttaaaagcgttggtaaactggaacctggcgaactgtattatttcgcgggtattgatgaagngcgctttaagcgtccggnggtgccaggcgatcagatgatcatggaagtcactttcnagaaaacgcgccgtggcctgacccgctttaaaggggtngcgctggncgacggtaaagttgngtgcgaagcaaccatgatgtgtgctcgtagccgggaggcctga

SEQ ID NO: 9814 - DNA, 1149 bp, Salmonella typhi
  CDS (1)...(1149)
  misc_feature (1)...(1149): n = A,T,C or G
atggcggcacagcgtcctttaacgattgccctgntcgccggtgaaacgtccggcgatattcttggcgcangcttaattcgtgcgctgaaagcgcgcgtacccaacgcccgttttgtgggcgtngcggggccgcgtatgcaggccgaanggtgtgaagcctgntacgagatggaaganctggcggtcatgggcattgttgaagtgctcggacgtttacgccgtttgttgcatatccgcgccgatctgacccgccgttttaccgaactcaagcccgatgtctttgtcgggattgatgcccctgatttcaatattaccctcgaaggtaatctgaaaaaacaagggattaagaccattcattatgtcagcccgtccgtttgggcctggcgacagaaacgcgttttcaaaataggcagatccacccatatggtgttggcttttctgcctttcgaaaaagcgttttacgataaatttaacgtcccgtgccgctttatcggtcacaccatggcggatgccatgccgctggacccggataaaaatgcggcgcgcgacgtgctgggtatcccgcatgacgcccattgtctggcgctactgccaggcagccgtggcgcggaagtggaaatgctcagcgccgacttcctgaaaaccgcacaattgctgcgacagcgctatcccgatctggaagtggtagtgccgctggtgaacgcgaaacgccgcgagcagtttgaaaaaattaaagcggaggttgcgccggatctcgccgttcatttgctggacggcatggcgcgcgaggcgatgatcgccagcgacgcggcgttgctggcctcaggcacggcggcactggagtgtatgctggcaaaatgcccgatggtagtggggtatcgtatgaagcccttcactttctggctggcgaaacgtctggtgaaaacggagtatgtgtctttgcctaacctgctggcgggaagagaattagtcaaagagctgttgcaggaagagtgcgaaccgcaaaaactcgccgaagcgctgttgccgctactggcgaacggtaaaaccagccatgcgatgcacgacaccttccgtgaattgcatcagcagatccgctgtaatgccgatgagcaggcggcagatgccgtcctggagttagcacaatga

SEQ ID NO: 9815 - DNA, 3483 bp, Salmonella typhi
  CDS (1)...(3483)
  misc_feature (1)...(3483): n = A,T,C or G
atgtctgaaccacgtttcgttcacctgcgggtgcacagcgactactctatgatcgatgggctggcgaagaccgggccgctggtganaaangcggnctcattangtatgcctgcgctggcgatcancgattttaccaacctctgcggtctggtgaagttctacggagcgngtcatggcgcgggcattnnacccntcgtcngngcggactttaacgttcacaacganctgctgggagatgagctgactcatctgacggtactggcggcgaataatacgggataccagaacctgacgttgctgatctcgaaagcgtatcagcgcggctacggcgcggcaggcccgattatcgagcgcgactggctggtagagcttaaagaaggtttgatcctgctttccggcgggcgcatgggcgacgtaggccgctgtctgctacgcggcaaccaggcgctggtggaggagtgcgttgctttctatgaagcgcattttcccgatcgctacttcctggaactgatccgtaccggcagacaggatgaagagacctatctccatgctgcggttgagctggctgaggcacgtggtttgccggttgtcgcgacaaacgatgtccgtttccttgaaagcgatgattttgacgcccatgagattcgtgtcgcgattcacgacggtttcacgctcgacgatcctaaacgtccacgcaattattcaccgcagcagtatatgcgcagtgaagaagaaatgtgcgagctgttctccgatattccggaggcgctggaaaatacggtggagattgccaaacgctgcaacgtaacggtgcgtctgggtgaatatttcctgccgcagttcccgaccggcgatatgaccaccgaagattatctggtcaaaaaatcgaaagaggggctggaagagcgtctggctttcctgtttccggacgaagaagagcgcaaaaagcgtcgcccggaatatgacgagcgtctggatattgaactacaggttatcaaccagatggggttccctggctacttcctcatcgtgatggagtttatccagtggtcaaaagataacggcgtgccggtagggccgggacgtggttccggggccggttcgctggtggcctacgcgctgaaaattaccgaccttgatccgctggaatttgacctgctgttcgaacgtttcctgaacccggaacgtgtctcgatgcctgacttcgacgttgacttctgtatggagaaacgcgaccaggtgattgagcacgtcgcagacatgtacgggcgtgatgcggtatcgcagattatcaccttcggtacgatggcggcgaaagccgttatccgcgatgtgggccgcgtgctggggcatccgtacggttttgtcgatcgtatctcgaagctggtgccgcccgatccgggcatgacgctggcaaaagcctttgaagcggaaccgcaactaccggaaatttacgaggcggatgaagaggtcagagcgctgatcgatatggcgcgtaagctcgaaggcgtcacgcgtaacgccggtaagcacgctggcggcgtggtcatcgcgccgaccaaaattaccgactttgcgccgctgtactgcgatgaagagggcaagcatccggttacccagtttgataaaagcgacgtggaatatgccgggctggtgaagttcgacttcctcggtttgcgtacgctgactatcatcaactgggcgctggagatgatcaacaagcggcgggcgaagaatggcgagccaccgctggatatcgccgccattccgctggacgataaaaaaagcttcgacatgctgcaacgctcggaaaccacggcggtcttccagcttgaatcgcgcggtatgaaagacctgatcaagcgtctgcaacctgactgctttgaagatatgatcgcgctggtggccctgttccgtcccggcccgttgcagtcagggatggtagataactttatcgatcgtaagcacggtcgtgaagaactctcttacccggacgttcagtggcagcatgaaagcctgaagccggtactggagccgacctacggcatcattctgtatcaggaacaggtgatgcagattgcccaggtactttccgggtatactctcggtggcgcggatatgctgcgtcgtgcgatgggtaagaaaaagccggaggagatggccaaacagcgttccgtttttgaagagggcgcgaaaaagaacggtatcgacggcgaactggcgatgaaaatctttgacctggtggagaaattcgccggttacgggtttaacaaatcgcactccgccgcttatgcgctggtttcttatcagacgctatggctaaaggcgcactatccggctgaatttatggcggcggtgatgactgccgatatggacaacaccgagaaggtcgtcggcctggtagacgagtgctggcggatgggactgaaaattctgccgccggatattaactccggattgtaccatttccacgttaatgatgagggcgagatcgtctacggcatcggcgcgatcaaaggcgtcggcgaagggccgatcgaagcgatcatcgacgcgcgtaatcagggcggctatttccgcgaactgtttgatctgtgcgcgcggaccgacaccaaaaagctcaaccgccgggtgctggaaaagctgatcatgtccggggcgttcgaccgcctggggccgcaccgcgccgcgctgatgaactcattgggcgatgcgctgaaagccgccgaccagcacgccaaagcggaagctatcggtcaggcggatatgttcggcgtactggcggaagagccggagcaaatcgaacaatcctatgccagctgccagccgtggccggagcaggtggtgttagatggggaacgtgaaacgttggggctgtacctgacgggccaccctatcaatcagtatttaaaagaaattgagcgctatgtcggcggggtaaggctcaaagacatgcatccgacagaacgtggtaaagtcaccacggctgcggggctcgtgattgccgcaagggttatggtcaccaagcgcggcaatcgtatcggcatctgtacgctggatgaccgttccgggcgtctggaagtgatgttatttaccgacgcgctggataaataccagcagttgctggaaaaagaccgcatacttatcgtcagcggacaggtcagctttgatgacttcagcggggggcttaaaatgaccgcccgcgaagtgatggatattgacgaagctcgcgaaaaatacgctcgcgggcttgctatctcgctgacggacaggcaaattgatgaccagcttttaaaccgactccgtcagtctctggaaccccaccgctcggggaccattccagtacatctctactatcagagggcggatgcgcgtgcgcggctgcgttttggcgcaacgtggcgtgtctctccgagcgatcgtttacttaacgatctgcgtggcctcattggttcggagcaggtggaactggagtttgactaa

SEQ ID NO: 9816 - DNA, 1044 bp, Salmonella typhi
  CDS (1)...(1044)
  misc_feature (1)...(1044): n = A,T,C or G
atgcgtattgaagaagatctgaagttaggtttcaaagacgttcttatccgtcctaagcgttctaccctcaaaagccgttccgatgtcgaactggaacgtcaattcacctttaaacactcaggtcagacctggtctggcgtaccgattatcgcggccaatatggataccgtcgggacgtttgaaatggcgcaagcgttggccgggtttgatattctgaccgctgtacataaacattatagcgttgaagagtgggcagcttttatcaacacggcttcggctgatgttctcaagcatgtgatggtttccaccgggacctctgatgctgatttcgaaaaaaccgtgcagattctggcgctgaatcctgcgctgaactttgtctgtattgatgtggccaatggctattcagaacattttgtgcagttcgtcgcaaaagcgcgtgaagcatggccgtcaaaaacaatctgcgcaggcaatgtggtaacgggcgagatgtgcgaagagcttatcctctccggcgccgatatcgtgaaagtgggaattggtcccggctccgtatgcacgacgcgtgtaaaaaccggcgtcggttatccgcaactgtcggcggttatcgaatgtgctgacgcggcgcatggcctgggcggcatgatcgtcagcgatggcggctgcaccatgccaggcgacgtagcaaaagccttcggcggcggcgcggatttcgttatgttgggcggtatgctggcgggtcacgaagagagcggcggcagcgtggtagaagagaatggcgagaaattcatgctgttctacggcatgagttcggaatctgcgatgaaccgtcatgtcggcggcgttgcgaaataccgcgcggcagaaggtaaaacggttaaattgccactgcgtgggccggtgggcaataccgcccgcgatatcctgggcggtctacgctcagcctgcacttatgtcggcgcgtctcgcctgaaagagttgaccaaacgcaccacctttattcgggtgcaggaacaagaaaaccgcatnttcaatagcctctaa

SEQ ID NO: 9817 - DNA, 1065 bp, Salmonella typhi
  CDS (1)...(1065)
atgcgcgttaccgatttttcctttgaactacccgaatccttgattgcccactacccacagccggaacgcagtcgctgccgtttgctgtcattagaggggccgacgggcgcgctgacgcacggtactttcaccgatctgctcgataagctcaaccctggcgatttgctggtcttcaataatacccgcgtgatcccggcgcgcctgtttggccgtaaagccagcggcggcaagatagaagtgctggtcgaacgtatgctcgatgataaacgcatcctggcgcatattcgcgcttctaaagcgccaaaaccgggcacggaactgctactgggcgatgacgaaagtattcacgcgaccatgaccgcgcgtcacggcgctctgtttgaagttgagtttaatgacccgcgtccggtgctggatattctcaacgccatcggccatatgccgttgccgccgtatatcgaccgtccggacgaggacgccgaccgcgaactgtatcagacggtttacagtgaaaaaccgggcgccgtcgccgcgccgaccgcggggctgcactttgatgagccgctgctggcggcgcttcgtgagaaaggtgtcgaaatggcgtttgttacgctacacgtcggcgcgggcactttccagccagtgcgtgtcgataccattgaagatcacatcatgcactccgaatatgctgaggtgccgcaagaggtggtcgacgcggtgctggcggcgaaagcgcgcggcaaccgggttatcgccgtcggcacgacctcggtacgctcactggagagcgcggcgcaggcggcaaaaagcgatttgatagagccattcttcggcgatacgcaaatctttatttatccaggttatcaatacaaagtgattgatgcgctgatcaccaacttccatctgccggaatcgacgttgattatgctggtttccgcatttgccggttatcaacacaccatgaatgcctataagactgcggtagaacaaaaatatcgcttttttagctacggggacgcgatgtttatcacgtgcaatccgcaggctatttctgagcgtccgtaa

SEQ ID NO: 9818 - DNA, 1134 bp, Salmonella typhi
  CDS (1)...(1134)
gtgataatgaaatttgagttagataccaccgatggtcgcgcgcgtcgcggtcgtctggtgtttgatcgtggcgtagtggaaacgcctgcttttatgcctgtgggtacttacggtacggtaaaaggcatgacgccggaagaagtggaagcgaccggcgcgcagattattctcggcaacactttccacctgtggctgcgcccgggtcaggaaatcatgaagctgcacggcgacctgcacgatttcatgcagtggaaagggccgattctcaccgattccggcggcttccaggtcttcagcctcggcgatattcgtaagattaccgagcaaggcgtgcacttccgtaacccgatcaacggcgatccgattttcctcgatccggaaaagtcgatggagatccagtacgatctcggttccgatatcgtgatgatctttgatgaatgtacgccgtacccggcagactgggactatgctaaacgctcgatggagatgtcgttgcgttgggcgaagcgtagccgcgaccgttttgatagccttggcaataagaatgcgctttttggcatcattcagggcagcgtttacgaagatttacgcgatatctcggtgaaaggtctggtagagattggctttgatggctacgctgtcggcggtttggctgtcggtgagccgaaagcagatatgcaccgcattctggagcacgtttgcccgcagatcccggctgacaaaccgcgttacctgatgggcgtgggtaaaccggaagatctggtggaaggggtgcgtcgcggtattgatatgtttgactgtgtcatgccaacgcgaaatgcccgtaatggtcatctgtttgtgaccgacggcgtggtgaagattcgtaatgcaaagcataaaagcgacatcagcccgcttgacgccgagtgcgattgctacacctgtcgcaattattcacgcgcttacttgcatcatctcgaccgttgcaacgaaatattaggtgcgcgtctcaataccattcataacttgcgttactaccagcgtttgatggcgggtttacgcaaggctattgaagagggtaaattagagagcttcgtaaccgagttttaccaacgtcaggggcgacccgttccacctttgaacgttgattaa

SEQ ID NO: 9819 - DNA, 1320 bp, Salmonella typhi
  CDS (1)...(1320)
atgacccatcagttaaaatcgcgcgatatcatcgccctgggctttatgacatttgcgctgttcgttggcgcaggcaatattatctttcctcctatggtcggtttgcaggcgggtgaacacgtctggacagccgctattggctttctgattaccgccgtagggctaccggttcttactgttgtggcgctggcgaaagtcggcggcggcgtagacagcctcagtacgccgattggtaaagtggcgggactcctgctggcgaccgtttgctatctggccgtcgggccgttatttgcgacgccgcgtaccgcgacggtgtcgtttgaggtcggtatcgctccgttgaccggcgattctgcaatgccgttgctgatttacagcgtggtctatttcgctatcgttattctggtttccctctatccgggtaagctgctggatacggtagggaatttcctggcgccgttgaaaattattgcgctggtcatcctgtccgtcgcggctatcgtttggcctgccggtccaatcagcaacgccctggacgcttatcagaatgcggccttttctaacggatttgtgaacggctatctgacgatggatacgctgggcgcgatggtgtttggtatcgttattgtgaacgcggcgcgttctcgcggcgtgaccgaagcgcgcctgttgacgcgttacacggtctgggccggcctgatggcgggcgtggggctgacgctgctttaccttgccttgtttcgcttaggttctgacagcgcgacgctggtcgatcagtcagcgaacggcgcagcgattcttcatgcctacgttcagcatacctttggcggcgcgggaagcttcctgctggcggcgctgatctttatcgcgtgtctggtgacggcggtggggctgacctgcgcctgcgctgagtttttcgcgcagtatattccgctgtcttaccgcacgctggtctttattctcggcggcttctctatggtggtgtcaaatctcggactgagccatctgattcaaatctccattccggtgctgacggctatctatccgccgtgtatcgcactggttgtattaagttttacccgctcatggtggcataattccacccgtatcatcgcgccggccatgtttatcagcctgctttttggtatccttgacggcatcaaagcatctgcctttggcgatatgctgccagcctggagtcagcgtttgccgctggcggaacagggactggcgtggttgatgccaacggtggtgatggtgatcctggcgattatctgggatcgcgcggcgggtcggcaggtgacctccagcgctcactaa

SEQ ID NO: 9820 - DNA, 1392 bp, Salmonella typhi
  CDS (1)...(1392)
gtgttgataggtcagaaattgatggaaagcaataataagctaaagcgtgggctgagcacccggcacattcgctttatggcattaggttcggcaatcggcaccggcctgttttacggctcggcggacgccatcaaaatggcggggccgagcgtgctgttggcctatattattggcggggtcgcggcatatatcattatgcgcgcattgggggaaatgtccgttcacaaccctgccgccagctcattttcgcgctatgcgcaggaaaacctcggcccgcttgcgggctacattaccggctggacctactgttttgagatcctgatcgtcgccattgctgacgtgaccgcgttcggcatttacatgggggtctggttccccgccgtgccgcactggatttgggtgcttagcgtggtgctgatcatttgcgccatcaacctgatgagcgtcaagatgttcggcgagctggagttttggttctccttcttcaaagtcgccaccattattatcatgattgtcgcgggtatcggcatcattgtgtggggaattggcaacggcgggcagccgactggcattcataacctgtggagcaacggcggcttcttcagcaatggctggctgggaatgatcatgtcgctgcaaatggtgatgttcgcttacggcgggattgagattatcggtatcaccgccggggaagcgaaagacccggagaaatccattccgcgcgccattaactcagtaccgatgcgtatcctggtattttatgtcggcacgctgttcgtcattatgtctatctatccgtggaatcaggtcggcacaaacggcagcccatttgtgctgacgttccagcatatggggattacctttgccgccagcattctgaactttgtggtattgaccgcctcgctttccgctatcaactccgatgtgtttggcgtaggccgtatgctgcatggtatggcggagcaggggagcgcgccgaaagtctttgccaaaacgtcacgccgtggtattccgtgggtcactgtgctggtgatgacgattgcgctgctgtttgcggtttacctgaactacatcatgccggaaaacgtcttcctggtgattgcctcgctggtgacgtttgcgacggtatgggtatggattatgatcctgctgtcgcaaatcgccttccgtcgtcgtttaccgccggaagaggtaaaagcgctgaagtttaaggtgccgggcggtgtcgtaacgacgatagcgggtctgattttcctggtcttcattattgcgcttatcggctaccatccgaatacccgcatctcactgtatgtgggcttcgcctggatagttctgctgttgattggctggatatttaaacgccgtcgcgaccgtcaattggcgcaggcgtag

SEQ ID NO: 9821 - DNA, 813 bp, Salmonella typhi
  CDS (1)...(813)
atggctattaaactcattgctatcgacatggatggcacccttttgctgcccgatcacaccatttctccggcggttaaaaacgccattgccgctgcgcgtgaaaaaggggtaaacgtggtgctgaccacaggccgtccgtatgcgggtgtgcacagctatctgaaagaacttcatatggaacaacccggcgactactgcatcacctacaacggggcgctggtgcagaaagcaggggatggcagtacggtagcgcaaacagcgctcagctatgatgactaccgttatctggaaaaactatcccgtgaggtgggttctcacttccacgcattagatcgaaatacgctttataccgctaaccgcgatatcagctactacacggtgcatgagtcgtatgtggcgaccattccgctggtattttgtgaagcggagaagatggacccgaacactcagttcctgaaagttatgatgatcgatgagcctgccgttctcgaccgagcgattgcgcgtataccggcagaggtgaaggaaaagtataccgtgctgaaaagtgcgccgtacttccttgaaatcctcgataaacgggttaataaaggcaccggcgtaaaatcactggccgaggcgctgggtattaagccagaggaggtgatggcgattggcgatcaggaaaacgacattgcgatgatcgaatacgccggtatgggcgtggcaatggacaacgccattccgtcggtcaaagaggtggctaactttgtgactaaatcgaaccttgaagatggtgttgcctgggcgattgaacaacatgttctgtcctga

SEQ ID NO: 9822 - DNA, 2415 bp, Salmonella typhi
  CDS (1)...(2415)
atgtcgaattcttatgactcctccagtatcaaagtcctgaaagggctggatgcggtgcgtaagcgcccgggtatgtatatcggcgacacggatgacggcaccggtctgcaccacatggtattcgaggtggtagataacgctatcgacgaagcgctcgcgggtcactgtaaagatatcgtcgtgactattcacgccgataactccgtgtccgtaacggatgatggccgtggcattccgaccgggattcatccggaagaaggcgtctcggcggcggaagtgatcatgaccgttctgcacgcgggcggtaaatttgacgataactcctataaagtctccggtggtctgcacggggtgggcgtctcggtagtcaacgctctgtcgcaaaaactggagctggttatccagcgagatggcaaaattcaccgtcagatctacgagcacggcgtgccgcaggcacccctggccgtcactggcgataccgataaaaccggcacgatggtacgtttctggccgagccacgaaaccttcactaacgtcactgaatttgaatatgagatcctggcgaaacgcctgcgtgaactgtcattcctgaactcaggcgtttccatccgcctgcgcgacaagcgcgatggcaaagaagatcatttccactacgaaggcggcatcaaggcgtttgttgaatatctcaacaagaataaaacgccgatccacccgaatatcttctatttctccaccgaaaaagacggtatcggcgtggaagtagcgctgcagtggaacgatggtttccaggaaaacatctactgctttaccaacaacattccgcagcgcgacggcggtactcacctggcaggcttccgtgcggcgatgacccgcacgctgaacgcctacatggacaaagaaggctacagcaaaaaagccaaagtcagcgccaccggcgacgatgcccgtgaaggtctgattgcggtggtttccgtaaaagtgccggacccgaaattctcctcacagaccaaagataagctggtctcttccgaggtgaaatcggcggtagaacagcagatgaacgaactgctgagcgaatacctgctggaaaacccatctgacgcgaaaatcgtcgtcggcaaaattatcgacgccgcgcgtgcgcgtgaagcggcgcgtcgcgcccgtgaaatgacccgtcgtaaaggcgcgctggatttagccggtctgccgggcaaactggcggattgtcaggaacgcgacccggcgctgtccgaactgtacctggtggaaggggactccgcgggcggctctgcgaagcaggggcgtaaccgcaagaaccaggcgattctgccgctgaaaggtaaaatccttaacgtcgagaaagcgcgcttcgacaagatgctttcctcccaggaagtggcgacgctgatcaccgcgctgggctgcggtatcggtcgcgacgagtacaacccggacaagctgcgctatcacagcatcatcatcatgaccgatgcggacgtcgacggctcgcacatccgtacgctgctgttgaccttcttctatcgtcagatgccggaaatcgtcgagcgcggccacgtttacattgcccagccgccgctgtacaaagtgaagaaaggcaagcaggaacagtacatcaaagacgacgaagcgatggatcagtaccagatttccatcgcgcttgacggtgcgactctgcacgcgaacgctcatgcgccagcgctatccggcgaagcgttagaaaaactggtctctgaatataacgccacgcagaaaatgattggtcgtatggagcgtcgcttcccgaaagcgctgctcaaagagctggtgtatcagccaactctgaccgaagccgatctttctgatgagcagactgtaacgcgttgggtgaatgcgctgattaccgagctgaatgagaaagagcagcacggcagtcagtggaagttcgatgttcatactaatacggaacagaatctgttcgagccgatcgttcgcgtgcgtacgcatggcgtggataccgattatccgttggatcacgagtttgtgaccggcgcggaatatcgtcgtatctgcacgctgggcgagaagctgcgcggtctgattgaagaggacgcgttcatcgaacgcggcgagcgtcgccagccggtaaccagcttcgagcaggcgctggagtggctggtgaaagaatcacgtcgcggtctggctatccagcgttataaaggtctgggtgaaatgaacccggatcagctgtgggaaaccaccatggacccggaaagccgccgtatgctgcgcgtgaccgtcaaagatgcaattgctgccgaccagctgttcactacgctgatgggtgatgccgttgagccgcgtcgtgcctttatcgaggagaacgccctgaaagcggcgaacatcgatatttaa

SEQ ID NO: 9823 - DNA, 1101 bp, Salmonella typhi
  CDS (1)...(1101)
atgaaatttaccgttgaacgtgaacatttattaaaaccgcttcagcaggtcagcggcccgctgggcggtcgtcctacgctgccgattctcggtaacctgctcctccaggtagcggacggtacgctttctctgaccggcaccgatcttgaaatggagatggtcgcgcgcgttacgctttctcagccgcatgagccaggcgccactaccgtgccggcgcggaaattctttgatatctgccgcggcctgccggagggcgcggagattgccgttcagttggaaggcgatcggatgctggtgcgttctggccgtagccgcttctcgctgtctacgctgcctgccgccgatttcccgaatcttgacgactggcaaagcgaagttgaatttacgctgccgcaggccacgatgaagcgcctgattgaagcgacccagttttcgatggcccatcaggatgtgcgctactacttaaacggtatgctgtttgaaacggaaggtagcgaactgcgcactgttgcgaccgacggccaccgtctggcggtgtgctcaatgccgctggaggcgtctttacctagccactcggtgattgtgccgcgtaaaggcgtgattgaactgatgcgtatgctcgacggtggcgaaaacccgctgcgcgtgcagatcggcagtaataatatccgcgcgcacgtcggcgactttatctttacctcgaagctggtggatggtcgtttcccggattaccgtcgcgtattgccgaagaatccggataaacatctggaagcgggctgcgatatcctcaagcaggcgtttgcccgcgcagcaatcctctcgaatgagaaattccgcggcgtgcgtctgtacgtcagtgagaatcagctcaaaatcaccgccaataacccggaacaggaagaagcggaagagattctggacgtgagctatggcgggacggagatggaaatcggctttaacgtcagttacgtgctggacgtgctcaatgcgctgaagtgcgaaaccgtgcgcattatgctgacggattccgtatccagcgtacagattgaggatgcggcgtcacagtcggctgcctatgttgttatgccaatgcgcttgtaa

SEQ ID NO: 9824 - DNA, 798 bp, Salmonella typhi
  CDS (1)...(798)
  misc_feature (1)...(798): n = A,T,C or G
atgcagcctgacctgcactgccgcacgcttgcggcgcatacgttaaaacactttcgcgcgctctccccgcttacgcactgtatgacgaatgacgtcgtacaaacgtttaccgccaatacgttgctggcgctgggcgcttcacccgccatggtgattgatcctgtcgaggccagaccgtttgccgccatcgccaacgccttgctgattaatgtcggaacattaactgcctcacgcgctgacgcgatgcgtgcggcggtagaaagcgcttatgatgccaaaacgccgtggacgcttgatcctgtcgcggtgggcgcgctggaatttcgtcggcgattttgcntggatctcttgtccctgcgcccggcggcaatacgcggcaacgcctcggaaatcctggcgttatccggcatggcgctgggcggacgcggcgtagataccaccgaggcggcgttggccgcacnncctgcggcgcaggcgctggcgcgtcagatagactgcatcgttgtggttaccggagagatagattacgtcactaatggtcagcgcacgctgagcattcccggcggcgatccgttaatgactcgcattgtaggcaccggctgcgcgttgtcggcggttgtcgccgccagttgcgcgttaccgggcgccgcgctggacaatgtcgcgtcggcctgctgctggatgaaactggctggacaggtcgcggcagagcgtagcgaaggaccgggcagcttcatcccggcttttcttgatgcgctctatcatctggatatggaggcggccaatgcaacgaattaa

SEQ ID NO: 9825 - DNA, 1365 bp, Salmonella typhi
  CDS (1)...(1365)
atgagccataacgacactatcgtcgcccaggcaaccccaccgggacgcggtggcgtgggtatcctgcgtatttccggtctgaaggcgcgcgacgttgcgcaagaggtgctgggcaagctgccgaagccgcgctatgccgactacctgccgtttaaagatgttgacggcagcgcgctggatcagggtattgcgctgtggttccccggcccgaactccttcaccggtgaagatgtgctggagctacaagggcacggcggtccggtgattctggacctgctgttaaaacgtatcctgacgcttccaggcgtgcgaattgcccgaccgggcgagttctccgagcgagcgttcctcaacgataagctcgatttagcccaggcggaagccattgccgacctgatcgatgccagttccgaacaggcggcgcgttcggcgctaaactcgttacagggggcattttccgcccgcgttaaccaccttgtggaagcacttactcacctgcgaatctacgtcgaagcggctattgattttccggatgaggagatcgactttctctctgacggcaaaatcgaagcgcagctcaatggcgtcatcgccgatcttgacgccgtgcgcaccgaagcgcgccagggcagcctgctgcgcgaagggatgaaggtagtgattgccggacgcccgaatgccgggaaatccagcctgctgaatgcgctggcaggccgtgaagcggccattgtcaccgatatcgccggtaccacgcgcgacgtgttgcgcgagcacatccacatcgacgggatgccgctgcatatcatcgataccgccggactgcgcgacgccaacgacgaagttgagcgtatcggcatcgaacgcgcctggcaggagattgaacaggccgatcgagtgctgtttatggtggatggcaccacgacggacgccgttgaccctgccgacatctggccggactttatcgcccgtctgcccaaaaatctaccgattaccgtggtacgtaacaaggcggatatcaccggcgaaacgctgggtattagtgaagtaaacggtcactcactggttcgcctctcggcgcgtaccggcgaaggcgtcgacgtgttgcgtaaccacctcaagcagagcatggggtttgataccaatatggaaggcggcttcctggcccgccgccgtcacctgcaggcgctggcggaagccgctaaccatcttgaacagggcaaagcgcagctattaggcgcatgggcgggggaactgctggcggaagagttgcgcctggcgcagcaaagcttaagcgagattaccggcgagtttacctccgacgacctgctgggacggattttctccagcttctgtatcggtaaataa

SEQ ID NO: 9826 - DNA, 960 bp, Salmonella typhi
  CDS (1)...(960)
atggctgcaaccaagcctgcttttaacccgccgggtaaaaaaggcgacatgattttcagcgcgctggtaaaactggctgcgctgattgtgctattgatgttgggcggtattatcgtctcattgatcatctcctcctggccaagtattcagaaatttggtttctcatttctttggactaaggagtgggacgcgccaaacgatatctacggcgcactggtgcccatttacggcacgctggtaacctcctttatcgcactgctgatcgccgttccggttagtttcggcattgccctgtttttaaccgagctggcgccaggctggctgaagcgtccgctcggcatcgccattgaactgctggcggcaattcccagtatcgtgtacggcatgtgggggctgtttatcttcgcgccgctgtttgcgacgtacttccaggagccggtcggcaatattctttccaacattccgtttgtcggcgcgctgttctccggcccggcctttggtatcggtattctggcggcgggcgtcatcctcgccatcatgatcatcccctacattgcggcggttatgcgcgacgtcttcgagcaaacgccggtaatgatgaaagagtccgcttacggtatcggctgtactacctgggaagttatctggcgcatcgtgctaccgttcaccaaaaatggcgtgatcggcggcattatgctggggctgggccgtgctctgggtgaaacgatggcggtcacttttatcatcggcaacacctaccagctcgacagcgcgtcgctgtatatgccgggcaacagcatcacttccgcgctggccaacgaattcgctgaggcggaatcgggtctgcacgtggcagcgttgatggagctggggctgatcctgtttgtgatcacctttatcgtcctggcggcgtctaagttcatgattatgcgtctggcgaagaacgagggagcacgttaa

SEQ ID NO: 9827 - DNA, 2115 bp, Salmonella typhi
  CDS (1)...(2115)
atgcccttatcgattggcgcagtaattaccattttggtactatcaaagcccttttttacaacagaagaagtaatacccactatgactcaagtcgcgaagaaaattctggtaacgtgcgcgctgccgtacgccaacggctctatccacctcggccatatgctggagcacatccaggctgatgtctgggtccgttaccagcgaatgcgcggccatgaggttaacttcatctgtgccgatgacgctcatggcacgccgatcatgctgaaagcgcagcagcttggtattacaccggagcaaatgatcggtgaaatgagccaggagcaccagaccgatttcgccggttttaatattagctacgacaactaccactcaacgcacagcgacgagaatcgcgagctgtccgagctgatttatacgcgcctgaaagagaacggttttattaagaaccgcaccatctctcaactctacgatccggaaaaaggcatgttcctgccggatcgatttgtgaaaggcacctgcccgaaatgtaaatccgcggaccagtacggcgataactgtgaagtctgcggcgcaacttacagcccgaccgaacttatcgagccgaaatccgtggtgtccggcgcgacgccggtaatgcgtgactccgagcactttttctttgacctgccgtcattcagcgaaatgttgcaggcgtggacccgcagcggcgcgctgcaggagcaggtggcgaacaaaatgcaggagtggtttgaatccggcctccagcagtgggacatttcccgcgacgcgccgtattttggtttcgaaatcccgaacgcgccgggcaaatatttctacgtctggctggacgcgccgattggctatatgggctccttcaaaaatctgtgcgataagcgcggtgacacgaccagttttgatgagtactggaaaaaagactccgacgccgagctgtatcactttatcggcaaagacatcgtctatttccacagcctgttctggcctgccatgctggaaggcagccacttccgtaagccgaccaacctgttcgttcacggttacgtgacggtgaacggcgcgaagatgtctaagtctcgcggcacctttattaaggccagcacctggctgaaacactttgacgccgacagcctgcgctactactacaccgcgaagctttcttcacgcattgatgacatcgacctgaacctggaagactttgtccagcgcgtcaatgccgatatcgtcaataaagtagtcaacctggcatcccgtaacgccggttttatcaataagcgtttcgacggcgtgctggcggctgaactggccgatccgcaattgtacaaaacctttactgacgccgctgcggtgattggcgaagcatgggaaagccgtgaattcggtaaagctatccgtgagattatggcgctggccgacgtcgctaaccgttatgttgacgagcaagcgccgtgggtggtggctaaacaggaaggccgcgacgctgacctgcaggccatttgctcgatgggcatcaacctgttccgcgtgctgatgacgtatctgaaaccggtactgccgacgctttctgaacgcgttgaagccttcctgaacagcgaactgaactgggatgccatcgaacagccgctgctcagtcacaaggtcaacacctttaaggcgctctacaatcgcatcgacatgaagcaagttgaagcgctggttgaagcgtctaaagaagaggtgaaagccgcagccgcgccggttaccggcccgttagccgacttcccgattcaggaaaccatcacctttgacgatttcgccaaaattgacctgcgcgtagcattgattgaaaacgctgagttcgtagatggttctgacaaattgctgcgtctgacgctggatctgggcggcgagaagcgtaacgtcttctccggcattcgttccgcctacccggacccgcaggcgctgatcggccgccagacggtaatggtcgccaacctcgcgccgcgcaaaatgcgctttggcgtctccgagggaatggtgatggccgcaggacctggcgggaaagatatcttcctgttaagccctgatgacggcgcgaagcctggccaacaggtgaaataa

SEQ ID NO: 9828 - DNA, 720 bp, Salmonella typhi
  CDS (1)...(720)
  misc_feature (1)...(720): n = A,T,C or G
atgattaaagtgctgattgtggatgatgagccgttagcgcgggaaaatctgcggattttgctccaggggcaggatgacattgagattgtgggagagtgcgcgaacgcggtagaagcgattggcgcggtacataagttgcgacctgatgtgctgtttctggatattcagatgccgcgtatcagtggactggagatagtaggaatgcttgatccggaacaccgcccgtatatcgtttttttaaccgcgtttgacgaatacgccatcaaagcctttgaagaacacgcttttgattatctgctcaagccgatagaggagaaacggctggaaaaaacgttacatcgtctgcgtcaggagcgcagtaaacaggatgtttcgttgttgccggaaaaccagcaggcgcttaaattcattccctgtaccggacacagccggatctatttgttgcaaatggatgatgtcgcctttgtcagtagccgtatgagcggcgtttatgtgaccnncngtnnnnggaaagaggggtttaccgagctgacgctgcgcacgctggaaagccggacgccgctactgcgttgtcatcgtcagtttctggtgaatatggcccatttgcaggaaattcggctggaggataatgggcaggcagagctgattttacgcaacggcctgacggtgccggtaagccgtcgctatctgaaaagtttaaaagaggcgattggcctgtaa

SEQ ID NO: 9829 - DNA, 1788 bp, Salmonella typhi
  CDS (1)...(1788)
gtgatcgtattcacgaattcatatttttatgcaacagttcaaagaaagttaatcgtactcaatgtatgttacgcgcttttaattgaagtgtggtttgcgcgtatgtacgagtttaatctggtgttgctgctgcttcagcagatgtgcgtgtttctggtcattgcgtggctaatgagtaaaacgcgcctgttcatcccgcttatgcaggtcacggttcgtctgccgcacaagcttctgtgttatgtcatgttttctatcttctgcattatgggcacttattttgggctacatatcgaagattcgattgccaatacccgcgcgattggcgcggtgatgggcggcctactcggcgggccggtcgtcggcgggctggtcggtctgaccggtgggttacatcggtattctatgggcggcatgacggcgctgagctgtatgatttccaccatcgtcgaagggctgctgggcgggttggtacacagcgttctcatacgtcgcggacgcccggacaaagtgtttagcccgctgacggcgggagcaattacgtgtgttgccgaactggtgcagatgctgatcattttactgatagccaggccgtttgacgatgccctgcatctggtcagtaatattgccgcgccgatgatgatgacgaataccgttggcgccgcgctgtttatgcgtattttgctcgataagcgcgccatgttcgaaaaatatacttcggcattttctgttaccgcgctgaaggtcgccgcgtcaacggaggggattctgcgtcagggatttaacgaagtgaacagtatgaaggtggcgcaggtgttatatcaggagctggatattggcgccgtcgccatcaccgatcgcgaaaaactgctggcttttactggtattggcgacgatcaccatctaccgggcaaacccatttcatcaggttatacgctgaaagcaattgaaaccggagaggtggtttatgccgatggcaacgaagtgccgtatcgctgttcgctacacccgcagtgtaaactcggctcgacgctggtgatcccgctgcgtggcgaaaatcagcgagtcatgggcaccattaaattgtacgaagcgaaaaaccgactgttcagctcaattaaccgtactctgggggagggtattgcgcagcttttatccgcgcagatcctggccgggcagtatgaacggcagaaggcgttgctgacgcagtcagagatcaagctgttgcacgcgcaggtgaatccgcattttctgtttaatgcgctcaataccattaaagcggtgattcgccgcgacagcgaacaggccagccaactggtgcagtacttgtcgaccttttttcgcaaaaatttaaaacgcccgtcggaaatcgtcacgctggcggatgaaattgaacacgtgaacgcttacctgcaaattgaaaaagcgcgttttcagtcgcgtctgcaggtacagcttgatgttccatcgacgctttcacgtcagaaattgcctgcgtttacattacagccgattgttgagaacgccattaaacatggcacgtcgcaactgcttgataccggcaacgtcgctattcgcgcccggcgcgaagggcagcatttgatgttagatattgaagataatgcgggactgtatcagccttccgccggcagtagcgggctggggatgagcttggtggataaacgtctgcgcgaacactttggcgatgattatggtattagcgtggcctgcgagccggactgttttacccgaattacattacgacttccactggaggaggacgcatga

SEQ ID NO: 9830 - DNA, 1365 bp, Salmonella typhi
  CDS (1)...(1365)
atgatgtttaaaccagaactcctttcgccagcgggaacgctgaaaaatatgcgttacgctttcgcttacggtgccgatgccgtctatgcgggccaaccgcgttactctttacgcgtgcgcaataacgaattcaatcacgaaaatttgcagcttggcatcaacgaagcccacgcgctcggaaaaaaattctacgtggtggtgaacatcgccccgcataacgccaagctcaaaacctttatccgtgacctgaaacccgtcgtcgagatgggcccggatgcgctgatcatgtccgatccagggttgattatgctggtacgcgagcacttcccggcaatgccgattcacctgtcggtacaggctaacgccgtaaactgggcgacggtaaaattctggcagcagatggggctgacccgcgtgattctctcccgcgagctgtcgctggaagagattgaggaaattcgccagcaggtgccggatatggaaatagaaattttcgtccacggcgcgctatgcatggcctattccggtcgctgcctgctttccggctacatcaataaacgcgatccgaaccagggcacctgcaccaatgcctgccgttgggaatataacgtgcaggaaggaaaagaagacgttgtcggcaacatcgtgcataagcatgaaccgattccggtacagaacgttgagccgacgctcggtatcggcgcgccgacggataaagtgtttatgatagaagaggcccaaagaccgggcgaatacatgaccgcgttcgaagacgagcatggcacctatatcatgaactcaaaagatttgcgcgctatcgcccacgtggagcgcctgacgaaaatgggcgtccactcgctgaaaatcgaaggccgcaccaaatccttttattactgcgcccgtaccgcccaggtctaccgtaaggccatcgacgacgccgccgcgggtaaacccttcgaccctacgctgctggaaacgctggaaggtctggctcatcgcggctataccgaaggtttcctgcgtcgccatacgcacgacgattaccagaattacgagtacgggtactccgtttccgaacgccagcaatttgtcggcgagttcaccggcgagcgtaaaggccaactggcggccgtggcggtgaagaataaattctccgttggcgatagtctggagctgatgactccgcagggaaatatcaatttcactctggaacagatggagaacgccaaaggcgacgctatgccggtggcgcctggcgatggctataccgtctggatgcccgtcccgcaggacgttacgctggattacgcactattgatgcgtaatttctcaggcgaatcaacgcgtaacccccatgctaagtag

SEQ ID NO: 9831 - DNA, 951 bp, Salmonella typhi
  CDS (1)...(951)
gtggataccgatatgcgtgttttactggcgccgatggaaggcgtgctcgacgcgttagtgcgcgagctgctgaccgaagtgaatgattacgatctctgcatcaccgaatttgtgcgcgtggtggatcagctgctgccggtaaaagtgtttcatcgcatctgcccggagttgcttcacgccagccgcacgccgtccggcacgccggtgcgtattcagcttctgggccagcatccgcagtggctggcggaaaacgccgcgcgggcgacggcgttgggatcgtatggcgtggacctgaactgcggctgtccgtcaaaagtggtgaacggcagcggcggcggcgcgacattgctcacagatcccgaactcatctatcagggcgcgaaagcgatgcgggccgcggtaccgtcgcatctgccggtgacggtaaaagtgcgtctcggctgggatagcggcgatagaaaatttgaaatcgccgatgcggtgcagcaggccggcgccagtgaactggtggtgcatggccgtaccaaagcgcagggctaccgcgccgagcatatcgactggcaggcgatcggcgaaatacgccagcgtctgactattccggttatcgctaatggcgaaatctgggactggcagagcgcgcaggcatgtatggcgaccagcggctgcgatgcggtgatgattggccgcggggcgttaaatattcctaacctgagccgggtggtgaagtataacgaaccgcgtatgccgtggccggaagtggtaacgttattacaaaaatatacccgactggaaaagcagggcgataccggtttataccatgtcgcgcgtattaaacagtggttgggatatttacgtaaggaatatattgaggcgacagaactctttcagtcgattcgggcgttaaaccgttcgtccgagattgcgcgggtgattcaggctattaaaatctaa

SEQ ID NO: 9832 - DNA, 1038 bp, Salmonella typhi
  CDS (1)...(1038)
atgtctgaaataaatcagaacgtaaaagatagccgtcaacagtactaccagcatatttccgggcagaatctgacgccgctgtgggaatcgttacatcacctggtaccgcagacgccaaacgccaactgcgcgccggcctactggaattatcaggaaattcgtccgctactgatggaaagcggcaatgtcattggcgcgaaagaggcgatccgccgggtgctggtgctggaaaatccggcattgcgcggtcagtcgtcgatcacggcgaccttatacgctggtttacagctgatcctgcccggcgaagtcgcgccgagtcatcgccataaccagtcggcgctgcgttttatcgtcgaaggtaaaggcgcatttaccgcggtggacggcgagcgcacgccaatgcataccggcgattttatcctgacgccgcagtggcgctggcacgatcatggtaatccgggatcagagccggtggtatggctggatggtctggatctgccgttagtcaatctcctgggctgtggttttgcggaagactatcccgaagatcagcagccggtgacgcgaaaagagggcgattatctgccgcgctatgcagcgaatatgctgccgctgcgccaccagcgcgggaactcgtcgccgattttcaactaccgttacgaccgcagtcgcgaggcgttgcacgatctgacccgtatgggcgatccggatgagtgggaaggctacaagctgcgttacgttaatcccgtcactggcggttatccgatgccgtcgatgggcgcgttcctgcaactgctgccaaaaggctttgcctcgcgtgtggcgcggagcaccgacagcactatctaccacgtcgttgaaggggcagggcaggtcactatcggcaacgaaacttttcatttttccgcaaaagacatttttgtggcgccgacctggcatgaggtgtcgtttcgcagcagcgaagacacggtgttattcagcttttcggacaagccggttcaggaagccctggggccgttccgcgaagcacgttattaa

SEQ ID NO: 9833 - DNA, 1116 bp, Salmonella typhi
  CDS (1)...(1116)
  misc_feature (1)...(1116): n = A,T,C or G
atgagctggatatcgatattgacccgcgcgcgcgtgggaacgttatccgtttcgcaaatgcagatgattgaaattgcgaaggcgttttcctataacgctaagatcgttattatggatgaaccgacctcatcgttaactgagaaagaggttaatcatctgttcaccattattcgcaagctgaaagaacgcggctgcggcattgtttatatctcgcataaaatggaagaaatttttcaattgtgcgatgaaattactatcttgcgcgacggtcagtggattgccacccagccgctggaagggctggatatggataagatcattgcgatgatggtcgggcgttccctgaaccagcgctttccggataaagaaaataagccgggcgacgtgattctggaggttcgtcacctgacctcgctgcgccagccttccattcgcgatgtctcctttgatttgcacaagggcgaaattctgggcattgccggtctggttggggcaaagcgtaccgatatcgtcgaaacgctgtttggcattcgtgagaagtcgtccgggacaatcactttacatggcaagaaaattaataatcacactgcgaacgaagcgattaaccacggttttgcgctggtgacggaagagcgtcgttccaccggaatttacgcctatctggatatcggatttaactcattaatttcgaatatccgtaattataaaaataaagtggggttactggataattcccggatgaaaagcgacacccaatgggtcattgattccatgcgggtaaaaacgccggggcatcgcgcgcaaattggttcactttccggcggcaatcagcaaaaggtgatcattggtcgctggctattaacgcagccggaaatattaatgctggacgaaccgacccgcggcattgatgtcggcgcaaaatttgaaatttatcagcttattgcggaactggcgaaaaaaggcaaggggatcatcattatatcttctnnnatgccggagctgttagggattaccgatcgtatcctggtgatgagtaacggtctcgtttccggcattgtcgatactaaaacaacaacgcaaaacgaaattttgcgtcttgcttctttgcacctttaa

SEQ ID NO: 9834 - DNA, 1470 bp, Salmonella typhi
  CDS (1)...(1470)
  misc_feature (1)...(1470): n = A,T,C or G
atgggttccaaaactaaaaccacagaagcgcccgcgctacgtcgcgaattaaaggcgcgtcacctgacgatgattgccattggcggctccatcgggacaggtcttttcgttgcatctggtgcgacaatttctctggcggggccaggcggcgcgctgttttcttatattctgattggtttgatggtctacttcctgatgaccagtcttggcgagctggcggcctatatgccggtatctggctcgtttgcgacatatggtcagaactatgtggaagaaggctttggtttcgcgctgggctggaactactggtacaactgggcggtgactatcgctgttgacctggttgccgcacaattggtgatgggctggtggttcccggacacgccgggctggatctggagcgcgctattcctctgcgtcattttcttgctgaactacatttctgtacgcggttttggcgaggcggagtactggttctcgttaattaaagtcgcgaccgttattatcttcatcatcgttggcgtagcgatgattatcggcatctttaaaggtgtcgagccggtcggctggagcaactggacgacgggcgatgcgcctttcgctggcggttttgcggcaatgattggcgtcgcgatgatcgtgggcttctctttccagggaactgagctgattggtattgccgccggggaatctgaaaacccggagaagaatattccgcgcgcggtgcgtcaggtgttctggcgtattctgctgttttatgttttcgcgattttgattatcagcctgatcattccttataccgatccaaacctgctgcgtaacgacgtcaaagacattagcgtcagtccgtttaccttagtgttccagcatgcgggcttgttgtctgcggcggcgataatgaatgcggttatcctgacggcggtactgtctgcgggtaactccgggatgtatgcctcgacccgtatgctctacaccctggcctgtgacggtnnngccccgcgtatttttgcgaaattgtcccgcggcggcgtaccgcgcaatgcgctttatgccaccaccgtgattgccggtctttgctttttgacctcaatgttcggcaaccagacggtctatctgtggctgttgaacacctccggtatgacgggcttcatcgcctggctggggattgccattagccattatcgcttccgtcgcggttacgtgttacaagggtatgatgtgaatgatttgccgtaccgttccgggttcttcncgctggggccgattttcgcctttgtactgtgcctgattattacgttggggcagaactatgaagcgttcctgaaagataccatcgactggggcggcgtcgcggcgacctatatcggtattccgctgttcctgcttatctggttcggctacaagctgataaaaggcacgcatttcgtgcgctatagcgaaatgcacttcccggaacgcgttaaaaagtaa

SEQ ID NO: 9835 - DNA, 858 bp, Salmonella typhi
  CDS (1)...(858)
atgaaatacatcggagcgcacgtcagcgctgctggcggtctggctaacgcccctgcccgcgcggctgaaattggcgcaacggcctttgcgcttttcacaaaaaaccagcgtcagtggcgtgccgccccccttactccccaggtcattgatgactttaaaatcgcctgtgaaaagtatcatttctcggcggcgcaaatccttccccacgatagttacctgattaatctgggccatccggtcagtgaagcgctggaaaaatcacgcgatgcctttctcgatgaaatgcagcgctgtgaacaactcggcttaaccttgcttaattttcatcccggtagccatctgatgcagattgcacaggaggattgcctggcgcggatcgcggaatctatcaatattgccctcgcgcagaccgagggcgttacggcggttatcgaaaatacagccggtcagggcagtaatctggggtttgagtttgaacagttagccgccatcatcgacggcgtggaagataagtcgcgcgttggcgtctgtatcgatacctgccatgcctttgccgctggatacgatctgcgtacgccagaggcgtgcgaaaaaacgttcgccgaattcgggaaaattgtcggatttcagtatttgcgcggaatgcaccttaacgacgccaaaagcgccttcggtagccgcgttgaccgccatcacagtctgggtgaaggcaatatcggccacgatgcgtttcgttggattatgcaggatgcgcgttttgacggtattccgctgatactggagaccatcaatcctgatatctgggcggaagagattgcatggttaaaagcccagcaaattgccgaagcgatggcctga

SEQ ID NO: 9836 - DNA, 1131 bp, Salmonella typhi
  CDS (1)...(1131)
atgttccagttatcggttcaggacattcatccgggcgagcaggtcggaaataaagaagaggccattcggcaaatcgccgctgcgttagcgcaggcggggaatgtggcgggcggctatgttgacggtatgctggcgcgcgaacagcaaacctcaacctttcttggcaatggtattgcgattccccatggtacaacagacacgcgcgatcaggtgctgaaaaccggcgtccaggtctttcaatttccgcagggcgttacctggggagaaggccaggtcgcctacgtggcgattggtattgccgccagttcggacgaacaccttggcctgctgcgtcagctgacgcatgtgctgagcgatgactccgtggctgaacagctgaaatccgcgacaacggcggaagagctgcgcgcattgctgatgggcgagaagcaaagtgaacaattaaaacttgataacgagacgatgacgctggatgtcatcgccagctcgctggtcacattgcaggcgctaaatgcggcgcgtctgaaagaggcgggagcggttgatgcggcgttcgtcgcaaaaacgattaacgatagtccgatgaatctgggacaaggcatctggctgaacgacagcgcggaaggcaatttgcgcagtgctgttgcggtaagccgcgcgacccaggcgtttgacgtagagggtgaaaaagcagccttattagtcactgtcgcgatgaacgacgagcagccgattgccgtgctaaaacgcctcggcgacctgttgctgaacaataaagccgatcgtctgctgagcgctgacgccgcgacgctgctggcgttgctgaccagtgatgatgcgctgacggatgacgtactgagcgcggaatttgtagtgcgtaatgagcatggtctccatgcccgtccgggcaccatgctggtgaatacgattaaacaatttaacagtgaaattaccgtgacaaaccttgatggaaccggcaaaccggcaaacggacgtagtctgatgaaagtggtggcattaggcgtgaagaaaggccatcgtctgcgctttaccgcgcagggtgaagatgctgaacaggcgctgaaagcgattggcgatgcgatcgccgccggtcttggggagggcgcataa

SEQ ID NO: 9837 - DNA, 1590 bp, Salmonella typhi
  CDS (1)...(1590)
atgacatctccattgcttgcgattgaaaatttatcggtaggtttccgtcagcaacagcacgtgcgccctgtcgttaacgccatttcgttacaggtgaacgccggggaaacgctggcgctggtcggcgagtcagggtcaggaaaaagcgtgacggcgctttccattctgcgtcttttgcctacccctcccgccgtctacctctccggcgatattcgctttcacggcgaatcattgcttcatgccagcgagcagacgctacgcggcgtacgcggcaataaaatcgccatgatttttcaggaaccgatggtttcacttaacccactgcatacgctggaaaaacagctctatgaagtgctgtcgctccatcggggaatgcgtcgggaggcggcaagggcggagatgatcggttgtctggatcgggtcggtatccgccaggcgagccagcgtctgcgcgattatccgcatcagctttccggcggcgaacgccagcgcgtcatgatagccatggcgctgttaacacggccggaattactgatcgccgatgagccgaccaccgccctcgacgtctccgtacaggcgcagatcttatctctactgcgggaactccagcgtgagctcaatatgggattgctgtttatcacccataacctcagcattgtaaaaaaactggcggattcagtggcggtaatgcaacacggcaagtgcgtagagaaccaacgcgccgacacgctgctctccgcgccgacccatccgtacacgcaaaaactactcaacagcgaacccactggcgatccggttccgctccccgccgggcaggcgccgttgctggaagtggacaagctgcgcgtcgccttcccaatccgcaaaggcattctgaagcgcgtcgtggatcataatgtggtggttaacaatatcagtttcaccctgcatccaggcgaaacgctgggtctggtcggcgagtcaggatcgggaaaaagcaccaccggtctggcgctgttacggcttatccgctccgaaggccgcatcgtgtttgacggtcaatcgctggatacgttaaaccgccgccagcttttacctgttcgccaccgtatccaggtcgtattccaggacccgaactcatcgctaaacccgcgtttaaacgtattgcaaattatcgaagaaggcctgcgcgtccaccagcctacgctttcaggcgcgcagcgcgaacagcaggtgaaagcggtcatgatggaagtcggcctggacccggaaacgcggcatcgttaccccgctgagttttccggcggccagcgtcaacgtatcgccgtcgccagggcgctgattttaaaaccgtcgcttattattctggatgaaccgacctcatcgctggataaaaccgttcaggcgcagattcttgccctcctgaaatcgctccagcaaaagcaccgtctggcctatatcttcattagccacgatctgcatgtagtacgcgcgctgtgccatcaggttatcgtgctgcgacagggggaggtggttgaacaggggcaatgcgagcgcgtgtttaccgcaccgcaacaagcgtatacgcgtcagctactcgcgttaagctga

SEQ ID NO: 9838 - DNA, 1761 bp, Salmonella typhi
  CDS (1)...(1761)
  misc_feature (1)...(1761): n = A,T,C or G
atggtaactcatcgtcagcgctaccgtgaaaaagtctcccagatggttagctgggggcactggttcgctctgttcaatatactgttggctacgttgctcggcagccgttacctgtttgtcgccgactggccgacaacgcttgcgggtcgcatatactcctacctgagcattgtcgggcactttagctttctggtgttcgccacctatttgcttattctttttccgctcacgtttatcgtgatgtcccagcggctgatgcggtttttatcagccattctggcgaccgcgggtatgacgttgttgcttatcgacagcgaagtctttacccgttttcacctgcatcttaaccccattgtctgggaactggtcatcaaccctgaccagaacgaaatggcgcgcgactggcagcttatgtttattagcgtgccagttatcttattgattgagatgctatttgcgacatggagttggcaaaagctgcgcagtctcacgcgccgccgccatttcgcaaggccgcttgcggcattctttttcgtctcctttatcgcatcgcatcttatctacatctgggcagacgctaatttttaccggccgattaccatgcagcgggcaaacctgccgctctcttatccgatgacggcgcgacgttttcttgaaaaacacggtctgctggatgcgcaggaatatcagcgccgtctggtagagcaaggcaatccggaagcggtctccgttcagtacccgctcagcaatttgcactatcgcgatatgggcaccggtcagaatgtgctgctcattaccgtagacggcctgaactattctcgctttgagaagcagatgccggagctggctacatttgccgagcaaaacatcgacttcacccgtcatatgagttcagggaataccactgataacngtattttcggcctgttctatggcatatcgccaggctatatggatggcgtgttatccaccagaacgcctgcggcgctcattaccgcgttgaatcagcaaggctaccaactgggactgttttcttcggatggnttcgccagcccgctttatcgtcaggcattactgtccgatttctcgatgccggcagcgcaaacgcagtctgatgcgcaaacggccagccagtggatagactggcttgggcgctacgcacaggaagatnaccgctggttctcatggatatcgtttancggtactaacattgatgacagtaaccaganaaatnttgttaagcgttacgccagtgccgccagcgacgtggatgcgcaaatcaatcgggttctgaacgcgctgcgagaggccggtaaattcgacaatactgtcgtgatcattaccgcaggacgcggcataccgttgacgccggaagaaaatcgcttcgactggtcgcaaggtcatctgcaagtaccgctggtgatccactggccggggacgcctgcgcagcgtattaatgtgcttaccgatcataccgatgtgatgaccacgttgatgcaacgcctgttacatgtcagcacgccagcgaacgaatattcacagggccaggacatctttaccgttccacgtcgtcataactgggtaacggcggcagacggcagtacgctggcaatcacgacgccgcaaatgaccctggtgctcaataataacggtcattatcagacctatgacttacacggcgagaagatcaaagatcagaagccgcagctcagtctgctgctgcaagtgctaacagaagagaaacgttttatcgctaactga

SEQ ID NO: 9839 - DNA, 882 bp, Salmonella typhi
  CDS (1)...(882)
gtgaaacaacgaattgctgtgtgtagtctttgcccgtctcctacgatgggcttttttttttacttcaagcggccagcctcaccgttcataatggcgagaagaaaaaaaactgacaggacacgcatgaaaaccgtcaccgtaaaaaatcttatcattggcgaagggatgcccaaaattatcgtgtcgttgatgggaagagacatcaatagcgtgaaagcggaggcgctggcctaccgcgaagctacattcgatattctggagtggcgcgtggatcactttatggatatcgcatcgactcaatccgttcttaccgctgcgcgtgttatccgcgatgcgatgcctgacattccgttactgtttactttccgcagcgccaaagaaggcggcgagcagacaataaccactcagcattatctcacgcttaatcgtgccgcaatcgacagcggcctggtcgatatgatcgatcttgagctatttaccggtgatgctgacgttaaagccactgtcgattatgcccatgcgcataatgtttatgtcgtgatgtctaaccacgattttcaccagacgccgtccgcagaggaaatggttctgcggctacgtaaaatgcaagcactcggcgcggatattcccaagattgccgttatgccgcaaagcaagcatgatgtattaacgttactcactgccacgctggagatgcagcaacattacgccgaccgtccggtaattactatgtcaatggcgaaagagggtgtcatttcacgtctggcaggggaagtgtttggctctgccgccacgtttggcgcggtgaagcaggcttcagcgccggggcaaatcgccgtaaatgatctacgcagtgtattaatgattctgcacaacgcctga

SEQ ID NO: 9840 - DNA, 1929 bp, Salmonella typhi
  CDS (1)...(1929)
  misc_feature (1)...(1929): n = A,T,C or G
atgcctgttattactcttcctgatggcagccaacgccattatgaccaccctgtaagcccgatggatgttgctctggacattggtcctggcctggcgaaagccaccattgcgggccgtgtgaatggcgagctggttgatgcttccgatctgattgaaaatgatgcgacgctttccatcatcaccgcaaaagatgaagagggtctggagatcattcgtcactcttgcgcgcatctgttaggtcacgctatcaagcaactttggccgcacacgaaaatggcgatcggtccggttgtcgacaacggtttttactatgacgttgatcttgaccgcacgctaactcaggaagatgtcgaagcgctcgaaaagcggatgcatgagctcgccgagaaaaattacgacgttatcaagaagaaagtcagctggcacgaagcgcgtgaaaccttcgtgaagcgtggtgaaagctacaaagtttccattcttgatgaaaacattgctcatgatgacaagccaggcttgtaccatcatgaagaatatgtcgacatgtgtcgtggtccgcacgtgccgaatatgcgtttctgccatcactttaaactgatgaaaactgccggcgcatactggcgcggtgacagcaataataagatgttgcagcgtatttacggtacggcatgggcagataaaaaagccctgaacgcttatctgcagcgcctggaagaggccgcaaaacgcgaccaccgtaaaattggtaagcagctcgacctgtatcatatgcaggaagaagcgccgggcatggtgtnnnggcataacgacggctggactatctnccgcgagctggaggtctttgttcgttctanactcaaagagtacnagtatcaagaagttaaaggcccgttcatgatggaccgtgtgctgtgggaaaaaaccgggcactgggacaactataaagatgcgatgttcaccacatcttcagaaaaccgcgaatattgcatcaagccgatgaactgcccgggccacgttcagatctttaaccagggtctgaaatcctatcgtgatttgccgctgcgtatggcggaattcggtagctgccaccgtaacgagccatcaggcgcgctgcatggtctgatgcgcgtacgcggctttacgcaggatgatgcgcatatcttctgcaccgaagagcagatccgcgatgaagttaacgcttgtattcgtatggtctacgatatgtacagcacctttggcttcgagaagatcgtcgtcaaactttccactcgtcctgataagcgtatcggcagcgatgagatgtgggatcgtgctgaggcggatctggcggttgcgctggaagaaaataatatcccgtttgagtatcaactgggtgaaggcgcattctacggtccgaaaattgaatttaccttatatgactgcntcgatcgtgcatggcagtgcggtacagtacagctggacttctccttaccgtctcgtctgagcgcctcctatgtaggcgaagacaacgagcgcaaggtgccggtaatgattcaccgtgcgattcttgggtcgatggaacgcttcatcggtatcctgaccgaagagttcgctggtttcttcccgacatggctcgcgcctgttcaggtagtcgtgatgaatattaccgattcgcagtctgaatacgttaacgaattgacgcagaaactacaaaatgcgggcattcgtgtaaaagcagacttgagaaatgagaagattggctttaaaatccgcgagcacactttacgtcgtgtcccttatatgttggtctgtggtgataaagaggtggaagcaggcaaagttgccgttcgcacccgccgcggtaaagacctgggcagtctggacgtaaatgacgtgattgagaagctgcaacaagagattcgcagccgcagtcttcaacaactggaggaataa

SEQ ID NO: 9841 - DNA, 747 bp, Salmonella typhi
  CDS (1)...(747)
atgttaagcattaaagatttacaggtcagtgtggaagaaaaggcgattttgcgtggcctgaatctggatattcgccccggcgaagttcacgccattatggggccgaacggttccgggaaaagcacgctctccgccaccctggcgggacgtgaagattatgaggtcaccggcggctcggttacgttcaaaggtaaagatctgcttgaactgtcgccggaggaacgggcgggcgaagggatttttatggccttccagtacccggtagaaatccccggcgtcagtaaccagtttttcctgcaaaccgcgctgaatgccgtgcgcgcctatcgagggcaggcgtcgttggatcgctttgattttcaggatctgatggaagaaaagatcgcattgctgaaaatgccggaagatttgctgacccgttcggtaaacgtcggtttttccggcggggagaaaaagcgcaatgatattttgcaaatggcggtgctggaaccggaactgtgcattcttgatgagtcggactccggactggatatcgatgcgttgaaaattgtggcggaaggcgtcaacgcgttacgcgacgataaacgcgcttttattatcgtgacccactatcagcgcatactggactacatcaagcctgattacgtccatgtcctctatcaggggcgaattgtccgttccggcgattttactctggtcaaacaactggaggagcagggttatggctggcttaccgaacagcagtaa

SEQ ID NO: 9842 - DNA, 435 bp, Salmonella typhi
  CDS (1)...(435)
  misc_feature (1)...(435): n = A,T,C or G
gtgagtctgagagaagctctggaaaaagctgaagaagccggagtagacttagtcgaaatcagccctnacgccgagccgccggtttgtcgtataatggattacggcaaattcctntatgaaaagagtaagtcttctaaggaacagaagnaaaagcanaaagttatccaggtgaaggaaattaaattccgtcctgngacagatgaaggcgactatcaggtaaaactccgcagcctgattcgctttctcgaagagggcgataaggccaagatcacgctgcgtttccgcggtcgtgaaatggcccaccagcaaatcggtatggaagtgcttaatcgcgtgaaaaacgatttgcaagaactggcagtggtcgaatccttcccaacgaagatcgaaggccgtcagatgatcatggtgcttgctcctaagaagaaacagtaa

SEQ ID NO: 9843 - DNA, 357 bp, Salmonella typhi
  CDS (1)...(357)
atggctcgcgtaaaacgtggtgtaattgcacgcgcacgtcacaagaaaattttgaaacaagccaaaggctactacggtgcgcgttctcgcgtataccgcgttgccttccaggcagttatcaaagctggtcagtatgcttaccgtgaccgtcgtcaacgtaagcgtcagttccgtcaactgtggattgcgcgtatcaacgcagcagcacgtcagaacggtatttcttacagcaaattcatcaacggcctgaaaaaagcctctgttgaaatcgaccgtaagatcctggctgatatcgccgtattcgacaaagtcgcgttcaccgcgctggttgaaaaagcgaaagcagctctggcataa

SEQ ID NO: 9844 - DNA, 996 bp, Salmonella typhi
  CDS (1)...(996)
atgaggaaaaccatgtcacatctcgcagagctggttgccaatgcagcggccgccattaaccaggcgtcagatgttgccgcgttagacaatgtacgcgtcgaatatttgggcaagaaagggcatttaacccttcagatgacgaccctacgcgatctgccgccggaagagcgtccggcagccggggcagtcattaacgccgcgaaagagcaggtacaacaggcgcttaacgcgcgtaaagccgagctggaaagcgcagcgcttaacgctcgtctggccgctgaaactatcgatatctccctgccgggacgccgtattgagaacggcggtctgcatccggtcacgcgtaccattgaccgtattgaaagtttcttcggcgagcttggttttaccgtggcgactggcccggaaatcgaagatgactaccataacttcgatgcgttaaacattccgggtcatcacccggcccgcgccgatcatgataccttctggtttgacgcgacccgtctgctgcggacccagacgtctggtgtccagatccggacgatgaaagcgcagcaaccgccgatccgtattattgcgccgggccgtgtataccgtaatgactacgaccagacgcatactccgatgttccatcagatggaaggtctgattgttgataccaacatcagcttcaccaacctcaaaggtacgctgcacgacttcctgcgtaatttctttgaggaggatctgcagattcgcttccgtccttcttattttccgttcaccgaaccttctgcggaagtggatgtgatgggtaaaaacggcaaatggctggaagtgctgggctgcgggatggtgcatccgaatgtgctgcgtaatgtcggtatcgatccggaaatctattctggcttcgcttttggtatggggatggaacgtctgaccatgttgcgttacggcgtcaccgacctgcgttcattcttcgaaaacgatctgcgtttccttaaacagtttaaataa

SEQ ID NO: 9845 - DNA, 1806 bp, Salmonella typhi
  CDS (1)...(1806)
atgaaattcagcgaactgtggttacgcgagtgggttaacccggcaattgatagcgatgcgttggctaaccagattacgatggctggcctggaagtagacggcgttgagccggtcgcgggaagcttcaatggcgttgtggttggggaagtggttgagtgcgcccagcatccgaacgctgacaaattgcgtgtaacgaaagtcaacgtcggcggagaacgcctgttggatatcgtctgcggcgcgccaaactgtcgtcaggggctgaaagtagcggtggccactattggcgctattctgccgggcgatttcaaaattaaagcggcgaaactgcgcggcgaaccgtctgaagggatgctgtgctccttctccgaactggggatttccgacgatcacagcggcattatcgaactgccggcggatgcgccgttgggtaccgacatccgtgaatacctgaagcttgacgacaataccatcgaaattagcgtcacgccgaaccgtgcggattgcttaggtatcatcggcgttgcgcgtgatgtggcggtactgaacaaagcgccgctccaggagcctgaaatggcgccggttacggcaaccatcagcgatacgctgctgattacggtagaggctgttgatgcgtgtcctcgctatcttggccgggtggtaaaaggtatcaatgttaacgcgccgacgccgctgtggatgaaagagaaactgcgtcgctgcggtattcgctccatcgatgcggtggttgacgtcacgaactatgtgctgctcgaactgggtcagccaatgcatgctttcgataaagatcgcattgatggcggtattgtcgtgcggatggcaaaagagggtgaaaccgtcgtcctgctggacggtagcgaagcgacgttaaatgcggacacgctggtgatcgccgatcaccataaggcgctggggatagccggtatttttggcggcgaacattccggcgtgaacggcgaaacgcaaaatgtgctgctggagtgtgcgtactttaatccgctgtctatcaccggtcgcgctcgccgccacggtctgcataccgatgcgtctcaccgctacgagcgcggggtggacccggcgctgcaatataaaacgatagagcgcgctactcgtctgcttcttgatatctgtggcggtgatgcgggtccgataattgatgtgagcaacgaagcaacgttgccgaaacgcgccaccattactctgcgtcgcagtaaactggatcgcctgatcgggcatcatattgcggatgagcaggtcagtgatattctgcgtcgtctgggctgtgaagtgaccgaagggcaggacgagtggaaagccgtggcgccgacctggcgtttcgatatggagattgaagaagatctggtggaagaggtggcccgcgtttacggctataacaatattccggacgagccaatccaggccggtttaatcatgggaacgcaccgtgaagccgatctgtcgttgaagcgggttaaaaccatgctgaacgacaaaggctatcaggaagtgattacctatagctttgtcgatcctaaagtacaacagctcatccatccaggcgcagaagcgctgctgctgccaaaccctatctccgttgagatgtcggcgatgcgtctgtctctgtggagcggattgttggcgacggtggtctataaccaaaaccgtcagcagaatcgcgtgcgtatttttgaaaccggtttacgtttcgttccggatacacaagccaatctgggtattcgacaggatctgatgctggctggcgtgataatgcggtcaccgctatga

SEQ ID NO: 9846 - DNA, 990 bp, Salmonella typhi
  CDS (1)...(990)
atggataacatgctgacttttgcccgccaacaacagcgacgaaacgttcgctggcttctgagcctgtcactgctggtgctactggctacacttctgagcttatgcgcaggcgaacagtggattgcccccggtgactggttaagcgcccggggggaactgtttgtctggcaaattcgccttccccgcacgcttgcggtattgctggttggcgctgcgctggcgctatctggcgccgtgatgcaggcgctgtttgaaaacccacttgctgaaccgggtctgctcggcgtttcgaatggggccggtgttgggcttattgccgccgtcttactggggcaggggcaactgccaggatgggcgctggggctgtgcgctatagccggcgcgctcattattacgttaatcctgctgcgttttgcgcgtcgccatctctctaccagccgcttgttgttggcgggcgtcgcgctgggcattatctgtagcgcgctgatgacgtgggctatctatttttccacctctttcgatctgcggcaattaatgtactggatgatgggaggatttggcggcgttgactggcagcagagctggctaatgattgcgctcatcccggtactgatctggatatgttgccagtcgcaaccgctgaatatgctggcgctaggggaaacctcggcgcggcagcttggcctgccgctgtggctctggcgcaatttgttggtcatcgccaccggctggatggtgggcgtcagcgtggcgatggcgggggcgattggttttatcggtctggttattccgcacatcctgcgcttatgtggtttaaccgatcaccgggttttacttcccggctgcgcgctggccggggctatcgccctgctattggctgatgtggtcgcccgactggcgctggcgtcggctgaactgcctatcggggtggtcaccgccacattgggggcaccagtgtttatctggctgctactcaaatccgcgcgttag

SEQ ID NO: 9847 - DNA, 273 bp, Salmonella typhi
  CDS (1)...(273)
gtgaataaatgtccactgatcgaaaaaattgctgcaggggctgatatctctaaggctgcggctggacgtgcgttagatgcgattattgcttctgttaccgaatctctgaaagaaggggatgacgttgcactggtaggctttggtacttttgctgttaaagagcgtgctgcccgtactggtcgcaacccgcaaacaggtaaagagatcaccatcgccgctgccaaagtgccgagtttccgtgcaggtaaagcgctgaaagacgcggtaaactaa

SEQ ID NO: 9848 - DNA, 1968 bp, Salmonella typhi
  CDS (1)...(1968)
atgggcattttctccattgccaaccagcacattcgttttgcggtaaagctggcgtgcgccattgtgctggcattatttatcggcttccattttcagctggagacgccgcgttgggcggtgctgaccgccgcgatcgtggcggcaggcccggcatttgccgccggcggggaaccctattccggcgctatccgttatcgcggaatgttgcgtattatcgggacgtttattggctgtatcgccgcgcttatcattattatctctatgatccgcgcgccgctattgatgattctggtgtgctgtgtctgggccggtttttgtacctggatctcctctttagtacggatcgaaaactcttatgcgtggggactgtcaggttatactgcgctgatcattgtgattaccattcagacggagccgctgcttacgccgcaatttgcgcttgagcgctgtagcgaaatcgtcatcggcattggctgcgctattttagcggatctgcttttctcgccgcgatcgataaagcaggaggttgatcgcgaactggactgtttactggtagcgcaatatcagctaatgcaactttgtattaagcatggcgacagcgaagaagtcgacaacgcctggggcgatctggtgcgacgcacggcggcgctggaggggatgcgaagtaatctgaatatggaatcttcgcgctgggtacgcgctaaccgccgcctgaaagcgttgaatacgctttcgctcacgctgattacgcaatcctgtgaaacttatcttattcaaaacacgcggccggaactgattaccgatacattccgggaactgttcgagacgccggttgaaacggtacaggacgtccacaggcagttaaaacggatgcggcgtgtcattgtttggaccggcgagcgcgaaacgcccgtcacgctttatagctgggtaggcgctgcaacgcgctatctgttgcttaaacgcggcgtgatcagtaacaccaaaatcagcgcgacggaagaagagatcctgcaaggcgagcccgtagttaaagtggaatccgctgaacgccaccatgcgatggtgaacttctggcgcaccacgctttcctgcattctggggacattattctggctatggaccggctggacatcgggtaatggcgcgatggtgatgattgccgtggtgacctcgctggcgatgcgtttacccaatccgcgcatggtctgcattgattttatttatggcactctggcggcgttgccgctgggattgctctatttcctggtgattattcccaatacgcagcaaagtatgctgttgttatgtttgagcctggcggtattggggttctttatcggtattgaagttcagaaacggcgtctggggtcgatgggggcgctggccagtacgattaacattattgtgttggataatccgatgacgttccatttcatccagttcctcgacagcgcgttggggcaaattgtcggctgtatgctggcgtttatcgtcatcctgctggtgcgtgataaatccaaagatcgaaccggtcgcgtgctgcttaatcagtttgtttccgctgcggtctcggcaatgacgaccaacgtggtacgccgtaaagaaaaccgtctgcctgcgttatatcagcaactctttttgctgatgaataaattcccaggcgatttgccgaagttccgcctggcgctaacgatgatcattgctcatcaacgtctgcgcgacgcgccgataccggttaatgaagatctgtcagtgttccaccgccagcttcgtcgtaccgcagaccatgttatttccgccggaagcgatgataaacggcgacgctactttggtcagttgctggatgagctggatatctatcaggagaaattacgtatctgggaggcgccgccgcaggtgacggaaccggttaaacgcctgacgggcatgttacataaataccagaacgcgcttaccgatagctaa

SEQ ID NO: 9849 - DNA, 2451 bp, Salmonella typhi
  CDS (1)...(2451)
  misc_feature (1)...(2451): n = A,T,C or G
atgccgccactcaggttgacggccagcgtaaagacttcattcgtctgggcgtgttgggcgactggtcgcatccgtacctgnaccatggacttcaaaaccgaagccaacatcatccgcgcgctgggcagaattatcaaaaacggtcatctgcacaaaggcgctaagccggtgcactggtgtgttgactgtcgttccgcgctggcggaagcggaagttgaatattacgacaaaacgtcgccgtctatcgacgtggcgttccgtgccgtcgatcaggatgcggtgaaagcgaagtttggtttgccgggcgtgagcggccctgtgtcgctggttatctggaccaccacgccgtggacgctgccggctaaccgcgccatctccctggcgccggactttgattatgcgctggtgcagatcgacggtcaggcggtgattctggcgaaagatctggttgaaagcgtcatacagcgtattggcgcggctgaatacaccattctcggcaccgtcaaaggcgcggagctggaactgctgcgctttacccatccgtttatgggctttgacgtgccggcgatcctcggcgatcacgtcaccctggatgctggtaccggtgccgttcacaccgcacctggccatggcccggacgactatgtgattggtcagaaatacggtctggaaacggctaacccggttgggccggacggcgcttacctgccaggcacatatccaacgcttgacggtgttaacgtcttcaaagcgaacgatatcgttattgaactgctgaaagaaaaaggcgcgctactgcatgtcgaaaaaatgcagcacagctatccgtgctgttggcgtcacaaaacgccgatcattttccgcgcgaccccgcagtggttcgtcagcatggataaagaagggcttcgtcaacagtcgctgaaagagatcaaaggcgttcagtggatcccggactggggtcaggcgcgtattgaatcaatggtcgctaaccgtcctgactggtgtatctcccgtcagcgtacctggggcgtaccgatgtcgctgttcgtgcataaagaaacgcaggagctgctgccgattgagcgtactctggcggcgatggaagaggtggcgaaacgcgttgaagttgacggtatccaggcgtggtgggatctcgacccgaaagagatcntcggcgaagatgctgatcaatatgagaaagttccggatacgttggacgtttggtttgattccggttccaccagttactccgtggttgacgcccgtccggaattcgccggtcacgctgccgatatgtatctggaagggtctgaccagcatcgcggctggtttatgtcctccctgatgattagcgtggcgatgaaaggcaaagcgccataccgccaggtactgactcacggcttcaccgtcgatggtcaggggcgcaagatgtccaagtccatcggtaacaccgtgtcgccgcaggatgtgatgaataaactgggcgcggatatcctgcgtctgtgggtggcgtctactgactataccggcgaaatggcggtctctgacgaaatcctgaaacgtgctgctgacagctatcgtcgtatccgtaataccgcgcgcttcctgctggcgaacctcaatggcttcaatccggccaccgatatggtcaaaccggaagagatggtggtgctggacaggtgggcggtgggctgcgcgaaaacggcgcagcaagagattctgaaggcatacgaagcttacgacttccatgaagtggtacagcgcctgatgcgcttctgctccgttgaaatggggtcgttctacctcgacatcatcaaagaccgccagtacaccgcgaaggccgatagcgtcgcgcgtcgtagctgccagactgcgctgtatcatatcgcagaggcgctggttcgctggatggcgccgatcatgtccttcacggctgatgaaatctggggctacctgccgggcgagcgtgaaaaatatgtcttcaccggcgaatggtacgacgggttgtttggcctggaagagaatgaagaatttaatgacgcattctgggacgatgtccgctatatcaaggaccaggtcaacaaagagctggaaaatcagaaggccaatggcatcaaatcgaacctggaagcaaaagtgacgctgaaatatgctgacgatgctaacggtacgatcaagaagctgaaactgttgggcgaagaggtcagatttatcttcattacttcccagttcgtgatttctgagcaagcggggggtattgatgatgaaaatattcagtacaatgctggtaatacgacagttcaggcagtggtaacgcgtgccgagggtgataagtgtccgcgctgctggcactacactactgatgtcggcaaggtggcggaacatgcagatatctgcggacgctgtgtcagcaacatcgccggtaatggcgaacaacgtaaatttgcctga

SEQ ID NO: 9850 - DNA, 726 bp, Salmonella typhi
  CDS (1)...(726)
atgtcatcctgggttgaggtatctctgaacacaccggcacagctctctttgccactttatcttcctgacgacgaaactttcgcaagtttctggccgggggataacgcctctctactggccgcgttacaaaacgtgttgcgccaggaacatagtggatatatctacctttgggcgcgtgaaggcgcgggccgcagccatttgctgcacgccgcctgcgctgaactgtcgcagcgtggagatgcggtaggctacgtcccgctcgataaacgcacctggttcgtgccggaagtgctcgacggtatggaacacctctcgctggtgtgtattgataacattgagtgcgtcgctggcgatgaactgtgggagatggccatctttgatctctataaccgcattctggagtccggtaagacgcggttattgatcaccggcgatcgtccgccaagacagttaaatctgggcttacccgatctcgcttcccgtctggactgggggcaaatctataaactccagcctctttccgatgaagacaaacttcaggcgctacagttgcgtgcccgattacgggggtttgaactgccggaagatgtcggacggtttttactcaaacgtcttgatcgcgaaatgcgcacgctgtttatgacgctggatcagctcgatcatgcgtcgatcactgcccagcgaaaactgacgatcccgtttgtcaaagagatcctgaaactgtaa

SEQ ID NO: 9851 - DNA, 627 bp, Salmonella typhi
  CDS (1)...(627)
atgaagatcgtggaagtcaaacacccactcgtcaaacacaagctgggtctgatgcgtgaaaacgacattagcactaaacgctttcgtgaactcgcctcagaagtaggcagcctgctgacgtatgaagcgacagccgacctggaaacggaaaaagtcaccatcgaaggctggaatggcccggtggaaatcgaccagatcaaaggtaaaaaaattaccgttgtgccgattctgcgcgcggggttgggcatgatggaaggcgttctggaaaatgtaccgagcgcgcgtatcagcgtagtcgggatgtaccgtaacgaagagacgctcgagccagtaccttatttccagaaactggtatcgaacattgatgagcgcatggcgctgatcgtcgacccgatgctggcgaccggcggttctgtcatcgcgaccatcgacctgctgaaaaaagcaggctgtagcagcattaaggtgctggtgctggtcgccgcgccggaaggcattgcggcgctggaaaaagcgcacccggacgttgaactgtacaccgcctctatcgatcaggggcttaacgagcacggatacattattccggggcttggcgatgccggcgataagatttttggtaccaaataa

SEQ ID NO: 9852 - DNA, 1578 bp, Salmonella typhi
  CDS (1)...(1578)
atgacggaaaacattcataagcatcgcatcctcattctggacttcggttctcagtacactcaactggttgcgcgccgcgtgcgtgagctgggtgtttactgcgaactgtgggcgtgggatgtgacagaagcacaaattcgtgacttcaacccaagcggcattattctttccggcggcccggaaagcaccaccgaagaaaacagcccgcgcgcgccgcagtatgtctttgaagcaggcgtgccggtatttggcgtctgctacgggatgcagaccatggcgatgcagcttggcggtcatgtagaaggttctaatgagcgtgaatttggttacgcgcaggtcgaagtgctgaccgacagcgcgctggttcgcggtattgaagattccctgaccgccgacggcaaaccgctgctggacgtgtggatgagccacggcgataaagtgacggcgattccgtccgacttcgtgaccgtagccagcaccgaaagctgcccgttcgccatcatggctaacgaagaaaaacgcttctacggcgtacagttccacccggaagtgactcacacccgccagggtatgcgcatgctggagcgttttgtgcgtgatatctgccagtgtgaagccctgtggacgccggcgaagatcatcgacgacgccgtggcgcgcattcgcgagcaggtaggcgacgataaagtgatcctcggtctctccggcggcgtggattcttccgtaaccgcaatgctgctgcaccgcgcgatcggtaaaaatctgacctgtgtattcgtcgacaacggcctgctgcgtctcaacgaagccgagcaggtgatggacatgtttggcgaccattttggtctgaacatcgttcacgtaccggcagaagatcgcttcctgtccgcgttggctggcgaaaacgatccggaagcgaagcgtaagatcattggccgtgtttttgtggaagtgttcgacgaagaagcgttgaaactggaagacgtgaaatggctggcgcagggcaccatctaccctgacgtcatcgaatctgcggcgtctgcaaccggtaaagcgcacgtcatcaaatctcaccacaatgttggcggcctgccgaaagagatgaagatggggctggttgaaccgctgaaagagctgttcaaagacgaagtgcgtaagattggtctggagctgggcctgccgtacgacatgctgtaccgtcatccgttcccggggccgggcctcggcgtacgtgtactgggtgaagtgaagaaagagtactgcgacctgctgcgccgtgctgatgccatcttcattgaagagctgcgtaaggcggatctgtacgacaaagtcagccaggcgttcaccgtcttcctgccagtacgctccgttggcgtaatgggcgatggtcgtaagtacgattgggtggtctctctgcgtgctgtcgaaaccatcgactttatgaccgcgcactgggcgcacctgccgtatgacttcctgggtcgtgtttccaaccgcatcatcaatgaagtcaacgggatttcccgtgtggtgtatgacatcagcggtaaaccaccggctaccattgagtgggaataa

SEQ ID NO: 9853 - DNA, 1362 bp, Salmonella typhi
  CDS (1)...(1362)
atgaaactaaagaccacattgttcggcaatgtttatcagtttaaggatgtaaaagaggtactggctaaagccaacgaactgcgttcgggggatgtgctggccggggttgccgcggcaagttcgcaggagcgcgtagcggcaaaacaggtactgtcggaaatgacggtggcggatatccgcaacaatccggtgattgcctatgaagaggactgcgtgacgcgcctgattcaggatgacgtcaacgaaacggcctataatcggattaaaaactggagcatcagcgaactgcgcgaatacgtactgagcgatgaaacctccgtggacgacatcgcgtttacccgcaaaggcctgacctccgaagtggtggcggcagtggcgaaaatctgctccaacgccgacctgatctacggcggtaagaaaatgccggtgatcaaaaaagccaataccaccatcggtattccgggcacctttagctgccgtttgcagccgaacgatacccgtgacgatgtgcagagtatcgccgcgcaaatctacgaagggctttctttcggcgcaggcgatgcggtgatcggcgttaacccggtgaccgatgacgtggagaacctgacccgcgtgctcgacaccgtttacggcgttatcgataaattcaatattccgacccagggctgcgtgctggcgcacgtcaccacccagattgaagcgattcgtcgcggcgcgccaggcggactgattttccagagcatttgcggcagcgagaagggcttaaaagagttcggtgtcgagctggcaatgctcgacgaagcgcgggcagtgggggcggagttcaaccgcatcgccggggaaaactgcctgtactttgaaaccggacagggctcggcgctgtcggctggtgcgaactttggtgccgaccaggtgacgatggaagcgcgtaactacgggctggctcgctactacgatccgttcctggtgaacaccgtggtgggctttatcgggccggagtatctctacaacgacaggcagattatccgcgccggtctcgaagatcactttatgggcaagctgagcggcatctcgatgggctgcgactgctgctataccaaccatgccgacgccgaccagaaccttaacgaaaacctgatgattctgctcgccactgccggctgtaactacatcatggggatgccgctcggcgacgacatcatgctcaactaccagactaccgctttccacgataccgccaccgtccgtcagttgctgaatttacggccgtcgccggagtttgaacgctggctggaaacgatgggcattatggcaaacggtcgtctgaccaaacgggcgggcgatccgtcactgttcttctga

SEQ ID NO: 9854 - DNA, 993 bp, Salmonella typhi
  CDS (1)...(993)
atggtctgttgggggcaaaaatggcattatgcgccccttataataaagctgactaaggttcaggcagaaaggtcaccaatgagctggattgaacgaattaaaagcaacattactcccacccgcaaggcaagcattcctgaaggggtgtggaccaagtgtgatagctgcggtcaggttttataccgcgctgagctggaacgtaatcttgaggtctgtcctaagtgtgaccatcatatgcgcatgtcggcgcgcaatcgcctgcatagcctgttagatgaaggttcccttgtggagttgggtagcgagctggagccgaaagacgtgctcaagtttcgcgactccaaaaaatataaagacagactggcgtccgcgcagaaagaaaccggcgagaaagacgcgctggtggtcatgaaagggacgcttcacggtatgccggttgtcgccgccgcgtttgaattcgcgttcatgggcggctcaatggggtctgtcgttggcgcacgcttcgttcgcgccgttgaacaggcgctggaagacaactgtccgttagtgtgtttctctgcttccggcggcgcgcgtatgcaagaagcgctgatgtcgctgatgcagatggcgaaaacctcggcggcgctggctaaaatgcaggaacgtggtctgccctacatctcggtattgaccgatccgacaatgggcggcgtttccgccagttttgcgatgctgggcgatctcaacatcgccgagccaaaagccctgattggcttcgccggcccgcgcgttatcgaacaaaccgttcgtgagaagctcccgccaggattccagcgcagtgagttcctgatcgaaaaaggcgctattgatatgatagtccgccgtccggaaatgcgcctgaagctggcgagcattctggcgaagctgatgaatctgcccgcgccgaacccggacgccccgcgtgaaggcgtggtggtgcctccggcgccggatcaggagtctgaggcctga

SEQ ID NO: 9855 - DNA, 1014 bp, Salmonella typhi
  CDS (1)...(1014)
atgtctgaaggctggaacattgccattctgggcgcaacgggcgccgtaggcgaagccctgcttgaaacactggctgaacgccagttcccggtcggtgaaatttatgcgttggcgcgtcatgaaagcgcgggcgagcacctccgttttggtggcaagtcggtcattgtccaggatgcggcggactttgactggacgcaggcgcagttggcgtttttcgttgccggcgcagaggcatcggctgcctggatagacgacgcgaccaatgcaggttgcctggtgatagattccagcggtctgttcgcgctggagcctgatgtgccgctggtcgtgccggaagttaacccgtatgtactggcggattaccgtaaccgtaacgtgattgcggtcgccgatagtctgaccagtcaactgctggcggcgctcaagccgttaatcgatcaggggggactgtcgcgcatcgccgtcaccagtatgttatcagcgtccgcgcaggggaaaaaagcggtcgatgcgctggccggacaaagtgcgaagctgcttaacggcataccgattgatgaagatgatttctttggccgccagttggcgttcaatatgctgccgctgctgccggatcgggaaggcagcgtgcgccaggaacgtcgtatcgtcgatgaagtgcgtaaaattttgcaggatgatggcgtgatgatctccgccagtgtcgtgcagtcgccggtgttctatggccatgcgcagatggtgagctttgaagcgctccgtccgctggcggcggaagaggcgcgcgaggcgttttcccgcggtgaagatatcgtactgtcagaagagacggattacccgacgcaggtgggcgacgcttccggcaatccacagctctctattggctgtgtgcataatgattacggtatgccggaacaaattcagttctggtcagtggcggacaacgtgcgtttcggcggcgcgctgatggccgttaaaattgcggagaagctggtgcaggagtatctgtactga

SEQ ID NO: 9856 - DNA, 1089 bp, Salmonella typhi
  CDS (1)...(1089)
gtgatggcaggaaacacaattggacaactctttcgcgtaaccactttcggcgaatcacacgggctggcgcttgggggtatcgtcgatggcgtgccgcccggcatcccgttgacggaggccgatctgcagcacgatctcgacagacgccgccctggcacctcgcgctatactactcagcgccgcgaaccggaccaggtaaaaattctctccggcgtgtttgatggcgtgacgaccggcaccagtattggcctgctgattgaaaacaccgatcagcgctcgcaggactacagcgcgattaaagatgtttttcgcccgggacacgcggattacacctatgagcagaaatacggcctgcgcgattaccgcggcggtggacgttcttccgcgcgtgaaaccgcgatgcgcgtagcggcaggggcgatcgccaagaaatacttggcggaaaagttcggcatcgaaatccgcggctgcctgacccagatgggcgacattccgctggagattaaagactggcgtcaggttgagcttaatccgttcttttgccccgatgcggacaaacttgacgcgctggacgaactgatgcgcgcgctgaaaaaagagggtgactccatcggcgcgaaagtgacggtgatggcgagcggcgtgccggcagggcttggcgaaccggtatttgaccgactggatgcggacatcgcccatgcgctgatgagcatcaatgcggtgaaaggcgtggagatcggcgaaggatttaacgtggtggcgctgcgcggcagccagaatcgcgatgaaatcacggcgcagggttttcagagcaaccacgctggcggcatcctcggtggcatcagtagtgggcaacacattgtggcgcatatggcgctgaaacctacctccagcattaccgtgccgggacgtacgatcaaccggatgggtgaagaggtcgagatgatcaccaaagggcgccacgatccgtgtgtggggattcgcgcagtgccgatcgcagaagccatgctggcgatcgtactgatggatcacctgctgcgccatcgggcacagaatgcggatgtaaagacagagattccacgctggtaa

SEQ ID NO: 9857 - DNA, 1260 bp, Salmonella typhi
  CDS (1)...(1260)
  misc_feature (1)...(1260): n = A,T,C or G
atgtntttgaggcaaaagatgactgacnatcgcgtagagaatagcagcggacgggcggcgcgcaagctaaggctcgcattaatggganctgcgtncattgccgcgattggttatatcgatcccggtaacttcgcgaccaatattcaggccggcgccagctntggctaccagctactctgggtggtggtctgggcgaacctgatggcgatgctgattcaaatcctctcggcaaaactcgggatcgccaccggcaagaacctggcggagcaaattcgcgaccattatccgcgtccggtagtctggttttactgngtacaggcggaaatcatcgcgatggccaccgatttagctgaatnnntatcgcgcgcaataggttttaagctgatcntgggcgtctctttacaacagggcgcggtattgcccggtatcgcgacgtttctgattttaatgttacagcgccgcggtcaaaagccgcttgaaaaagtcatcggcggtttactgctttttgtcgccgccgcttacattgtggagctgtttttctctcagcntganntggngcagctcggnaaaggaatggttatnccggcgctaccgaacccggaagccgtattnttagccgccggcgtgcttggcgcgacgattatgccgcacgtgatttatctgcactcgtcattaacgcagcatctgcacggcggaacgcggcaacaacggtactcagcaacgaaatgggatgtcgctattgccatgacgattgccggttttgtcaatctggcaatgatggcgaccgccgcggcggcgtttcattttagcggccatactggcatcgccgacctcgatcaggcatacctgacgctggaaccgttactaagccatgcggcggcaacagtgtttggtcttagtctggttgcggcagggctttcctccaccgtggtagggactctggcggggcaggtggtgatgcaagggtttgtccgttttcacattccgctgtgggtacggcgcaccattaccatgctgccctcatttattgtgattttgatggggctggaccctacccgaattctggtgatgagccaggtgctgctgagttttggtattgcgctggcgctggtgccgctcctgattttcaccagtaacgctacgctaatgggcgagctggtgaacacgcggcgggtaaaacagattggctggataattgtcgtgctggtcgtcgccctgaatatctggttgctggttggaacggtgatggggttgtcataa

SEQ ID NO: 9858 - DNA, 1416 bp, Salmonella typhi
  CDS (1)...(1416)
  misc_feature (1)...(1416): n = A,T,C or G
atgaaaatcaaaactcgcttcgcgcctagcccgacaggttatctgcacgtcggcggcgcgcgtactgctctttattcctggcttttcgcacgtcaccacggcggtgaattcgtgctgcgtattgaagacaccgatcttgagcgttccacgccggaagccattgaagccatcatggatggtatgaactggctgaacctggaatgggacgaaggcccatatttccagaccaaacgttttgatcgctataacgcggtgattgacgagatgctggaggcgggaacagcctataaatgctactgctctaaagagcgtctggagcaactgcgtgaagatcagatggcgaaaggcgagaagccgcgttatgacgggcgttgccgtcacagccacgaacatcatgccgacgatgagccatgcgtggtgcgctttgccaacccgcanganngttccgtnattttngatgatcagatccgtggcccgatcgaattcagcantcangaactggacgatctgatcattcgtcgtaccgacggttccccaacctacaacttctgtgtggtggtggacgactgggatatgganattacccatgtgattcgtggcgaagaccatatcaacaatactccgcgccagattaacattctgaaagcgttaaacgcgccggtgccgatgtacgcgcatgtgtcgatgattaacggcgacgacggtaaaaagctgtctaaacgtcacggtgcggtgagcgtgatgcagtatcgcgatgacggttatctgccggaagcgttgctgaactatctggtgcgtctgggctggtccagcggcgatcaggaaatcttcacccgcgaagagatgatcaagctgttctccctcggtgcggtgagcaagtctgcgagcgcgttcaacaccgataaactgctgtggctgaaccaccactatatcaatacgctggcgccggaatatgtggcgacgcatttgcagtggcatatcgagcaggaaaatatcgacacccgtaacggcccgcagcttgctgagctggtgaagttgctgggcgaacgctgcaagactctgaaagagatggcgcagagctgccgctacttctatgaagacttcagcgagtttgacgccgatgcggcgaaaaaacacctccgcccggtggcgcgtcagccgctggaagtggtgcgcgacaagctgtcggcgattacggactggtcagcagaaaacgtccaccacgcgattcaggccacggcggatgagctggaagtggggatgggtaaagtagggatgccgctgcgtgtggctgtgaccggtgccggcnagtcgcctgcgctggatgtcaccgtacatgcgattggtaaaacccgcagcattgagcgtatcaacaaagcgctgggctttatcgccgagcgtgaaagtcagcagtaa

SEQ ID NO: 9859 - DNA, 2637 bp, Salmonella typhi
  CDS (1)...(2637)
atgagcgaccttgcgagagaaattacaccggtcaacattgaggaagagctgaagagctcctatctggattatgcgatgtctgtcattgttggccgtgcgctgccggatgtccgagatggcctgaagccggtacaccgtcgcgtactttacgccatgaacgtattgggcaatgactggaacaaagcctataaaaaatctgcccgtgtcgttggtgacgtaatcggtaaataccatccccacggcgattccgcagtgtatgacaccatcgttcgtatggcgcagccattctcgctgcgttacatgctggtggatggtcagggtaacttcggttctattgacggcgactccgcggcggcaatgcgttatacggagatccgtctggcgaaaatcgcccacggactgatggccgatctcgaaaaagagacggtggatttcgtggataactatgacggtacggaaaaaattccggacgtcatgccgaccaaaattccgaatctgctggtgaacggttcttccggtatcgcagtaggtatggcgacgaatatcccgccgcacaacctgacggaagtgattaacggctgcctggcgtatatcgacaacgaagacatcagcattgaagggctgatggaacatattccgggtccggacttcccgaccgccgcgatcatcaacggtcgtcgtggtatcgaagaagcctaccgtaccggtcgtggcaaagtgtacattcgcgcccgcgcggaagttgaagctgacgcgaaaacgggccgtgaaaccatcatcgtccatgaaattccctatcaggtgaacaaagcgcgcctgatcgagaaaatcgccgagctggtgaaagataaacgcgtggaaggcatcagcgcgctgcgtgacgaatccgacaaagacgggatgcgcatcgtgattgaagtgaaacgcgatgcggtgggcgaggtggtgcttaataatctctactcccagacccagctacaggtttccttcggtattaacatggtggcgctgcatcacggccagccgaagatcatgaacctgaaagatattatttcagcgttcgtgcgccaccgccgtgaagtggtgacgcgtcggactatttttgaactgcgtaaagcccgtgatcgtgcgcatatccttgaagctctggcgattgcgctggccaacatcgacccgattatcgaactgattcgccgcgcgccgacgccggcggaagcgaaagcggcgctgatttcgcgtccgtgggatctgggcaacgttgctgcgatgctggagcgcgccggtgacgacgccgcgcgtccggaatggctggagccagaatttggcgtgcgtgacggtcaatactacctgactgaacagcaggcgcaggcgattctggatctgcgtttgcagaaactgaccggcctggagcatgaaaaactgctcgacgaatacaaagagttgctggagcagatcgctgaactgctgcacattctgggcagcgccgatcgcctgatggaagtgatccgcgaagagatggagttaattcgcgatcagttcggcgatgagcgtcgtaccgaaatcaccgccaacagcgccgatattaatatcgaagatctgattagccaggaagatgttgtcgtaaccttgtctcatcagggctatgtgaaatatcagccgttaaccgattacgaagcacagcgtcgtggcggtaaaggcaaatcagcagcacgtattaaagaagaagactttatcgaccgcctgctggtggccaacacccatgacaccatcctttgcttctccagccggggccgtctgtactggatgaaggtctatcagttgccggaagccagccgtggcgcgcgcggtcgtccgatcgttaacctgctgccgctggaagccaacgaacgtatcaccgcgattctgccggttcgtgagtacgaagaaggcgtcaacgtctttatggcgaccgccagcggtaccgtgaagaaaacggcgctgaccgaattcagccgtccgcgttccgccggtattatcgcggtaaacctcaacgacggcgacgagctgattggcgttgacctgacttctggttctgacgaagtcatgctgttctcggccgcgggtaaagtggtgcgcttcaaagaagacgccgtccgtgcgatggggcgtaccgcgaccggtgtgcgcggtattaagctggcgggagacgataaagtagtttctctgatcatcccacgcggcgaaggcgctattctgaccgtaacgcaaaacggctacgggaagcgtaccgcagcggacgagtacccgaccaagtctcgtgcgacgcagggcgttatctctatcaaagtgaccgagcgcaacggttccgttgtcggtgcggtacaggtagacgattgcgaccagatcatgatgatcacggatgccggtactctggtgcgtacccgagtgtctgagatcagcgtggtgggacgtaatacccagggcgttatccttatccgcacggcggaagatgaaaacgtagtgggtctgcaacgcgttgctgaaccggtagatgacgaagaactcgatgctatcgacggcagcgtgacggaaggggatgaggatatcgccccggaagcggaaagcgatgacgacgttgcggatgacgctgacgagtaa

SEQ ID NO: 9860 - DNA, 1842 bp, Salmonella typhi
  CDS (1)...(1842)
  misc_feature (1)...(1842): n = A,T,C or G
atgaacatgcttgcnttaaccattattctgccattgattggctttgtactgctggcgttctctcgcggacgctggtcggaaaatctctccgcgaccattggcgtgggctccgttggtctggcggcgttggtgacagcgtttgtcgggatggatttcttcgccaacggcaaacaggcgttcagccagccgctgtggacgtggatgtcggtcggtaacttcaacatcggttttaacctggtgctggacggcctgtcgctgaccatgctctctgtggtcaccggcgtcggcttcctgatccacatgttcgcttcctggtacatgcgtggagaagagggctactcccgcttcttcgcttataccaacctgtttatcgccagcatggttgttctggtgctgtccgataacctgctgttgatgtacctcggctgggaaggcgtgggcctgtgctcttatctgttgatcggcttctattacagcgatccgaagaatggcgcggcggcaatgaaagccttcgtggtgacccgtgtcggtgacgtattcctcgccttcgcgctgttcatcctctacaacgaactgggcacgctgaacttccgcgaaatggtcgagctggcgccagcgcactttgctgacggcaacaacatgctgatgtgggcgacgctgatgctgctgggcggcgcggtcggtaaatctgcgcagctaccgttgcagacctggcttgccgacgcgatggccggtccgacgccggtctccgcgctgatccacgccgccaccatggttaccgccggtgtctacctgatcgcacgcacgcatggcctgttcctgatgaccccggaaattctgcatctggtgggcattatcggggcgattacgctggtcatggcgggtttcgccgcgctggtgcagaccgacatcaaacgcgtgctggcctattccaccatgagccagattggctacatgttcctggcgcttggcgtgcaggcgtgggatgcggcgattttccacctgatgacgcacgccttctttaaagcgctgctgttcctggcatccggctcggtaattttggcctgccatcacgaacagaacatctttaagatgggcggtctgcgtaagtccattccactggtgtatgcctgcttcctggtggggggcgcggcgctgtcggcgctgccgctggtcactgcgggcttcttcagtaaggatgagatcctggctggcgcgatggcgaacggtcatatcaatctgatggtggcgggtctggttggcgcgttcatgacctccctgtacaccttccggatgattttcatcgtattccacggtaaagaacanattcatgctcatgcagggaaggngattacccaccatctgccgctgattgtcctgatgattctgtctacctttgttggcgcgctgattgtgccgcctctgcagggggtgctgccgcagacaactgaactggcgcatggtcgtgtgttgaccctggaaattacctctggcgtagtggcgattgccggcatcntgattgccgcatggctgtggctgggtanacgtacgctggtgacgtcgatcgccnacagcgcgccgggccatctgctggggacctggtggtataacgcctggggctttgactggctgtacgacaaagtattcgtcaagccattcctcggtatcgcctggctgctgaagcgcgacccgcttaatgcgttgatgaacattccggctatcctttcccgttttgcaggcaaaggcctggtactgagcgagaacggttatttgcgctggtatgtggcatccatgagcatcggcgcggttgtggtgctggcgctgctgatggtactgcgttga

SEQ ID NO: 9861 - DNA, 1338 bp, Salmonella typhi
  CDS (1)...(1338)
atgaaaaacgttatccgtactcccgaaacccatccgctgacctggcgtctgcgcgatgacaaacagccggtctggctggatgaatatcgtagcaaaaacggctacgaaggcgcgcgtaaggcgctgaccggcctgtctccggatgaaatcgtcagccaggtaaaagacgctggtctgaaagggcgcggcggcgcgggcttttccaccggtctgaagtggagcctgatgccgaaagatgaatccatgaacatccgttacctgctgtgtaacgccgatgaaatggagccgggcacctataaagaccgtctgctgatggaacaactgccgcacctgctggtggaaggcatgctgatctccgcgttcgcgctgaaagcgtatcgtggttacatcttcctgcgcggcgaatatatcgaagcggctgtacatctgcgccgtgcgattgccgaagcaaccgaggccgggctgcttggcaaaaatatcatgggcaccgggttcgacttcgaactgtttgtccacaccggggcagggcgttacatctgtggtgaagaaacggcgctgattaactccctcgaaggccgccgcgcgaacccgcgctccaagccgcctttcccggcgacctccggcgtatggggcaagccgacctgtgtgaataacgtcgaaacgttgtgtaacgtcccggcaatcctcgccaacggcgtggagtggtaccagaacatctcgaaaagcaaagatgcgggtaccaagctgatgggcttctcgggccgcgtgaagaatccgggcctgtgggaattaccgttcggcaccatcgcgcgcgagatcctcgaagactacgccggcggtatgcgtgacggcctgaaattcaaagcctggcaaccgggcggcgcggggacagacttcctgaccgaagcacacctcgatctgccgatggaattcgaaagcatcggtaaagcggggagccgtctgggcaccgcgctggcgatggcggtagaccacgaaatcggcatggtgtcgctggtgcgtaacctggaagagttctttgcccgcgaatcctgcggctggtgtacgccatgccgcgacgggttgccgtggagcgtgaaaattctgcgcgcgctggagcgtggcgaaggccagccgggggatatcgagacgcttgagcaactgtgtcgattcctcgggccgggtaaaaccttctgcgcgcatgcgccgggcgcggttgagccactgcaaagcgcaattaagtatttccgcgaagaattcgaagctggcatcaagcagccgttcagtaatacccatttaatcaatggtattcagccgaacctgctcaaagagcgctggtga

SEQ ID NO: 9862 - DNA, 2145 bp, Salmonella typhi
  CDS (1)...(2145)
gtgtcccgtattattatgctgatccctaccggaaccagcgtcggtctgaccagcgtcagcctcggcgtcatccgtgctatggaacgcaaaggcgttcgtctgagcgtctttaagcctatcgcccagcctcgcgctggcggcgatgcgcctgaccagaccaccactatcgttcgcgcgaactctaccctgccggcggctgaaccgctgaagatgagccacgttgaatctctgctctccagcaaccagaaagacgtgctgatggaagagatcatcgcaaactaccatgcgaataccaaagacgcggaagtggtgctggttgaaggtctggttccgacccgtaaacatcagttcgctcagtctctgaactatgaaatcgcgaaaacgctgaatgcggaaatcgtttttgtcatgtctcagggtaccgacacgccagaacagctgaacgagcgtatcgaactgacgcgcagcagcttcggcggcgcgaaaaacaccaacatcaccggcgttatcatcaacaaactgaatgcgccggttgatgaacaaggccgtactcgcccggatctgtcagagatttttgacgactcttccaaagcgcaggtgatcaaaatcgatcctgctaaactgcaggaatccagcccgctgccggttctgggcgcggtgccgtggagcttcgacctgattgcgacccgcgctatcgatatggcgcgtcacctgaacgccaccatcattaacgaaggcgatatcaaaacccgccgcgttaaatccgttacgttctgcgcgcgcagtattccgcatatgctggagcatttccgcgcaggatcgttgttagtgacctcagctgaccgtccggacgtactggtcgcagcttgcctggccgcgatgaacggcgtagaaatcggcgccctgctgctgaccggcggctatgaaatggacgcgcgcatttctaaactgtgcgaacgcgcattcgccaccggtctgccggtctttatggtgaacaccaacacctggcagacttcgctgagcctgcaaagcttcaatctggaagttccggttgatgaccatgagcgcatcgagaaagttcaggaatacgtcgcgaactacgttaacgctgactggatcgagtcgctgaccgccacttccgagcgtagccgtcgtctctctccgccggcgttccgctaccaactgactgagctggcgcgtaaagccggtaaacgcgtagtgctgccggaaggcgacgaaccgcgtaccgtcaaagcggcggcaatctgcgctgaacgcggcatcgccacttgcgtactgctgggcaacccggatgaaatcaaccgcgtcgcggcatctcagggcgtagagctgggcgcaggtattgaaatcgtcgatccggaagtggtgcgtgaaagctatgtcgctcgcctggttgagctgcgtaagagcaaaggcatgaccgaaccggttgcccgcgaacagctggaagacaacgtggtgctcggcacgctgatgctggagcaagacgaagtcgacggcctggtttccggcgcggttcataccaccgccaacaccatccgtccgccgctgcagcttattaaaacggcgccgggtagctccctggtctcttctgtgttctttatgctactgccggaacaggtttacgtttacggcgactgcgcaatcaacccagacccgactgcagagcagctggcagaaatcgcgattcagtctgcggattccgccattgccttcggcatcgaaccgcgtgtggcaatgctctcctactccaccggcacctctggcgcgggcagcgacgtagagaaagtacgtgaagcgacgcgtctggcgcaggaaaaacgtcctgacctgatgatcgacggtccgttgcagtacgacgccgcggtcatggctgacgtagcgaaatccaaagcgccgaactcgccggttgcgggtcgcgctaccgtgttcattttcccggatctgaacaccggtaacaccacctacaaagcggtacagcgttctgccgacctgatctccatcgggccgatgctgcagggtatgcgcaagccggtgaacgacctgtcccgtggcgcgctggttgacgatatcgtctacaccatcgccctgacggcgatccaggcttctcaacagcagcagtaa

SEQ ID NO: 9863 - DNA, 1398 bp, Salmonella typhi
  CDS (1)...(1398)
  misc_feature (1)...(1398): n = A,T,C or G
gtggatatgtntatccttganacgctgaatttngttgttgatattttaaaagtgccatcggtgcttgtagggttaattgcgctgattggtctggtggcgcagaaaaaagcgttttccgatgtggtaaaaggcacgattaaaaccattttaggttttattgtgcttggcggtggcgcaaccgtactggtgggttcattaaacccgctagggggtatgtttgaacacgcttttaatattcagggtattattcctaataatgaagcgatagtctcaatcgcgctggaaaaatatggcgcgtccacggcgttaattatggcatttggtatggtggccaatattgtcgtggcgcgctttacgcgtcttaaatatatctttttgaccggacatcacaccttttacatggcctgtatgattggcgtaatcctgaccgtggcggggtttgagggcgtagggctggtcttcaccggatcgctaatcctggggctggtgatggccttcttcccggcgttggcccaacgttatatgaggcggattaccggtaccgatgacattgcgtttggtcacttcggtaccctgggatatgtgctttccggctggattggcagcctgtgtggtaaaggctcccgctccacggaagagatgaacctgccgaaaaacctcagttttttacgcgacagttctatctcgatttcgctgaccatgatgattatctatctgatcatggcagtcagcgcagggcgtgagtatgtcgaagcgacgtttagcggcgggcaaaactatctggtgtacgccattatcatggcaatcaccttcgccgccggcgtattcatcattctgcaaggcgtccgtctgattctggcggaaattgttccggcctttaccggcttttcagaaaaactggtgccaaacgcgcgtccggcgctggactgcccggtggtgtatccctatgcccctaacgcggtactgattggcttcctgttcagttttctcggcgggctggtggggctgttcctgcttggacagatgaagcttgtgttaatcctgcctggcgttgtgccgcacttctttaccggcgcgaccgcaggcgtctttggcaatgccaccggcggtcgccgcggggcgatgatcggcgcatttgctaatggtctattaatcactttcctgccagtgctgttactgccggttctcggcgcgatcggcttcgccaataccacgttctcggatgctgactttggcgtaatcggtattttgctgggcaacctggcgcgttatctgtcgccgatggctatcacggggctggtggtggcgctattcgcgctactggtggcgtacaacgtgttggccaaaagcaaaaaagcgactgccgaagtgcaggaaaatagcggagcgaaagaatga

SEQ ID NO: 9864 - DNA, 459 bp, Salmonella typhi
  CDS (1)...(459)
gtgggggcgaataacatgctgggaacctggttatctgacgcaaccatcacgctacgggagagcgtggaaacgtggccgcaggcgctggaaatttgcggcaaacccctgctggacgcaggtgttatcgcaccggaatacattacggcgattgttcagcagcaccaaaagcttgggccgtattatgtattagcgccagggttagcgatgccgcatgcgaggccggaagagggggcgaaagggttaggtttatcgttactgaaactacagcgcggcgtttcatttggcgcagacgaattcgatccggttgacatcattattatgctggcggcgcctgataagcacagtcatatcgaaatgatatcggctctggcggaattattttccagtgatgtagatatggaaaaattacatcaggcaaaaaacctggaggacattaaaacgattattgaccgtttctga

SEQ ID NO: 9865 - DNA, 894 bp, Salmonella typhi
  CDS (1)...(894)
atgcagattctgattaccggcggtacgggcctgatagggcgtcatctcattccccggctgttaatactggggcaccaggtgacggtcgttacgcgcaatcccgataacgcgcgtcagattctcgattccagagtgacattatggaaagggctggcggaacgtgagcacctcaatgagattgatgccatcatcaatctggcgggcgaaccgattgccgacaagcgctggacgtcgcaacaaaaagaacggttgtgccaaagccgctgggctatcacgcaaaagttggtggatttaattcatgccagcgctacgccgccctcggtgttgatatccggctccgccacgggctattacggcgatctgggcgacgttgtcgtcactgaagatgagccgccgcacaacgaatttacgcataaactttgcgcccgctgggaacagattgcctgtcgtgcgcagagcgaccagacccgcgtctgcctgctgcgtaccggcgttgtcctggcgccgcaaggcgggattctggggaaaatggttccgccgtttcgcctcggactcggcggtccggtgggtaatggtcggcaatatctggcctggattcacattgacgatatggtcaacggcatcctgtggctgctggataacgatcttcgcggtcccttcaatatggtctcgccgtatcccgtccataatgagcagtttgctcatgcgctgggtcgcgcgctgcgccgcccggcgattattcgcattccggcgacggcaattcgcttattgatgggagagtcgtcagtgctggtactgggcggacagcgggcgctgccaaaacggcttgaagccgccggattcgcatttcgctggtatgatttagaagaggcgctggcggatgtgattcgctaa

SEQ ID NO: 9866 - DNA, 1230 bp, Salmonella typhi
  CDS (1)...(1230)
  misc_feature (1)...(1230): n = A,T,C or G
gtgcgctctcctgaaggggagagcgctatagtaaggaatatagccgtgtctaaagaaaaatttgaacgtacaaaaccgcacgttaacgtcggcaccatcggccacgttgaccacggtaaaactaccctgaccgctgcaatcaccaccgtactggctaaaacctacggcggtgctgctcgtgcattcgaccagatcgataacgctccggaagaaaaagcgcgtggtatcaccatcaacacttctcacgttgaatacgataccccgacccgccactacgcacacgtagactgcccggggcacgccgactatgtaaaaaacatgatcaccggtgctgcgcagatggatggcgcgatcctggttgttgctgcgactgacggcccgatgccgcagacccgtgagcacatcctgctgggtcgtcaggtaggcgttccgtacatcatcgtgttcctgaacaaatgcgacatggttgatgacgaagagctgctggaactggttgaaatggaagttcgtgaacttctgtctcagtacgacttcccgggcgacgacacgccgatcgttcgtggttctgctctgaaagcgctggaaggcgacgcagagtgggaagcgaaaatcatcgaactggctggcttcctggattcttacatcccggaaccagagcgtgcgattgacaagccgttcctgctgccgatcgaagacgtattctccatctccggtcgtggtaccgttgttaccggtcgtgtagaacgcggtatcatcaaagtgggcgaagaagttgaaatcgttggtatcaaagagactcagaagtctacctgtactggcgttgaaatgttccgcaaactgctggacgaaggccgtgctggtgagaacgtaggtgttctgctgcgtggtatcaaacgtgaagaaatcgaacgtggtcaggtactggctaagccgggcaccatcaagccacacaccaagttcgaatctgaagtgtacattctgtccaaagatgaangcggccgtcatactccgttcttcaaaggctaccgtccgcagttctacttccgtactactgacgtgactggcaccatcgaactgccggaaggcgtagagatggtaatgccgggcgacaacatcaaaatggttgttaccctgatccacccgatcgcaatggacgacggtctgcgtttcgcaatccgtgaaggcggccgtaccgttggcgcgggcgttgttgctaaagttctgggctaa

SEQ ID NO: 9867 - DNA, 2115 bp, Salmonella typhi
  CDS (1)...(2115)
  misc_feature (1)...(2115): n = A,T,C or G
atggctcgtacaacacccatcgcacgctaccgtaatatcggtatcagtgcgcacatcgacgccggtaaaaccactactaccgaacgtattctgttctacaccggtgtaaaccacaaaatcggtgaagtncatgacggcgcagctaccatggactggatggagcaggagcaggagcgtggtattactannacctccgcagcgactactgcattctggtctggtatggctaagcagtatgaaccgcatcgcatcaacatcatcgacaccccggggcacgttgacttcactatcgaagtagaacgttccatgcgtgttctcgatggtgcggtaatggtttactgcgcagttggtggtgttcagccgcagtctgaaaccgtatggcgtcaggcaaacaaatacaaagttccgcgcattgcgttcgttaacaaaatggaccgcatgggcgcgaacttcctgaaagttgttggtcagatcaaaacccgtctgggcgcgaacccggttccgctgcagctggcaattggtgctgaagaaggtttcaccggcgttgttgacctggtgaaaatgaaagccatcaactggaacgatgccgaccagggcgttaccttcgaatacgaagatatcccggctgacatgcaggacctggctaacgaatggcaccagaacctgatcgagtccgccgcagaagcttctgaagagctgatggaaaaatacctgggtggtgaagaactgactgaagaagagatcaaacaagctctgcgtcagcgcgttctgaacaacgaaatcatcctggtaacctgtggttctgcatttaagaacaaaggtgttcaggcgatgctggatgcggtaattgattacctgccatccccggtagacgtacctgcgatcaacggtattctggacgacggtaaagatactccggctgagcgtcacgcaagcgacgacgagccgttctctgcgctggcgttcaaaatcgctaccgacccgtttgtgggtaacctgaccttcttccgtgtgtactccggtgtggttaactctggtgataccgtactgaactccgtgaaaaccgcacgtgagcgtttcggtcgtatcgttcagatgcacgctaacaaacgtgaagagatcaaagaagttcgcgcgggcgacatcgcggctgctatcggcctgaaagacgtgactaccggtgacaccctgtgtgatccggaanacccgatcattctggaacgtatggaattacctgagccggtaatctccntcgcggtagaaccgaaaaccaaagctgaccannaaaaaatgggtctggctctgggccgtctggcgaaagaagacccgtcgttccgcgtatggactgatgaagaatctaaccagaccatcatcgctggtatgggtgaacttcacctagatatcatcgttgaccgtatgaagcgtgaattcaacgttgaagcgaacgtgggtaaacctcaggttgcttaccgcgaagcgattcgcgcgaaagttaccgacatcgaaggtaaacacgcgaaacagtctggtggtcgcggtcagtatggtcatgttgttatcgacatgtacccgctggagccgggctctaacccgaaaggttacgagttcatcaacgacatcaaaggtggtgtaattcctggcgagtacatcccggccgttgataaaggcatccaggagcagctgaaatctggcccgctggcgggttatccggtagttgatctcggtgtgcgtctgcacttcggttcttaccatgacgttgactcctctgagctggcgtttaaactggctgcgtctatcgcctttaaagaaggctttaagaaagcaaaaccagttctgcttgagccgatcatgaaggttgaagtagaaacacctgaagagaataccggtgacgttatcggcgaccttagccgccgtcgtngtatgctcaaaggtcaggaatctgaagttacaggcgttaagatccacgctgaagtaccnctgtntgaaatgttcggatatgcanctcagntgcgttctntgaccnaaggtcgcgcatcgtacactatgaaattcctgaagtatgatnatgcgccgancancgttgctcaggccgtaatcgaagcccgtggtaaataa

SEQ ID NO: 9868 - DNA, 471 bp, Salmonella typhi
  CDS (1)...(471)
atgccacgtcgtcgcgtcattggtcagcgtaaaattctgccggatccgaagttcggatcagaactgctggctaaatttgtcaatatcctgatggtagatggtaaaaaatctactgcagaatcaatcgtatacagcgcgctggagaccctggctcagcgttctggtaaatctgaactggaagctttcgaagtcgctctcgaaaacgttcgcccgactgtagaagttaaatcccgccgtgtaggtggttctacttatcaggtaccagttgaagtccgtccggtccgtcgtaatgctctggcaatgcgttggatcgtagaagctgctcgtaaacgcggtgataaatccatggctctgcgcctggcgaacgaactttctgacgctgcagacaacaaaggtactgcagttaagaaacgtgaagacgttcaccgtatggcagaagccaacaaggcgttcgcacactaccgttggtaa

SEQ ID NO: 9869 - DNA, 375 bp, Salmonella typhi
  CDS (1)...(375)
atggcaacagttaaccagctggtacgcaaaccacgtgctcgcaaagttgcgaaaagcaacgtgcctgcgctggaagcatgcccgcaaaaacgtggcgtatgtactcgtgtatatactaccactcctaaaaaaccgaactccgcactgcgtaaagtttgccgtgttcgtctgactaacggttttgaagtgacttcctacatcggtggtgaaggtcacaacctgcaggagcactccgtgatcctgatccgtggcggtcgtgttaaagacctcccgggtgttcgttaccacaccgttcgtggcgcgcttgactgctccggcgttaaagaccgtaagcaagctcgttctaagtacggcgtgaagcgtcctaaggcttaa

SEQ ID NO: 9870 - DNA, 411 bp, Salmonella typhi
  CDS (1)...(411)
atgttacaaccaaagcgtacaaaattccgtaaaatgcacaaaggccgcaaccgtggtctggctgcaggcgcggatgttagcttcggcagcttcggcctgaaagctgttggccgtggtcgtctgactgcccgtcagatcgaagcagcacgtcgtgctatgacccgtgcagttaagcgtcaaggtaagatctggatccgtgtattcccggacaaaccgatcactgaaaagccgctggcagtgcgtatgggtaaaggtaaaggtaacgtggagtattgggttgccttgattcagccgggtaaagtcctgtatgaaatggacggcgtaccggaagagctggcccgtgaagcattcaagctggcagcagcgaaactgccgattaaaaccacctttgtaactaagacggtgatgtaa

SEQ ID NO: 9871 - DNA, 702 bp, Salmonella typhi
  CDS (1)...(702)
atgggtcagaaagtacatcctaatggtattcgcctgggtattgtaaaaccatggaactctacctggtttgcgaacaccaaagaattcgctgacaacctggacagcgattttaaagtacgtcagtacctgacgaaggaactggctaaagcgtctgtatctcgtatcgttatcgagcgtccggctaagagcatccgtgtgactattcacaccgctcgcccgggtatcgttatcggtaaaaaaggtgaagacgtagaaaaactgcgtaaggtcgtagcggatatcgctggcgttcctgcacagatcaacatcgccgaagttcgtaaacctgaactggacgctaaactggttgctgacagcatcacttctcagctggaacgtcgcgttatgttccgtcgtgcgatgaagcgtgctgtacagaacgccatgcgtctgggcgctaaaggtatcaaagttgaagttagcggccgtctgggcggcgcggaaatcgcacgtaccgaatggtaccgcgaaggtcgcgtaccgctgcacactctgcgtgctgacatcgactacaacacctctgaagcgcacaccacttatggtgtaatcggcgttaaagtgtggatcttcaaaggcgagatcctgggtggtatggctgctgttgaacaaccggaaaaaccggctgctcaaccgaaaaagcagcagcgtaaaggccgtaaataa

SEQ ID NO: 9872 - DNA, 333 bp, Salmonella typhi
  CDS (1)...(333)
atggaaactatcgctaaacatcgccatgctcgttcttctgctcagaaggttcgccttgttgctgacctgattcgcggtaagaaagtgtcgcaggctctggatattctgacctacaccaacaagaaagcggctgtactggtcaagaaagttctggaatctgccattgctaacgctgaacacaacgatggcgctgacattgacgatctgaaagttacgaaaattttcgtagacgaaggcccgagcatgaagcgcattatgccgcgtgcaaaaggtcgtgcagatcgcatcctgaagcgcaccagccacatcactgtggttgtgtccgatcgctga

SEQ ID NO: 9873 - DNA, 822 bp, Salmonella typhi
  CDS (1)...(822)
  misc_feature (1)...(822): n = A,T,C or G
atggcagttgttaaatgtaaaccgacatctccgggtcgtcgccacgtcgttaaagtggtcaacccagagctgcacaagggcaaaccttttgctccgctggttgaaaaaaacagcaaatccggtggtcgtaacaacaatggccgtatcaccactcgtcatatcggtggtggtcacaaacaggcttatcgtattgttgacttcaaacgcaacaaagacggtatcccggcagttgttgaacgtcttgagtacgatccgaaccgttccgcgaacatcgcgctggttctgtacaaagacggcgaacgccgttacatcctggccccgaaaggcctgaaagctggcgaccagattcagtctggcgttgatgctgcaatcaaagcaggcaacaccctgccgatgcgcaatatcccggttggttctaccgttcataacgtagaaatgaaaccaggtaaaggcggtcagctggcgcgttccgctggtacttacgttcagatcgttgctcgcgatggcgcttatgtcaccctgcgtctgcgttctggtgaaatgcgtaaagtcgaagcagactgccgtgcaaccctgggcgaagttggcaatgctgagcatatgctgcgcgttctgggtaaagcaggtgctgcacgctggcgtggcgttcgtcctaccgttcgcggtactgcgatgaacccagtagaccacccacatggtggtggtgaaggtcgtaactttggtaagcacccggtaactccgtggggcgttcagaccaaaggtaagaagacccgcagcaacaagcgtactgataaattcatcgtacgtcgccgtagcanataa

SEQ ID NO: 9874 - DNA, 303 bp, Salmonella typhi
  CDS (1)...(303)
atgattcgtgaagaacgtctgctgaaggtgctgcgcgcaccgcacgtttctgaaaaagcgtctactgcgatggaaaaaaccaacaccatcgttctcaaagttgctaaagacgcgaccaaagcagaaatcaaagctgctgtgcagaaactgtttgaagtcgaagtcgaagtcgttaacaccctggtcgttaaagggaaagttaaacgtcacggacagcgtatcggtcgtcgtagcgactggaaaaaagcttacgtcaccctgaaagaaggccagaatctggacttcgtcggcggcgctgagtaa

SEQ ID NO: 9875 - DNA, 606 bp, Salmonella typhi
  CDS (1)...(606)
atggaattagtattgaaagacgcgcagagcgcgctgactgtttccgaaactaccttcggtcgtgatttcaacgaagcgctggttcaccaggttgttgttgcttatgcagctggtgctcgtcagggtactcgtgctcagaagactcgtgctgaagtaactggttccggtaaaaaaccgtggcgccagaaaggcactggccgtgcgcgttcaggttctatcaagagcccgatctggcgttccggtggcgtgaccttcgctgctcgtccgcaggaccacagtcaaaaagttaacaagaagatgtaccgcggcgcgctgaaaagcatcctgtccgaactggtacgtcaggatcgtctgatcgttgtcgagaagttctctgtagaagcgccgaaaactaagctgctggcacagaaactgaaagacatggctctggaagatgtgctgatcatcaccggtgagctggacgagaacctgttcctggccgcacgtaacctgcacaaggttgacgtacgcgatgcgactggtatcgacccggttagcctgatcgccttcgacaaagtcgtaatgactgctgatgctgttaagcaagttgaggagatgctggcatga

SEQ ID NO: 9876 - DNA, 630 bp, Salmonella typhi
  CDS (1)...(630)
atgattggtttagtcggtaaaaaagtgggtatgacccgcatcttcactgaagatggcgtctctatcccagtaaccgtaatcgaagttgaagcaaaccgtgttactcaggttaaagacctggctaacgatggctaccgcgctgttcaggttactacgggtgctaaaaaagctaaccgtgtcaccaagccggaagcgggtcactttgctaaagctggcgtagaagctggccgtggtctgtgggaattccgtctggctgaaggcgaagaatacaccgtaggtcagagcatcagcgttgaactgtttgctgacgttaaaaaagttgacgtaaccggtacctctaaaggtaaaggtttcgctggtaccgttaagcgctggaacttccgtacccaggacgctactcacggtaactccttgtctcaccgcgttccgggttctatcggtcagaaccagactccgggcaaagtgttcaaaggcaagaaaatggcaggtcagatgggtaatgagcgcgtaaccgttcagagccttgacgtagtacgcgttgacgctgagcgcaacctgctgctggttaagggtggtgttccgggtgcaaccggttgcgacctgatcgttaaaccagctgtgaaggcgtaa

SEQ ID NO: 9877 - DNA, 312 bp, Salmonella typhi
  CDS (1)...(312)
  misc_feature (1)...(312): n = A,T,C or G
atgcagaaccaaagaatccgtatccgcctgaaagcgtttgatcatcgtctgatcgatcaatcaaccgcggaaatngtcgagactgccaagcgcactggtgcgcaggttcgcggtccgatcccgctgccgacccgcaaagagcgctttaccgttctgatctctccgcacgttaacaaagatgcgcgcgatcagtacgaaattcgcactcacaagcgtctggttgacatcgttgagccaaccgagaaaaccgttgatgctctgatgcgtctggacctagctgccggtgtagacgtgcagatcagcctgggttaa

SEQ ID NO: 9878 - DNA, 933 bp, Salmonella typhi
  CDS (1)...(933)
atggtacgtatctatacgttgacgcttgcgccctctctcgatagcgcaacaatcacgccgcaaatttatcccgaaggtaaactgcggtgctccgcgccggtattcgaacccggcggcgggggtattaatgtcgctcgcgccattgcgcatcttggcggcaccgcgaccgcaattttcccggctggcggcgctaccggcgaacatctggtcgcactactggctgacgaaaatgtccccgtgtctaccgtcgatgcgaaggactggacgcgtcagaacctgcacgtccacgtcgagtccagcggcgaacaatatcgttttgttatgcccggcgccacgctggacgatgacgaatttcgccagcttgaagaacaggtactggaaattgaatccggggcaattctggttatcagcggcagccttccgcccggcgttaaggtcgagaaactcacgcaactgatttccgccgcgcagaagcaaggcattcgctgcattattgatagctctggcgacgcgctcaccgctgcgttggcgcttggcgatatcgaactggtgaaacctaacctgaaagaattgagcgcgttagtcaatcgcgatctgacgcagcctgatgatgtgcgtaaagcggcccaggaattagtgcaaagtggcaaggctcgccgggtagtggtctctctggggccgcaaggggcgctgggcatagacagtgagaattgcatccaggttgttcctcccccggtgaaaagtcaaagtactgtcggcgcaggcgacagtatggtgggcgcgatgacgttaaaactggcgcaagacgcgtcgctggaagagatggtgcgcttcggtgtggcggcaggcagcgccgctacgctcaatcaaggtacgcgtctgtgttctcatgacgatacccaaaaaatatacgcctatctttccgcgcaataa

SEQ ID NO: 9879 - DNA, 1092 bp, Salmonella typhi
  CDS (1)...(1092)
atgggattcaaatgcggtatcgtcggtctgcccaacgtcgggaaatccaccctgttcaacgcgctgacaaaagccggtattgaagcggcaaactttccgttctgcactatcgaaccgaataccggtgtcgtgccgatgcccgatccgcgtctggaccagttggctgagattgttaaaccgcaacgcattctaccaaccacgatggagttcgtggatatcgccggtctggtaaaaggcgcatccaaaggcgaagggttgggtaaccagttcctgaccaatatccgtgaaaccgaagctatcggtcacgtggttcgctgctttgagaacgacaatatcatccacgtggcgggtaaagtaaatccggcagaagatattgatgttatcaataccgagctggcgctggctgacctcgatacctgcgagcgcgcgatccatcgcgtacagaagaaagccaaaggcggcgataaagacgccaaagcggaactggccgcgctggaaaaatgcctgccgcacctggccgaagcggggatgctgcgttcgctggacctgacggacgaagataaagcggctatccgttatttaagcttcctgacgctgaagccgacaatgtatatcgctaacgtcaatgaagacggttttgaaaataacccgtatctggaccaggttcgcgaaatcgccgcgaaagaaggttcggtcgtggttccggtgtgtgccgccgtcgaagctgatattgctgagctggatgatgacgagcgtgacgaatttatggctgaactgggtctggaagaaccggggctgaaccgcgttattcgcgctggttatcgcctgctgaacctccagacctacttcaccgccggggtgaaagaagttcgcgcatggaccattccggttggcgcaaccgcgccgcaagcagcaggtaaaatccataccgacttcgaaaaaggctttatccgcgctcaaactatcgcctttgacgactttattacctataaaggtgaacaaggcgcgaaagaagccggtaagatgcgagcggaaggcaaagattatatcgttaaagatggcgatataatgaacttcctgttcaacgtctaa

SEQ ID NO: 9880 - DNA, 966 bp, Salmonella typhi
  CDS (1)...(966)
atgcctgaggttcttctcgtgcctgatatgaagctttttgctggtaacgccaccccggaactagcacaacgtattgccaaccgcctgtacacttctctcggcgacgccgccgtaggtcgctttagcgacggcgaagtcagcgtacaaatcaacgaaaatgtacgcggtggtgatattttcatcatccagtccacttgtgccccaaccaacgacaacctgatggaattggtcgttatggttgatgccctgcgtcgtgcttccgcaggtcgtatcaccgccgttatcccctactttggctatgcacgtcaggaccgtcgcgtacgttccgcccgtgtgccgattaccgcaaaagttgtcgctgacttcctgtccagcgtcggcgttgaccgcgttctcaccgtagatctgcatgctgaacagatccagggcttctttgacgttccggttgataacgtgttcggtagcccaatcctgctcgaagatatgctgcaactgaatctggataacccaatcgtggtttccccggatattggcggcgtggttcgtgcccgcgctatcgctaagctgctgaacgataccgatatggctatcattgataaacgtcgtccgcgcgcgaacgtttctcaggtgatgcacatcatcggcgacgtcgctggccgtgactgcgtgctggttgatgatatgatcgataccggcggtactctgtgcaaagcagcagaagcattgaaagaacgtggcgctaaacgcgtgtttgcctacgcgacgcacccgatcttctcaggcaatgcggcaaacaacctgcgcaactccgttattgacgaagtcgttgtctgtgacaccattccgctgaccgacgaaatcaaagcgctgccgaacgtgcgtactttgaccctgtcaggtatgctggccgaagcgattcgccgtatcagcaacgaagaatcgatttccgccatgttcgagcattga

SEQ ID NO: 9881 - DNA, 1083 bp, Salmonella typhi
  CDS (1)...(1083)
atgaagccttctatcgttgccaaactggaagccctgcacgaacgccatgaggaagttcaggcgttgctgggcgatgcgggaattatcgccgaccaggaccgctttcgcgcattgtcgcgcgaatatgcgcaattaagcgacgtttctcgctgttttacggactggcaacaggttcaggacgatatcgagacggctcagatgatgctcgacgatcctgaaatgcgggaaatggcgcaggaagaactgcgcgaagcgaaagaaaaaagcgaacaactggagcaacagttacaggtactgctgctgccgaaagatccggacgatgaacgaaacgcgttccttgaggttcgcgccggcactggcggcgacgaagccgcgctgtttgccggcgatctgttccgcatgtacagccgttatgccgaagcgcgccgctggcgcgtggagatcatgagcatgagcgaaggcgagcatggcggttataaagagatcatcgccaaaatcagcggcgacggcgtgtatggccgactgaaatttgagtccggcggacaccgcgtacagcgtgttccggcgaccgagtcgcaggggcgtatccatacctccgcctgtaccgtcgccgtgatgccggagctgccggaagccgagctgccggatattaacccggcggatctgcgcattgatacgtttcgttcttccggcgcgggcggtcagcacgttaacaccaccgactccgctatccgtattacccacttgccgaccggcatcgtggtggaatgccaggacgagcgttcgcagcataaaaacaaagcgaaagcgctctcggtgctcggggcgcgcattcacgccgccgaaacggcaaaacgccagcaggccgaggcgtcaacgcgccgcaacctgcttggcagcggcgatcgcagcgatcgtaaccggacctataatttcccgcaggggcgcgtgaccgatcatcgtattaatctgacgttatatcgccttgatgaaacgatggaaggtaagctggatatgctgattgagccgattgttcaggaacaccaggctgacctgttagccgcgttgtccgagcaggaataa

SEQ ID NO: 9882 - DNA, 795 bp, Salmonella typhi
  CDS (1)...(795)
  misc_feature (1)...(795): n = A,T,C or G
atgattggcctgagactggacggttacgatcccgaccttcaccacgatgccgctgtggccttttgtattcgcgccagggatgatgaactgtttagccctcgccatcagcatcgcaagggacagttgatcctcgctctgcacggcgcgatcacctgtgaggtggaaaatgcgatgtggatggttccgccccagtatgccgtctggctccccggctcgctgccgcacagtaatcatgtgaccgcaggggcggagctgtgctttttatttattgaacctgcggcggtcgtcatgccggagcgttgctgcacgctgaaaatttcgccgttatgccgggagttgattttgtcgctggcgcgcagaaccgattccgaaagagcgcaaatgccaacgcagcgccttattcaggtgttgtttgatgaactgccgcagcagccgcaggaacaattgcaattaccagtatcggggcatccgaanattcgccanatggttgagacaatggcgcangagcacgcgcgatggaatacgttanggcagtgggccagcgtattcgcgatgagcgagcgtaaccttgcccggctggtcgtcaaagagacgggactcagctttcgtcgctggcgtcatcaattacaattaattctggcgctacaagcgctgatcgcgggacgtaatgtacaacagacggcgcaaatgctgggttatgattctaccacggcattcattacgatgtttaaaaaaggcctggggcagaccccaggccagtatctgacgggcgagttactgctttcccacaattaa

SEQ ID NO: 9883 - DNA, 1005 bp, Salmonella typhi
  CDS (1)...(1005)
gtggaatatatgactatcaaagtaggtatcaacggttttggccgtatcggtcgcattgttttccgtgctgctcagaaacgttctgacatcgagatcgttgcaatcaacgacctgttagacgcagagtacatggcatacatgctgaaatatgactccactcacggccgtttcgacggtactgttgaagtgaaagacggtcatctgatcgttaacggtaaaaaaatccgtgttaccgctgaacgcgatccggctaacctgaaatgggacgaagttggtgttgacgtagtggctgaagctaccggtatcttcctgactgacgaaaccgcgcgtaaacacatcaccgctggcgcgaaaaaagtggttctgacgggtccgtctaaagacaacaccccaatgtttgttaaaggcgctaactttgacaaatacgaaggccaggacatcgtttccaacgcttcctgcaccacaaactgcctggcgccgctggctaaagttatcaacgacaacttcggcatcatcgaaggtctgatgactactgttcacgcgactaccgcaacccagaaaaccgttgacggcccgtctcacaaagactggcgcggcggccgcggcgcatctcagaacatcatcccgtcctctactggcgctgctaaagcggtaggtaaagtactgccggaactgaatggcaaactgactggtatggcgttccgcgttccgactccgaacgtatccgttgttgacctgaccgttcgtctggaaaaagcggctacctacgagcagatcaaagctgctgttaaagctgctgccgaaggcgaaatgaaaggcgttctgggttacaccgaagacgacgttgtatctaccgatttcaacggcgaagtatgcacttccgtgttcgatgctaaagcaggcatcgcgctgaacgacaacttcgtgaaactggtctcctggtacgataacgaaaccggttactccaacaaagtactggacctgattgctcacatctccaaataa

SEQ ID NO: 9884 - DNA, 828 bp, Salmonella typhi
  CDS (1)...(828)
atgactctgcagcaagagataatccaggcgcttggcgcgaaaccgcatatcaaccctgaagaagaaattcgccgcagcgtggattttcttaaagcgtacctgaaaacctatccctttttgaaatcgctggtgttaggcatcagcggcgggcaggattcgacgctggccgggaaactcagccagatggctatcaccgaattgcgggaagagaccggtgataatgcgctgcagtttatcgccgttcgtctgccttatggcgtgcaggccgatgaacaggattgccaggacgccattgcttttattcagccggacagagtactcaccgtcaatattaaaggcgccgtcctcgccagcgaacaggcgctgcgcgaagcgggaattgagctgagcgattttgttcgcggcaatgaaaaagcgcgtgagcgaatgaaagcgcaatatagcatcgccggtatgactcacggcgtcgtggtgggcaccgaccatgcggcggaagcgataaccgggttcttcaccaaatatggcgatggcggtaccgatattaacccgcttcatcgccttaacaaacgccagggcaaacagcttctcgcagcgctgggctgtcctgagcatctgtataaaaaagtccccaccgccgatttggaagacgaccgcccttcactgcctgatgaagccgcgctgggcgtaacgtatgacaatattgacgattacctggaaggcaaaacgctggactccgccatcgctaaaactatcgaaggctggtacgtaaaaactgaacataagcgccgtttaccgattacggtattcgacgacttttggaaaaagtaa

SEQ ID NO: 9885 - DNA, 1359 bp, Salmonella typhi
  CDS (1)...(1359)
atgagtaacgttattgcttcacttgaaaaggtactccttccttttgctgtaaaaataggaaagcagccacacgttaatgcaatcaagaacggctttattcgtttaatgccattaacccttgcgggggcgatgtttgtattaattaataacgttttcctgagctttggggagggggcgtttttttattccatgggcattcggcttgatgcctcaaccattgaaacacttaatggattgaaaggcatcggcgggaacgtctataacggcacattgggcattatgtcgctcatggcgccattttttatcggcatggcgctggcggaagagcgcaaggttgatgcgctggccgccggactgctctccgtggcggcatttatgaccgtaacgccgtatagtgtcggcgaggcctatgccgtaggcgctaactggctgggcggcgcgaatattatctccggtattattattggcctggtggtcgcggagatgtttacatttattgtccggcgcaactgggtgattaaactaccggacagcgtaccggcttcggtgtctcgttcattctcagcattaattcccggctttattattctctctattatggggattattgcctgggcgctgtctaattacggttctaacttccatcagattattatggacactatctctacgccgctggcatcgctgggtagcgtggtagggtgggcatatgtcatttttgtaccgctgctgtggttctttggtattcatggttcgctggcgctgaccgcgctggacagcggcatcatgacgccctgggcgctggaaaacatctctatttaccagcagtatggctccgtcgatgcggcgctggaagccggtaaaacgttccatatctgggcgaaaccgatgctggattcttatatcttcctcggtggtagcggcgcaacgctgggtctgatcatcgctatcttcctggcatcccgtcgcgcggactatcgccaggtggcaaaactggcgctgccgtcaggtatcttccagattaacgaacccatcctgtttggcctgccgattattatgaacccggtgatgtttatccccttcattctggttcagccgattctggcggcgattacgctggtggcttactatttgggtattattccgccgattaccaatattgcgccgtggaccatgccaaccgggctgggggcgttctttaacaccaacggcagtgtcgccgcgttgctggttgcgctatttaacctggcggtcgctaccctgatttatctccccttcgtggtggtggctaacaaagcgcagaacgccatcgagcaggaagaaagcgaagaagatatcgctaacgcactgaaattctaa

SEQ ID NO: 9886 - DNA, 348 bp, Salmonella typhi
  CDS (1)...(348)
  misc_feature (1)...(348): n = A,T,C or G
atgtttgatcttgaanatgttgtagataaccagacagcggctgaggnactcgaagaagtcgttatggggcttatcatcaattctggtcaggcgcgcagcctggcatatggcgcgctcagaaaagcgaaagaaggcgactttgaggcggcgaaagcgatgatggaccagtcgcgcatagcgctcaatgaagcgcatcttgtgcagacaaaactcatcgaaggcgatcagggcgaaggcaaaatgaaagtcagtctggtcctggttcacgctcaggatcatttgatggcctcaatgctggctcgtgaactgatcgctgagttgattgagctccatgagaaactgaaataa

SEQ ID NO: 9887 - DNA, 2253 bp, Salmonella typhi
  CDS (1)...(2253)
atgtcgcataatgaaaaatccccccatcagtcccccgtgcatgatacccgtgaatcacagcccggcctggactccctggcaccgtcagacggttcacatcgccccacgccagaaccgacgccgccgggcgcgcaaccaacggcccccggcagcttaaaagcgcccgagaccgcgaatgataagctcaccgccctcgacgcctttcgtaaaggcagcgaaaattatgcgctgaccaccaatcagggcgtgcgcatcgccgacgatcaaaattctcttcgcgccggcagccgtggccctacgctgttggaagattttatcctgcgcgagaaaattacccactttgaccatgagcgtatcccggagaggatcgttcacgcccgcggatctgcagcgcacggctatttccagccatataaagacctgagcgacatcacgaaagccgcgtttctgtgcgatccacagaaaattaccccggtctttgttcgcttttcgacagtacagggcggcgcggggtctgctgataccgtacgtgatatccgcggttttgcgaccaaattttataccgaagagggaattttcgatctcgtcggtaataacacgccgatcttttttatccaggatgcgcataagtttccggattttgtgcacgccgttaagcccgaaccacattgggctattccgcaagggcagagcgcgcacgacaccttctgggactatgtttccttacagcctgagacgctgcacaacgtcatgtgggcaatatcggatcgcggtattccacggagttatcggacgatggaagggttcggcattcacaccttccgtctgatcaatgcacaagggaaagcgacctttgtccgtttccactggaaaccgttggcaggtaaagcctcgctggtatgggatgagtcacaaaaactgaccggtcgcgatccggattttcaccgccgggatctgtgggaggccatcgaagcgggcgatttcccggaatacgagctgggcctacaactcattgccgaagaggatgaatttaaattcgattttgatctgctcgatccgaccaaactgattccggaagagttggtgccagtacaacgcgtcggcaaaatggtgttaaaccgtaatccggataactttttcgctgaaaacgaacaggcggcatttcatccaggacatattgttcccggcattgattttaccaacgatccgctgttacaggggcgtctgttctcttataccgacacgcaaatcagtcgtctgggcgggccaaacttccacgaaattccgattaaccgccctacctgcccctaccataacttccagcgtgacggtatgcaccggatggatatcgacaccaatccggcgaactatgaaccaaactccattaatgacaactggccacgcgaaacgccgccagcgccaaaacgcggcggcttcgaatcataccaggaacgcgtggatggtaatgaaatccgcgaacgcagcccctctttcggtgaatattactcgcatcctcgcctgttctggctcagtcagacgccgatagaacagcagcatattattgacgcgttcagctttgagctgggtaaagtcgcccgcgcgtatattcgggagcgggtggtcgatcagttagcgcatattgatgtcacgctggctcagggcgtcgcgcataatctcggttttgcactcacccatgagcaaacgcaaattgccccgcctcctgatgtcaacggtctgaaaaaagatccggcgctcagcctgtatgcggtgccggacggcgatgttaaaggccgagtggtcgctattctgctgaacgacaaggttaacgccgccgaactgttgaccatttttcaggctttaaaagccaaaggcgtccacgtaaaactgctctattcacggatgggggaagtaacggctgatgacggttcaacattaactattgcggcaacctttgccggcgcgccgtcgctaacggtcgatgcggtaatagtaccgtgcggcaatattgccgatatcgagagttgcggcgatgcccgttactaccttctggaagcctacaaacatctgaagcccatcgcactggcaggcgacgcccgacggtttaaggcgcttttaaacattgatagccagggggaagaaggacttgttgaggcagataacgttgaccaccactttatggacactctgctgacgctgatggcggcacaccgtgtctggtcgcgtgcggggaaaattaacgcgattcctgcataa

SEQ ID NO: 9888 - DNA, 552 bp, Salmonella typhi
  CDS (1)...(552)
atgacaaagcagcccgaagactggctcgacgacgttcccggtgatgacatcgaagacgaagacgatgaaattatctgggtcagtaaaagtgaaattaaacgcgatgccgaggaattaaaacgcctgggcgcggaactggtggatctggggaaaaacgcgctggataagatcccgctggacgccgatctgcgcgacgccattgaactggcccagcgaatcaaaatggaaggacgccgccgccagttgcagcttatcggaaaaatgctgcgccaacgcgacgttgaacctattcgccaggcgctggacaagctgaagaaccgccataatcagcaggtggtgctgtttcacaagcttgagcatctgcgcgatcgtctgatcgtcgaaggcgatgacgcggtagccgaagtactgaccctgtggccgcacgccgatcgtcaacagcttcgttcattgatccgcaatgcgaagaaagagaaagaaggcaacaaaccgccgaaatcagcgcgtcagatcttccagtatctgcgcgagctggcggaaaacgaagggtaa

SEQ ID NO: 9889 - DNA, 1653 bp, Salmonella typhi
  CDS (1)...(1653)
  misc_feature (1)...(1653): n = A,T,C or G
atgactattcccctctggtggcaaaacggcgttatttatcagatctacccgaaaagttttcaggacacgaccggcagcggcaccggcgatttacgcggcgtcacgcagcgccttgactatctacagcgactcggcgtggacgccatctggctcacgccgttttatatctcgccacaggtggataacggttatgacgtcgcaaattatacggctatcgacccgacctacggcacgctggatgattttgacgagctggtcgcgcangcganagcacgcggcattcgcatcatcctggatatggtgtttaaccatacttctacccagcacgcctggtttcgcgaagcgctgaacaaagagagcccataccgtcagttttacatctggcgcgacggcacgccggatgtctgcccgaataactggcaatccaaatttggcggcagcgcctggcgctggcatagccagagcgaacaatattatttacaccttttcgcgcctgaacaggccgacctgaactgggataaccccgccgtgcgcgccgagctgaggaatgtctgcgaattctgggccgatcgcggcgtggatggcntgcgtctggacgtgntgnacntgatcgccatagatcaggatnatcctgacgatccganggncgacggacgccgcttnnataccgacngaccgcgcacgcatacgtttgtacgcgaaatgaaccgtgacgtttttacgccgcgtaatctgatgacggtaggcgaaatgtcctctaccacgctggaaaactgccagcaatatgccgcgcttagcggcgacgaactctcgatgaccttcaattttcatcatctgaaggtggattaccccaatggcgaaaagtggacgctggcaaaacctgattatgtggcgctgaaagcgttgttccgccaatggcaacaggggatgcataacgtcgcctggaacgcgttattctggtgtaatcacgatcagccgcgcatcgtttcccgctttggcgacgagggtgaataccgggttccagccgcgaaaatgctggcgatggcgctgcacggtatgcaagggacgccttatatctatcagggcgaagaaatcggcatgaccaacccacactttacccgcatcaccgattatcgcgacgtggaaagccataacatgtttgccgcgctacgcgccgccggacgcgaccccgacgaactactggctatcctggccagtaaatcccgcgacaacagccgcacgccgatgcagtgggacaacggtaaaaacgccggtttcacccagggcgagccgtggataagcctgtgcgataactatacggaggttaatgtcgcggcggcattacgcgatgaanactcggtgttttacacctatcaaaagctgattgcgctacgtaaaacccagcctgtaatgatctggggcgattatcaggatctcctcccgggtagcccatcagtatggtgttatcgtcgccagtggcaggggcaaaccctgctggttgtcgccaatctgagcgaccagtgtcaggagtggcatccaccgcatatcacaggacantggcangcgctactgcntaattatggcgangtcnccagccagccagccgcnatgacnctccgcccatttnaanccatctggtggtnncaacgctaa

SEQ ID NO: 9890 - DNA, 663 bp, Salmonella typhi
  CDS (1)...(663)
atggcttatcgcgatcaacctttaggcgaactggcgctctctattccccgcgcatcggcgctgtttcgccagtacgatatggattactgctgcggcggaaaacagacgctggcgcgcgccgccgctcgtcacgacgtcgatattgacattattgaagcgcaactcgcgcagttggctgaacagcccatcgaaaaagactggcgcgccgttccgctggcggacattattgaccatatcgttgtgcgctatcatgaccgacaccgcgaacaactgccggagcttatcctgcaggcaaccaaagtggaacgcgttcacgcggataagccaaacgtcccacgcggcctgacaaaatatctcaccgcgctgcatgaagagctttccagccatatgatgaaagaagaacagatcctgttccccatgatcaaacagggtatgggtcgccaggcaacgggcccgataagcgtaatggaaagcgagcatgacgaggcgggagagctggtagacgtcatcaaacacgtcacccaaaatgtaacgccgccgccagaagcctgcaccacctggaaagcgatgtataacggcattaatgagatgattgatgctctgatggagcacatcagcctggagaataacgtgctgttcccacgcgcgctggccggggaataa

SEQ ID NO: 9891 - DNA, 1359 bp, Salmonella typhi
  CDS (1)...(1359)
  misc_feature (1)...(1359): n = A,T,C or G
atgcctgaaagcaagtatcgtcagcagactatccgcgcgccccgaggcacggtattaacggcgaaaagctggctgacagaagccccgctgcggatgttaatgaataatctcgatcctgacgtggcggaaaatccgcatgagctggtggtctacggcgggattggtcgcgccgcgcgcaactgggaatgctatgacgctattgttgatgcgctcacccggctggaggcggacgaaacgttgctgattcagtctggcaaaccggtcggcgtatttaaaacgcacgacaacgcgccgcgggtattaatcgccaactccaacctggttccccactgggcgacatgggaacactttaacgaactggatgcgaaagggctggcgatgtacggtcaaatgacggccggaagctggatctatatcggtagtcagggaatcgtgcagggaacatacgaaacctttgtcgaggcggggcgtcagcactataacggcacgctggcgggacgctgggcgctgaccgccgggctgggcggcatgggcggcgcgcaaccgctagccgcgacgctggccggagcgtgttcgctgacgattgaatgccagcaaagccgtatcgattttcgtctgcgtactcgctacgtggatgagcaggccgccacgctggatgacgcgctggcccgcattacgcgctacacccgcgaggggaaagccgtgtccgtcgccctgtgcgcgaacgcggcggatatcctgccggaactggttaatcgcggcgtgcgcccggacctggtgaccgatcagaccagcgcccacgatccgctacatggctatttgccctccggctggtgctgggaggagtatcagaaaaacgcgcaatccgatccccgggggacgatgcaggcagcgaaacgttccatggcggcgcatgttcgggcgatgctggcgttcagtaaaatgggcgtgccgacctttgactatggcaacaatattcgccagatggcgaaagagatgggggtggaaaacgcctttgattttccgggatttgtgccagcctatattcgtccgctgttctgtcgtggcatcgggccgtttcgctgggtggcgctgtccggcgatccgcaggatatctataaaaccgatgccaaagtcaaagagatagtggctgaggatanacatctgcatcactggctggatatggcgcgtgagcgcattcattttcaggggctaccggcgcgtatctgctgggtaggcttggagtggcggcaaaaactggggctggcgttcnancgaaatggtgcgttgcggcgaggtatccgcgcccattgtgattggccgcgatcacctggattccggttctgtcgccagccctaa

SEQ ID NO: 9892 - DNA, 1521 bp, Salmonella typhi
  CDS (1)...(1521)
atgaacaccatgacactcactccggggcagttaagcctctctcaactgtacgatgtctggcgtcatccggtacagcttcggctggacgccagcgccattgacggcattaacgccagtgttgcgtgcgtcaatgatattgttgccgaagggcgtaccgcctacggcatcaacaccggtttcggcctgctggcgcagacgcgcatcgctgatgaagacttgcaaaatctacagcgatcgttggtgctgtctcacgccgcgggcgtaggcgacccactggatgacgcgatggtgcgtctgatcatggtattgaaaatcaatagcctggcgcgcgggttttccgggattcggttgagcgtgatagaggcgctcatcgctctggtgaatgccggcgtgtatccgctgattccggcaaaagggtcggttggcgcgtcgggcgacttagcgcctctggcgcatctgtcgctgacgctacttggcgaaggaaaagcgcgctggcagggcgaatggcttccggcgcaggcggcgctaaaaaaggccggactggaacctgtcgcgctggcggccaaagaggggctggcgctgcttaacggcacccaggcgtcgacggccttcgcgctgcgcggtttgtttgaggcacaggaattatttgcctccgccgtcgtctgcggcgcgctgactaccgaagccgtactgggatcgtgccgtccttttgatgcgcgcattcatgccgcgcgcggacaacaggggcaaattgacgtcgcgcggttgttccggcatctgctgaccgataccagcgccattgctgaatcacatcaccactgtcataaagttcaggacccgtattccctccgctgccagccgcaggtaatgggcgcttgtctgacccagttacgtcagacgaaagaggtactgctggctgaggccaatgcggtgtccgataatccgctggtctttgccgaggcgggggaggtgatctccggcggtaacttccatgctgaaccggttgccatggcggcggataatctggcgctggcgatagcggaaatcggcgcgctatcggagcggcgcatcacgctgatgatggataaacatatgtcgcagttaccgccgttcctggtgaaaaatggcggcgttaattccggttttatgattgcccaggtcaccgccgcggcgcttgccagcgagaataaagcgctggcgcacccgcacagcgtggatagcctgccgacctcggcgaatcaggaagatcatgtctcaatggccccggcggcgggacggcgactctgggaaatggcggcgaatacccgcggcgtcattgccgtggagtggctggctgcctgtcaggggatagatttacgggaagggttaacctccagcccgttactggaacaggcgcggcagacactgcgcgagcgggtggcgcactatacgcaggatcgttttttcgcgcccgatattgagtgtgcgacgacgctgctggcgcaaggcgcgttacagcgtctggtgccggactttatgtga

SEQ ID NO: 9893 - DNA, 1434 bp, Salmonella typhi
  CDS (1)...(1434)
gtggtttttcaaataattcggttacttgcgacagtgtccagcgtgggtggcgagccatcgggcctctccaaaatatgttgtttgtttttgatatggtgtagactcgtaaacctaaatctttttaatttggtttacaagtcgattatgacaacggacgatctggccttcgataaacgccatatttggcatccttacacttccatgacctcgccgctgccggtatatcccgttgagcgggccgaaggctgcgagctggttctcgcctcgggcgaacgcctgattgaggggatgtcctcctggtgggcggccattcatggttataaccacccgcaattgaacgcggcgatgaaagcgcaaattgacgccatgtcgcatgtcatgttcggcggcataacccatcaacctgcggtgaatctgtgccgtaagctggtcgcgataacgcctgagccgctggagtgtgtctttctggccgactctggttcggtgtcggtagaagtggccatgaagatggcgctgcaatactggcaggctcgtggcgaatcgcgtcagcgttttctgacgtttcgccacggttatcatggcgacacgttcggcgcgatgtcggtgtgcgatccggataactccatgcacagcttgtggaaaggctatctgcctgaaaatctgttcgcgccggcgccgcaaagccggatggatggcgaatgggatgaaagcgacatcgcgccatttgcccgcctgatggccgcgcatcgccatgaaatagccgccgtgattctggaacctatcgttcagggcgcgggcgggatgcgcatatatcatccacaatggctcaggcgtattcgtaacatgtgcgatcgcgaaggcattctgctgattgccgatgaaatagccaccgggtttggccgtaccggcaaactgttcgcctgtgagcacgccgggatcgcgccggatattctgtgtctcggcaaagccttaaccggcggtaccatgaccctctcggcaacgctcacgacacgccaggttgcagagactattagcaacggcgaggcggggtgttttatgcatggcccgacgtttatggggaatccgctggcctgcgccgtcgcttgcgccagcctgacgctgctggaaagcggcgaatggcgtcagcaggtggcgtctatcgagtctcagttacgcgctgagttagcccccgcgcaaagttcgccctgggtggcggatgtgcgggtgttgggcgcgattggggtggttgaaactacgcatccggtcaatatggcggcgcttcaacgcttcttcgtcgggcaaggcgtctggatcaggccgttcggcaagctaatctacctgatgccgccctacattattcgtccggatcaactgcgccgtttgacccaggcggtcaatgacgcggtacacaatgaaacattttttagccattaa

SEQ ID NO: 9894 - DNA, 1041 bp, Salmonella typhi
  CDS (1)...(1041)
atggctcgccacccacgctggacactgtcgcaagtaaccgaattatttgaaaaaccactgctggaattgctgtttgaagcgcagcaaattcatcgccagcatttcgatccgcagcaggtacaggttagtacgctgttgtcgatcaaaaccggcgcctgcccggaggattgtaaatactgcccgcagagctcgcgctataaaaccgggctggaagccgagcgtttaatggaggtagagcaggtactggactccgcccgtaaagcgaaaaacgccggttcgacccgcttctgtatgggggcggcctggaagaatccgcatgaacgcgatatgccttatctggagaagattgtacagggcgtcaaagcgatggggctggaaacctgtatgacgctcggcatgttgaacgagagccaggcgcagcgtctggctaacgccgggctggattactacaaccacaacctcgatacctcgccggagttttacggcaatatcatcactacccgtacctatcaggagcgcctcgacacgctggaaaaagtccgtgaagcagggattaaagtgtgctccggcggcattgtgggtctgggcgaaacggttaccgatcgcgccggactgttgttgcagttggcgaacctgcctacgccgccggaaagcgtgccaatcaacatgctggtgaaggtaaaaggcacgccgcttgcggataacgatgacgtggatgcgtttgattttattcgtactatcgccgtagcgcgcatcatgatgccgacctcatacgtgcgtctttccgcaggacgtgaacagatgaacgagcagacccaggcgatgtgctttatggccggggcgaactcgattttctatggctgcaaattgttaactacgccaaatccggcagaggacaaggatctgcagttattccgtaagctggggctgaatccgcagcagaccagggtgctggcgggcgataacgagcagcagcaacgtctggagcagacgctgatgacgcctgacaccgatgattattacaacgcggcagccttatga

SEQ ID NO: 9895 - DNA, 642 bp, Salmonella typhi
  CDS (1)...(642)
  misc_feature (1)...(642): n = A,T,C or G
atgtttacggggatcgtacagggtaccgcgaaactggtatcgattgatgaaaaacccaactttcgcacccatgtggtgacgttaccggactacatgctggaggggctggagacgggggcgtcggtagcgcataacggatgctgtttgacggtaactgaaataaacggcaatcagataagctttgatctgatgaaagaaacgttgcgcatcaccaatctgggcgcgttgagggtaggtgatgaggtcaacgtagagcgcgccgccaaattcagcgatgaaatcggtggacatctgatgtcggggcatattattacgacggcggagatcgcgaaaatcctgacctctgaaaataaccatcaggtgtggtttaaagtgcaggatgcgtccctgatgaagtatatcctgtacaagggctttatcggcgtcgacggcatcagtttgaccgtcggcgaggtaacgccaacgcgcttctgcgtgcatctcattccggaaacgctggaacgtactacgcttggcagaaaaaaactgggtgagcgtgtgaatatcgagatcgatccgcanacgcaggcggttgtcgataccgtagaacgcgtactggctacacgagaaaatgtggtcagaaatcaggccgacattggctaa

SEQ ID NO: 9896 - DNA, 2283 bp, Salmonella typhi
  CDS (1)...(2283)
  misc_feature (1)...(2283): n = A,T,C or G
gtgcctatgctcaatcaagaactggaactcagtttaaacatggctttcgccagagcgcgcgagcaccgtcatgagtttatgaccgtcgagcatctgttgctggcgctgctcagcaacccatcggctcgcgaagcgctggaagcatgctccgtggatctggtggcgctccgtcaggaactcgaagccttcattgaacaaaccacacccgtactgcctgccagtgaagaagagcgtgatacgcagccgacgttaagtttccagcgtgtcctgcaacgtgccgtcttccacgttcagtcttccgggcgtagtgaagtgactggcgcgaatgtgctggtggctatctttagcgagcaggaatcacaggcggcttatctgctgcgtaagcatgaagtgagccgtctggatatcgtgaactttatttctcacgggacgcgaaaagacgaaccgagccaatcttccgatctcggcaatcagccagctggcgacgaacaagctggcggggaggaacgtatggaaaacttcacgacgaatcttaaccaacttgctcgcgtgggcggcatcgatccgctgattggtcgtgaaaaanaacttgaacgcncgatccaggtcttgtgtcgtcgccgtaaaaataacccgttgctggcaggggaatccggcgtcgtcaaaacggcgattgccgaagggctggcctggcgtatcgtgcagggcgatgtgccggaagtgatggccgattgtactatttactctctggatatcggttcgctgctggcgggcaccaaataccgcggcgattttgaaaaacggtttaaggcgttgctgaaacagcttgagcaggataccaacagcatcctgtttatcgatgaaatccataccattatcggcgctggcgcggcgtcgggtggacaggtggatgcggcaaatctgattaaaccgctgctttccagcggcaagatccgggtgatcggctcaacgacctatcaggaattcagcaatatttttgagaaagaccgcgcattagcgcgccgtttccagaaaattgatattaccgagccttcggtggaagagacggtgcaaattatcaacggcttgaaacctaagtacgaagcgcaccacgacgtgcgttataccgcgaaagcggtgcgtgcggcggtcgagctggcggtaaaatatatcaatgaccgccatctgccggataaagccattgacgtgattgacgaagtgggcgctcgggcgcgtctgatgccggtgagcaaacgtaagaaaacggtcaacgtggcggatattgagtccgtagtggcgcgaattgcgcgaattcctgaaaagagcgtctcgcagagcgatcgcgatacgctgaagaacctgggcgatcgtctgaaaatgctggtcttcggccaggataacgcgattgaggcgctgaccgaagctattaagatgagtcgtgcgggcctgggccatgagcataaacctgtcggctcattcttgttcgccggcccaactggcgtagggaaaactgaagttacggtacagctttcaaaagcgctgggtattgagctgttgcgttttgatatgtccgaatatatggagcgtcatacggtgagccgtctgatcggcgcgcctccgggatacgtcggtttcgaccagggcgggctgctgacggatgcggtgattaagcatcctcatgcggtgctgttgctggatgagatcgaaaaagcgcacccggatgtctttaacctgctgctgcaggtgatggataacggtacgctgaccgataacaacggccgcaaggcggatttccgcaacgtggtgctggtgatgaccaccaacgccggcgtgcgagaaaccgaacgtaaatctattggtcttattcatcaggacaacagtaccgatgcgatgggcgagatcaagaaagtgtttacgcctgagttccgtaaccgtctcgacaacattatttggttcgatcatctgtctggcgaggtgattcatcaggttgtcgataagtttatcgtcgagttgcaggctcagttggatcagaaaggcgtctccctggaagtcagtcaggaagcgcgcgactggctggcggaaaagggctatgaccgggcgatgggcgcacgaccaatggcacgtgtgatccaggataacctgaaaaaaccactggccaatgagttgctgtttggatcgctggttgacggcggacaggtcaccgtcgcgctggataaagagaaaaatgcgttgacgtatgacttccagagtgcgcaaaagcacaagccggaagccgcgcactaa

SEQ ID NO: 9897 - DNA, 1947 bp, Salmonella typhi
  CDS (1)...(1947)
atgacggcattgcttgaactgtgcaatgtgagccgcagctacccctccggagaagagcaggtggcggtgttgaaagatatctccctgcaaatccacgccggggagatggtggcgatcgtcggcgtttccggttctggaaaatcaacgctgatgaatatcctcgggtgcctggataaaccgaccagcggcacttatcgggtggcggggcgggacgtctcgacgctggacccggacgcgctggcgcagctgcggcgtgagcattttggctttatctttcagcgctaccatctgttgtcgcatttaacggcagcgcaaaatgttgaaatccccgccgtctacgccggcattgaacgcaaaaaacgccaggcgcgcgccagagagttgcttttgcggctgggattaagcgatcgcgtcgattatccaccttcacagctttctggcggacagcagcagcgtgtcagtattgcccgcgcgctgatgaacggcggacaggtgattctggcggatgagccgaccggcgcgctggatagccattccggcgaagaggtaatggcgattttgcgccaactgcgcgatcgcggacatacggtgatcattgtgacgcacgatccgctgattgccgcccaggcggagcggattattgaaattcacgatggcaagattgtccataatccgcccgcgcaggaaaagaaacgcgaacagggcgttgacgctgccgtagttaatacggctcccggctggcggcaatttgccagcagctttcgcgaagcgctgtcgatggcgtggttagcgatggccgctaacaaaatgcgtactttactgaccatgctgggaattattatcggtattgcgtcggtggtgtcgattgtggtggtcggcgacgccgcaaaacagatggtactggcggatatccgcgctatgggcactaacacgattgatattcatccaggcaaagattttggcgacgacaacccgcagtatcgacaggcgctgaaatatgacgatctggtggctattcagaaacagccgtgggttaactctgcgacgcccagcgtttcaaagagcttacgtcttcgctatggcaatattgatattgccgtaaatgctaatggcgtcagtggcgattattttaacgtttacggcatgtcctttagggaggggaacaccttcaatgctgtacagcaacaggatcgcgcgcaggtggtggtgttggatgccaacacgcgacgccagctatttccaaataaagcgaatgtcgtaggagaagtggtgctggtgggtaatatgccggttattgttattggcgtggcggaagagaaaccgtccatgtacggcaatagcaatctgttgcaagtttggttgccctatagcacgatgtcagatcgcataatgggtcagtcatggcttaactcgatcaccgttcgtgtgaaagatggcgttgatagcgatcaggctgaacagcagcttacccgcctgctcaccttacgccacggtaaaaaagacttcttcacctggaatatggacagcgtcctgaaaacggctgaaaaaaccacctatactcttcagttatttctgacgctggtggccgtcatttcgctggttgtcggcggcatcggcgttatgaatattatgctggtttccgtcaccgagcgaacgcgtgaaatcggcatccgtatggcggtaggcgcgcgcgccagcgatgtgctacagcagtttcttattgaagcggtgctggtttgcctggttggtggagcgctggggattagcttgtcgatgttcatcgcatttatgctacagcttttcctgcccggctgggagatcggtttttcactgacagcgctggcgagcgcgtttttatgttcgacgtttaccgggatattgtttggctggctaccggcgagaaacgcggcgcgactggacccggtggatgcgctggcaagagagtaa

SEQ ID NO: 9898 - DNA, 1719 bp, Salmonella typhi
  CDS (1)...(1719)
atgaaacaaaccgttgctgcttttatcgccaaaacgctggaacaggctggcgtaaaacaaatctggggcgtcactggcgactccctgaacggcctgagcgatagtcttaatcgtatgggaaccattgaatggatgccaacccgccacgaagaggtcgccgctttcgccgccggcgcacaagcgcagcttaccggcgagctggcagtgtgcgccggttcatgtggaccgggcaacctgcacctgatcaatggcctgtttgattgccaccgtaaccacgtccctgttctggcgatcgccgcccatattccgtccagtgaaatcggcagcggttatttccaggagacccacccgcaggagttgttccgtgaatgcagccactattgcgagttggtttccagcccggagcagatcccgcaggtactcgccatcgccatgcgcaaagcggtgctaaatcgcggcgtctccgtggtcgtacttccgggtgacgtggcgctgaaacccgcgcctgaaaacgccgtcacccattggtaccatgccccgcaccccgtcgttacgccggcggaggaagagctgaaaaaactggcgcaactgctgcgctactccagcaatatcgcattgatgtgcggtagcggctgcgcgggcgcgcatgaggagttggtcgcgttggcggcaaaactaaaagcgccaatcgttcatgccctgcgcggcaaagagcacgttgagtacgataacccttatgatgtgggaatgaccggcctgattggcttctcttctggcttccacaccatgatgaacgccgatacgctgatcctgctcggcacccagttcccctatcgcgccttttatccgagcgatgccaaaatcattcagattgacatcaacccgggcagtattggcgcgcacagcaaagtcgacatggcgctggtgggcgatattaaagccacgcttcgcgccctgctgccgctggtggaagaaaaaagcaatcgtaaattcctcgataaagctctggaacactatcgggacgcccgtaaagggcttgatgacttagccaaactcagcgataaagccatccacccacaatatctggcgcaacaaattagtcatttcgccgctgacgacgctatttttacctgcgatgtcggcacgccgaccgtctgggcggcccgctatctaaaaatgaacggcaagcgccgcctgctgggctcgtttaaccacgggtcaatggccaacgccatgccgcaggcgctcggcgctcaggccaccgcgccgggtcgtcaggttatcgcgatgtgcggtgatggcggcttcagtatgctgatgggcgattttctctcggtggtacagatgaagctgccgataaaaatcgtcgtctttaataacagcgtgctgggctttgtggcgatggaaatgaaagctggcggttaccttaccgacggtaccgaactgcacgacaccaatttcgcgcgtatcgccgaagcctgcggcattaccggtattcgcgtggaaaaagccgcagacgtggacggagcgctacagcgcgcgttttccatcgatggcccggtactggttgacgtggtcgtggcaaaagaagagctggcgatcccgccgcagatcaaactggaacaagcgaaaggctttagcctgtacatgctgcgcgccattattagcggccgcggcgatgaagtgatcgaactggcgaaaacaaactggctaaggtaa

SEQ ID NO: 9899 - DNA, 675 bp, Salmonella typhi
  CDS (1)...(675)
atgctcagtttgcacggggatgagctggctatcccttttgatttcattgctccgagcctggatgttatgctggaaaaccttaacaactcgctgttttattttattaacgccacgcctgattccgcgcagtggataatttcgctcgctatctttatcgccaaagatgtcatcaacatcgtcccgctcttagccgtggtactctggctgtgggggccccgcgatcgggtctgcgcccagcgccagctgatcgttaaaatcggcatcgcgctgattatcagtctggcggtctcctggacaatgggacaccttttcccgcacgaccgtccgtttgtcgatcatatcggctataacttcctgcatcatgccgccgatgactcgttccccagcgatcacggtacggtgatttttacctttgcgctggcgtttttgttctggcaccgcctctggtcaggcatcgtgatgatggcgatagccatgaccatcgcctggtcgcgcgtctatctcggcgtacactggccgttagatatgattggcgcgctgctggtagcgatgcttggctgcctgagcgcacagctgatctggcaatggtacggcgcgccgctctaccaggcgctgcaacgttgttaccgtttctgtttcgcattgcccattcgaaaaggctgggtacgtgactaa

SEQ ID NO: 9900 - DNA, 1242 bp, Salmonella typhi
  CDS (1)...(1242)
atgttcatggaattttccgccggattgatgccgcttgaaacggcgctgacccagatgctttcacgtattaccccgctcaccgccgtagaaacgttgccgctgatgaactgctttggccgcatcctggcgaccgatatcgtatctccccttgatgtccccggctttgataattcagctatggatggttatgcggtacgtgtggcggatttgtccgccgataagccgctgcccgtcgccggcaaagcatttgccggtcagccttaccaaggagaatggcctgcgggaacctgtattcgcattatgaccggcgccccggtgccggcaggttgcgaggcggtcgtcatgcaagagcagacggaacaaactgatgacggcgtgcgttttaccaccgatgttcgttgcggacaaaacatccgccgccgcggcgaggatattcgccaggatgcggtggtctttccagccggtacgcgcctgactactgccgaactgccggtgctggcgtcgctgggaattgccgatgcgcaggtagtacgtaaagtgcgcgtagcgctgttctcgaccggcgacgagctccagcttccgggccagctgctggaggcgggacaaatttatgacactaaccgtctaactatacatttgatgctgcaacagcttggctgcgaagtgatcaatttaggcattattcctgacgatcccggtaagcttcgcgccgcgtttgtcgacgccgacagccaggccgatgtagtgataagctccggcggcgtctcggttggtgaagcggactataccaaaaccatccttgaggagctgggcgaaatcgccttctggaagctggctatcaagccaggcaaaccgtttgccttcggcaagctcagtaatagctggttctgtggcctgccggggaatccagtctctgcggcgctcacgttttatcaactggttcagcccttactggcgaagcttggcggcaatacggcaagcgctgtaccgccgcgccagcgtgtacgcacaacatctcgcctgaagaaaacgccggggcgtctcgatttccagcgcggcatcctgcaacgtagcgccaacggcgaactggaggtcacgaccaccggacaccagggctcacatattttcagctcgtttaatctgggcaactgctttattgtgctggagcgtgaacgcggcaatgttgagccgggagaatgggtggaagtcgagccgtttaatgctctgttcggaggcctgtaa

SEQ ID NO: 9901 - DNA, 1596 bp, Salmonella typhi
  CDS (1)...(1596)
  misc_feature (1)...(1596): n = A,T,C or G
gtgttagtttccagcaacgttaccatgcagttcggcagtaagccgctgttcgaaaatatttccgtcaaatttggcggcggcaaccgttacggcctgatcggcgccaacggtagcggaaagtccacttttatgaaaatcctcggcggcgacttggagccgacgctgggcaatgtttccctcgatccgaatgagcgcatcggtaagctgcgtcaggaccagttcgcttttgaaacattcaccgtacttgatactgtcattatggggcatggcgaactgtgggaagtcaagcaggagcgcgaccgtatctatgccttgccggaaatgagcgaagaagacggctataaagtcgccgatctggaagtaaaatacggcgagatggacggttattccgctgaggcgcgtgcgggcgaactgctgttgggggtgggcatcccgctggagcagcattacggtctgatgagtgaagtcgcgccaggctggaaattgcgtgtgctactggcgcaggcgttattctctaatcnggacatcctgttgctcgacgaaccgaccaacaacctggatattgatactatccgttggctggagcaggtgctgaacgagcgcgatagcacgatgatcatcatttcgcacgaccgtcacttcctgaacatggtttgtacgcatatggcggatctggattacggtgacttgcgcgtctatccgggtaactatgatgagtatatgacggcggcgacccaggcgcgtgaacgtctgttggccgataatgcgaagaaaaaagcgcaaattgccgagctgcaatcttttgttagccgttttagcgccaatgcctctaaatcgcgtcaggcaacgtcgcgcgcgcggcagattgataaaatcaagctggaagaggtgaaagcctccagccgtcagaacccgttcatccgttttgagcaggataaaaaactgttccgtaacgctctggaagtggaggcgctgacgaaaggttttgataacggtccgctgtttaaaaatgtcaatttgctgctcgaagtcggcgagaagctggcggtactcggcaccaatggcgtgggtaaatctacgctgctgaagacgctggttggcgatctggacgccgatcacggcaccgttaaatggtcggaaaacgcgcgtattggttactacgcgcaggaccacgaatatgaattcgaaaatgacctgacggtgtttgaatggatgagtcagtggaaacaggaaggcgacgacgagcaggcagtgcgcagtattctgggccgcctgttatttagccaggatgatatcaaaaagcctgcgaaagtcctctccggtggcgagaagggccgtatgctgttcggcaaactgatgatgcaaaagccgaatatcctgatcatggacgaaccgactaaccacctggatatggagtcgatcgaatcgctgaatatggcgctggagctgtatcagggcacgctgatctttgtttcgcacgaccgtgagttcgtcagctcgctggcaacccgcgtcattgaaattacgccggagcgcgtggtggacttcagcggtaactacgacgattatttgcgtagtaaagggattgaaagctaa

SEQ ID NO: 9902 - DNA, 888 bp, Salmonella typhi
  CDS (1)...(888)
atgccggggtcaacacgtaaactaccagtctggttgcccattttggttttgctcattgccatgtcctctattcagagtggcgcttcactggcaaaatcgttatttcctcttgttggcgcgccgggtgtaacggcgcttcgtctggcgttgggaacgcttatccttatcgcctttttcaaaccctggcgtttgcgttttgccaaagagcagcggctgcctttactgttttatggtctgtcgctgggcgggatgaactatctattctatctgtcgattcagacggtgccgttgggtattgcggtcgcgctggaatttaccggccctctggcggtcgcgctgttttcatcccggcgtccggtagattttatttgggtcgtactggctgtgcttggactctggttcctgctgccattaggacaagatatgtctcacgtcgatcttaccggggccgcgttagcgctcggcgctggcgcctgttgggctgtctatattcttaccggccagcgagcaggcgcggaacatggtccggccacggtggcggtaggctcgctgattaccgccatcattttcgtgccgattggcgcagttcaggctggcgatgcgctatggcactggtcgattcttcccttagggttagcggtcgctgtgctttctacggcgctgccttattcactggaaatgattgcgctgacgcgcctgccaactcgcaccttcggtacgctgatgagcatggaacccgtgctggccgccatttccgggatgatttttctgggcgaaacgcttacgggcatacaaatcctggccctgtgcgccatcattgccgcctcaatgggttctaccctaacgattcgccgcgaaccgcaaattaaacaagttgacgtaaaatag

SEQ ID NO: 9903 - DNA, 2256 bp, Salmonella typhi
  CDS (1)...(2256)
gtgttttgcgtctcttttctcactggaggagtcatgcggtggaccctgttcatccttttttgtctactgggcgcgcctgcccatgcggtcgccatacccggcgtgaccacggggacatcaaccagccagcaagcagcgccagagcccagtcctgaacaaaaaaaagcggcctatgcggccctggctgacgtactggagaacgaggcttcacgtaacgaattgatagcgcaactccgcgaagcctcaaccacgccgccgaccgagccagcgccagcgcttgccccgcctgcggccaaagatgagaaaacggtactggagaacgtcaccaccgttacccgtcagtacggcgatgctttcgctacccgtttcgcccagctttatcgcaacatcaccgatgcgccgtacaagccgtttaactcgcaaaccttcaccaacgcgttaacccactttttatttctggccgtcgcggtatttggtttttatagcgtgatacggctttgcgccctgccgttatatcgaaaaatgggcctgtgggcgcgcaagaaaaaccgtgaacgcagcaactggttacagctcccggcgatgatcgccggcgcgtttattatcgacctgctgctactggcgctcaccttatttatcggtcagatgctcagtgataatttccatgccggaagtcgaactatcgcttttcagcaaagcctgttcctgaatgccttcgcgctgatagagttctttaaagcgattctgcggcttattttttgccctaatgtaccggaattacgcccattcgcgattcaggatgcgacagcgcgttactggaatcgccgtatgagttcccttagcagtttgattggctacgggctgattgttgccgttccgattatttccaaccaggtgaatgttcaggtcggggcgatggcgaacgtggcgatcatgctctgcatcaccatctgggcgctgtacctgatctttaaaaacaaagcggagattacgcaacatttattaagtctggcggaacgatcattagccttttttagcctgtttatccgcgcctttgcgctggtgtggcactggctggccagcgcttactttatcgtgctgtttttcttctcgttattcgacccaggcaatagcctgaagtttatgatgggcgcgaccgtgcgcagtctggcgattattggcatcgccgcgtttatctccggtatgtttacccgctggatagcgaaaaccatcaccctgtcgccccatacgcagcgcaattacccggaattacaaaagcggcttaacggctggctctcctcggcgctaaaagtcgcacgctttttgaccgtctgcgtcgccgttatgctgttgctcaacgcctgggggctattcgatttctggcactggctacattatggcgcgggggaaaagatggtcgatatcctcatccgtatcgcgttaatcttattcttctccgccgtgggatggacgattctcgccagtctgattgagaatcgcctggcctccgatattcatagtcgcccgctacccagcgcccgcacgcgcacgctgctgacgctgttccgcaatgcgctggcagtgattatcagtaccataaccatcatgatcgtgttatcggaaatcggcgtcaatatcgcgccgttgctggctggcgcgggggcgttaggtctggctatctctttcggttcgcaaaccctggtgaaagatattattaccggcgtttttattcagtttgaaaacgggatgaataccggcgacttagtcaccataggcccgctgatggggacggtcgaaagaatgtcgattcgttccgtcggcgtgcggcaggataccggggcataccatattatcccgtggtcctcgatcaccactttcgccaactttgtgcgcggtatcggctctgttgtcgccaactatgacgtggatcgccatgaggatgcggataaagcgaatcaggcgctgaaagacgcggtaacggcgctgatggagacggaggatattcgcgggctgattatcggcgaacccacgttcgccggtattgtcggtttaacgaacacggcgtttactttacgcgtgtcgttcaccacgctaccgctcaagcagtggacggtgcgttttgcccttgatagccaggtgaaaaagcattttgatctggccaatgttcgcgcgccggtgcaaacgtatcaggttctgcccgcccccgccggcggcccgccgcctgattcactgccgccgcgcgaaccgacgatttag

SEQ ID NO: 9904 - DNA, 1752 bp, Salmonella typhi
  CDS (1)...(1752)
atgacgaggcacggcatgagtgaggccgttattacgctgaacggtctgacgaagcgctttgcgggaatggataaacccgccgtcgcgccgctcgactgtaccattcattccggttatgtcaccgggctggtagggccggacggcgcaggaaaaaccacgctgatgcgtatgctggcgggccagctcaaagccgatggcggcagcgcgtccgtattgggcttcgacccgatacaaaacgacagcgagctgcacgcggttctgggctatatgccgcagaaattcgggctgtatgaagatcttaccgtcatggagaaccttaatctctatgccgatttgcgcagcgttaccggcgagatacgggaaaagacctttgcccgtttgttggagtttaccgccctcggccctttcactggccgtctggcgggaaaattgtccggcgggatgaagcaaaaactggggctggcctgtacgctggtcggcgaaccgaaagtgctgctgttggatgaaccgggcgttggcgttgacccgatttcacggcgcgagttgtggcaaatggtccacgaactggcgggcgacgggatgctgattttatggagcacctcctatctggatgaagccgaacagtgtcgcgatgtgctgctgatgaatgaaggcgagctgctctatcagggcgaacctaaagcgctgacgcaaacgatggccggtcgtagctttctgatgagtagtccacaggaaaacaaccgtaagttactacagagagcgctcagactgccgcaggtgagcgacggcatgattcaggggcgttcggtacgcctgatcctgaaaaaagaggcgaccgcagcagatattcgtcaggccgaagggatgccggaaatcaccctcaatgagaccgcgccgcgtttcgaagatgcgtttatcgatctgcttggcggagcgggaacctcggagtctccgctgggttcaatcctgcatacggttgaaggcactgccggcgaaacggtgattgaagcgcaggaactgacgaaaaaatttggcgatttcgcggccacggaccatgttaatttcgtcgtacaacgcggcgagatttttggcctgctcggcccgaacggcgcgggtaaatcaaccacctttaaaatgatgtgcggcctgctggtgccgacgtccggcaaggcgctggtgctggatatggacctgaaagtcagctccggcaaagcccgtcagcatctgggctatatggcgcaaaaattttcgctttacggcaacctgacggttgagcagaacctgcgttttttctccggcgtctacggtttgcggggccgcgcgcaaaatgaaaaaattcagcgcatgagtgaagcatttggtctgaaaagcatcgcgtcgcatcccaccgatgcgctgccgctgggttttaaacagcgactggcgctggcctgctcgctgatgcacgaaccggatattttattccttgatgaaccaacgtccggggttgatcccctcacccgccgtgaattttggctgcacattaatagcatggtggaaaaaggggtcacggtaatggtgacgacccactttatggatgaggcggaatattgcgatcgcatcggactggtttatcgtgggaagcttatcgccagcggtacgccggacgatctcaaagcgcaggccgccgatgagcaacaggccgatccgacgatggagcaggcctttatcactctcatcaatgactgggataaggagcatacgcatgagtaa

SEQ ID NO: 9905 - DNA, 513 bp, Salmonella typhi
  CDS (1)...(513)
atgagtcaggtcagcgctgaatttatcccgacccgcatcgctattcttactgtttccagccgacgcggcgaagaagacgacacctccggtcattatctgcgtgattcggcgcaggaggccgggcatgaagtggtggcgaaagccatcgttaaagagaaccgttacgcgattcgcgcccaggtttccgcctggatcgccagtgatgaggtgcaggtcgtattgataactggcgggaccggtttgaccgaaggcgatcaggcgccggaagcgctgttgccgctgttcgatcgtgaagtggaaggatttggcgaagtgtttcgcatgctctcgtttgaagagatcggcaccgcaactctgcagtcgcgcgcggtagctggcgtggcgaataacaccttgattttcgccatgccgggctccacaaaagcgtgcagaaccgcatgggagaatatcattgcgccgcagctggatgcccgtacacgcccatgtaattttcaccctcatttaaagaaataa

SEQ ID NO: 9906 - DNA, 909 bp, Salmonella typhi
  CDS (1)...(909)
atgcgcaatcgtacgctggctgaccttgatcgtgtcgttgccctcggcggagggcatggattaggacgcgtcctctcctcgctttcttcattaggttcgcgcctgaccggcattgtgactaccacagataacggggggtcaactggccgtattcgccgctcggaaggcgggatcgcctggggcgatatgcgcaactgtctgaatcagttaattaccgaacccagcgtcgcatccgctatgtttgagtaccgttttggcggtaatggcgaactttctggtcataacctcggaaatttgatgttaaaggcgttagatcacctgagcgtgcggcctctggaagcgattaatttaattcgtaatctgcttaaagtggacgcgcagctgatcccgatgtcggagctaccggtagatctgatggcgattgacgatcaggggcatgagatttatggcgaggtgaatatcgatcagttagcgacgccgccgcaggagatcatgttaacgccaaacgttccggcgacgcgggaagcggtacaggccattaatgacgcggatctgattctgattggccctggcagtttttataccagcctgatgccttgcctgctgctggatgaactggcgcaggcgctgcggcgcaccccagcgccaatggtgtatatcggcaatctgggtcgcgaactgagtctgcccgccgccagtttaacgctggtcgataagctggcgatgatggagcaatatattggcaaaaaagtcattgacacagtagtggttgggccgcgagttgacgtcagtgcggtgaacgatcggctggtgattcaggaagtgctggaggccagcgatatcccctatcgccacgatcgtcagttattacacaatgcgctggaaaaagcgctacaggcgttgggttaa

SEQ ID NO: 9907 - DNA, 2109 bp, Salmonella typhi
  CDS (1)...(2109)
atgaattctctgtttgccagtacggcccgcgggctggaagagctgttaaaaattgaactggaaaaactgggcgccgtagggtgtcaggttgttcagggtggggtccattttcagggcgacacgcggcttatttaccagagcctgatgtggagccgcctggcctcgcgtattatcctgccgatgggtgagtgcaaggtctacagcgatctcgatctttacttcggcgttcaggcgataaactggacagagatttttaatcctggcgcgacgtttgcggtgcatttcagcggcctgaacgacaccatccgtaatagtcagtatggcgcgatgaaagttaaagacgcgattgtcgatgcgtttacgcggaaaaatcttccgcgtccaaatgtggaccgcgaatcgccggacctccgtattaacgtctggctgaataaagaaacggccagcattgcgctggatctcagtggtgatggcctgcacctgcgcggttatcgcgatcgcaccgggctggcgccaattaaagagacgctggcggcagcgattgttatgcgttccggctggcaaccaggtacgccgctgctcgaccctatgtgtggttcggggacactgttgattgaggccgcgatgtgggcgaccgatcgcgcgccgggcctgcatcgtggtcactggggatttagcggctgggcgcagcatgacgaggctatctggcaggaagtgaaagccgaagcgcagacccgggcgcgtaaggggctggcggagtattcctctcatttctacggttccgacagcgatgcgcgcgtcattgagcgggcgcgcagcaacgcccgtcgcgccggtatcggggagcttatcacttttgaagtgaaagatgtggcgcaactgagtaatccattgccgaaaggcccgtatggtacggtgatcagtaacccgccttacggcgaacgtctggacagcgatccggcgctgattgcgttgcacagcctgttgggccgtaccatgaaaaatcagtttggcggctggaacctgtcgctgttcagcgcttcgcccgatttgctgggcagcctgcaattacgcgccgacaaacagtttaaagccaagaatggcccgctggactgtgtgcagaaaaactatcatattgcggaaaccacggcggacagtaaaccggcgacggtggcggaagattacgctaatcgcctgcgtaaaaatcttaaaaagctggagaaatgggcgcgccaggaagggattgaatgctatcgcttgtatgatgccgacctgccggaatataacgtggcggtagaccgttacggcgactgggcggtgattcaggaatatgcgccgccgaaaacggtggatgcgcaaaaagcgcggcaacgtctgttcgatattattgcggcaaccttgtcagtgctcggtattccgccgaataaactggtgttaaaaacccgcgaacggcaaaaaggaaaaaaccagtatcagaaaatgagcgagaagggcgagttccttgaggtcagcgaatataatgcgcgcttatgggtaaatctgacggattatctcgacactggtctgttcctcgatcaccgtattgcccgcagaatgctgggagaaatgagcaaaggcaaagatttcctgaatctcttttcttataccggcagcgccagcgtacatgcgggtctgggcggcgcgcgcaacaccacaacggtggatatgtcccgcacctatctggagtgggccgaacgtaatttgcgtctgaacggactgagcggccgcgcgcatcgcctgattcaggccgactgcctgggctggctgcgcgaggcgaatgaacagttcgatttgatctttatcgatccgccgacgttctctaactcaaaacgtatggaagagtcgtttgatgttcagcgcgatcatgtcgcgttaatgaaagatttaaaacgcctgctgcgtaaaggcggcaccatcatgttctcaaataataagcgcggattccgtatggatctggaagggctggctgagctggggcttaccgcacaagaaattacgcaaaaaacgctttccccggattttgcccgtaaccgtcagattcataattgctggctgatccgcgccgcctga

SEQ ID NO: 9908 - DNA, 1749 bp, Salmonella typhi
  CDS (1)...(1749)
atgcataacgataaagatctctctacgtggcagaccttccgccgactgtggccaaccatagcgccttttaaagcaggtctgatcgtggcgggcatagcgttaattctcaacgcagccagcgataccttcatgctatcgctcctcaagccattactggatgatggtttcggtaaaacggatcgctcagtgttgctgtggatgccgctggtggttattgggctgatgatattacgaggcatcactagctatatctccagctactgtatttcatgggtgtcaggcaaggtggtaatgaccatgcgccgtcgcctgtttggccatatgatgggaatgcccgtcgccttctttgataaacagtctaccggtacgctgctgtcgcgtattacatacgattcagaacaggttgcctcttcttcatctggcgcgctgattaccgtggtgcgtgaaggggcatcgatcatcggattgtttattatgatgttctattacagctggcagctgtcgatcatcctggttgttttagcgccgattgtgtcgattgcgattcgcgttgtctcaaagcggttccgcagcatcagtaaaaatatgcagaacacgatgggacaagtgactaccagcgctgaacaaatgctgaaaggacacaaagaggtactgattttcggcggtcaggaagtcgaaactaaacgctttgataaagtcagcaataagatgcgactgcaaggcatgaaaatggtctctgcctcgtcaatttccgatcctatcattcagctcattgcctcgctggcgctggcgtttgttctctatgctgcgagcttcccaagcgtaatggatagcctgacggcagggaccatcacggtggtgttctcctccatgatcgcgctgatgcgtccattaaaatcgctgacaaacgttaacgcgcagttccagcgtgggatggcggcttgtcagacgttgtttgcgattctggacagcgaacaggagaaagatgaaggtaaacgtgtcattgaccgcgcgaccggcgatctcgaattccgcaatgtgacgtttacttacccgggccgtgaagtgccggcattgcgtaacatcaatttgaaaattcctgccgggaaaaccgtggcgctggtggggcgttccggatcgggtaaatcaactatcgccagtctgatcacccgtttctacgatattgatgaaggacacatcctgatggatggtcacgatctacgcgaatacactctggcctctctacgtaatcaggtggcgctggtttcgcaaaacgtgcatctgtttaacgacacggtcgccaataacattgcttatgcccggacggaagaatacagccgcgagcagattgaagaggcggcgcgcatggcctatgccatggactttatcaacaagatggataatggtctggataccattatcggcgaaaacggcgtactgctttccggcggtcagcgccagcgtatcgcgattgcccgcgccttactgcgcgacagcccgattctgatccttgatgaagctacgtccgcgctggataccgagtccgaacgtgcgattcaggccgcgttggatgagctgcaaaaaaaccgtacctctctggtgattgcgcaccgtctctccaccatcgaacaggcggatgagatcgttgtagtcgaagacggtattatcgttgagcgcggcactcatagcgagctgctggcgcaacacggcgtttacgcccagctgcataagatgcaatttggccaatga

SEQ ID NO: 9909 - DNA, 1674 bp, Salmonella typhi
  CDS (1)...(1674)
  misc_feature (1)...(1674): n = A,T,C or G
atgactgaatcttttgctcaactctttgaagaatccttaaaagaaatcgaaacccgcccgggttccatcgttcgtggtgttgttgttgctatcgacaaagacgtagtactggttgacgccggtctgaaatctgagtctgccattccggctgagcagttcaaaaacgcccagggcgaactggaaatccaggttggtgacgaagttgacgttgctctggatgcagtagaagacggcttcggtgaaactctgctctctcgtgaganagctaaacgtcacgaagcatggatcacgctgganaaagcttacgaagatgctganactgtnaccggtgtnatcaacngcaaagttaanggtggcttcactgttgagctgaacngtattcgcgcgtncctgccangtnctctggtagacgttcgtccggtgcgtgacactctgcacctggaaggcaaagagcttgaattcaaagtaatcaagctggaccagaaacgtaacaacgttgtggtttctcgtcgtgccgttatcgaatccgaaaacagcgcagaacgcgatcagctgctggaaaacctgcaggaaggcatggaagttaaaggtatcgttaagaacctcactgactacggtgcattcgttgatctgggcggcgntgacggcctgctgcacatcactgatatggcctggaaacgcgttaagcatccgagcgaaatcgtgaacgttggcgacgaaatcaacgtgaaagtgctgaaattcgaccgcgagcgtacccgtgtatccctgggcctgaaacagctgggcgaagatccgtgggttgctatcgctaaacgttatccggaaggtaccaaactgaccggtcgcgtgaccaacctgaccgactacggctgcttcgttgaaatcgaagaaggcgttgaaggcctggttcacgtttccgaaatggactggaccaacaaaaacatccacccgtccaaagtggttaacgttggcgacgtagtggaagtgatggttctggatatcgacgaagaacgtcgtcgtatctccttagggttgaagcagtgcaaatctaacccgtggcagcagttcgcagaaacccacaacaagggcgaccgcgttgaaggtaaaatcaagtctatcactgacttcggtatcttcatcggcctggacggcggcatcgacggcctggttcacctgtctgacatctcctggaacgttgcaggcgaagaagcagttcgtgaatacaaaaaaggcgacgaaatcgctgcagttgttctgcaggttgacgcagaacgtgaacgtatctccctgggcgttaaacagctcgcagaagatccgttcaacaactgggttgctctgaacaagaaaggcgctatcgtaaccggtaaagtcactgcagttgacgctaaaggcgcaaccgtagaactggctgacggcgttgaaggttacctgcgtgcttctgaagcatcccgtgaccgcgttgaagatgcgactctggttctgagcgttggcgacgacgttgaagctaaattcaccggcgttgatcgtaaaaaccgcgcaatcagcctgtctgttcgtgcgaaagacgaagctgacgagaaagatgccatcgcaactgttaacaagcaggaagatgcaaacttctctaacaacgcaatggctgaagcattcaaagcagctaaaggcgagtaa

SEQ ID NO: 9910 - DNA, 846 bp, Salmonella typhi
  CDS (1)...(846)
  misc_feature (1)...(846): n = A,T,C or G
gtgaaagctgacaacccttttgaccttttactccctgcagcaatggccaaagtggctgaagaagcaggcgtctataaagcaacgaaacatccgcttaagactttctatctggcgattaccgccggcgtattcatttcaattgcctttgttttttatattactgcgacaaccggtactggcgcgatgccttatggcatggcgaaacttatcgggggtatctgtttctctttgggactgattctctgtgttatttgcggcgctgatcttttcacctctactgttctgatcgttgtagctaaagctagcggtcgcatcacctggggacaactggctaaaaactggttaaacgtctattttggtaacctgattggcgctctgcttttcgtgttactgatgtggctttccggcgagtatatgactgccaacggtcaatggggacttaacgtcctgcaaaccgccgaccacaaaatgcaccacacttttattgaagctgtctgcctcggtattctggcgaacctgatggtttgtctggccgtgtggatgagctactcaggtcgtagcctgatggacaaagcgttcatcatggtactgcccgtcgccatgtttgtcgccagcggttttgagcacagtatcgcaaacatgtttatgattcctatgggtattgtaatacgcgatttcgctacaccggagttttggaccgcggttggttcgtctccggaaagtttttctcacctgaccgtgatgagcttcatcactgataacntgattccgntcacgatcggtaatattatcggcggcggtttgttggtcgggnnngacatactgggtcatttacctgcgtggtaa

SEQ ID NO: 9911 - DNA, 4089 bp, Salmonella typhi
  CDS (1)...(4089)
  misc_feature (1)...(4089): n = A,T,C or G
gtgctgttgtccgttttagcatcgggcgggaaaagcctggaacctggagagccttttttgagccaggaatatactgaagacaaagacgtcacattgacgaagttaagcagcgggcgccgacttctggaagcgttgttgatacttattgccctttttgccgtctggttgatggcggccttgttgagctttaacccttcggaccccagttggtcgcaaaccgcctggcatgaacccatccataatttaggcggcgcgccgggcgcgtggctggccgatacactgttctttatttttggcgtaatggcctacactatccctgtcattattgtcggcgggtgttggtttgcgtggcgtcatcagtctacggatgattacatcgactattttgctgtgtcgctacgccttattggcgtgctggcgctgattctcacttcctgcggtctggcggccattaatgccgacgatatctggtatttcgcctccggcggcgtaattggcagcctgttaagcaccacgctgcagccgttgttgcatagtagcggcggaacgataatgcttctctgtatttgggctgccgggctgacgctctttaccggctggtcctgggttagtatcgccgaaaaattaggcggctggctgcttaatatactgaccttcgccagcaaccgtacccggcgtgatgatacgtgggttgacgacgaagagtatgatgacgaatacgatgaagaaaccgatggcgtgcagcgtgaatctcgccgggcgcgtattttgcgcggcgcgttggcgcgtcgtaagcgactggctgaaaaattcagcaatccacggggccgtcagaccgatgccgcgctcttttccggcaaacggatggatgatgacgaggacattcagtatagcgcgcgcggcgtcgctgccgatcccgacgacgttctgttttcgggcaaccgtgcgacgcagtcggaatatgatgaatatgatccgctgttaaacggccattctgtcaccgaaccggtcgccgccgctgcggccgcaactgccgtcacccagacgtgggcagcgtccgccgatcccataatgcaaacgccgcccatgccgggggctgagccggttgtcgcgcaaccgaccgtggagtggcagcccgtaccggggccgcaaaccggcgaaccggttatcgcgcctgcgccggaggggtatcagccgcatccgcaatatgctcaaccgcaggaggcgcaaagtgcgccgtggcagcaacctgtgcctgtcgcttccgcgccgcaatacgccgcgacgccagcgaccgcagcagaatatgactctcttgcgccgcaggaaacacagccgcaatggcaggcgccggatgccgaacaacactggcagccggagccgatagcggctgaaccttcccacatgccgccgccggttatcgaacagccggttgccaccgagcctgaacctggcatagaagagaccaggcccgctcgccctccgctttactattttgaagaggtggaagaganacgcgcccgtgagcgcgaacaactggcggcatggtatcaaccgattccggagccggtaaaagagaacgtgccggtcaaacctacggtatctgtcgcgccgtccataccgccagtggaagcggtagccgccgccgcgtcgcttgacacaggtattaagagtggcgccctggcagcaggcgccgcggccgctgcgcctgcatttagtctggctaccggcggcgcgccgcgtccgcaggtgaaagaggggattggtccgcaactgccgcgtccgaaccgcgttcgcgtgccgacccgacgggaactggcatcgtacggtattaagctgccgtcacagaggattgctgaagaaaaagcccgcgaggcggagcgcaatcagtacgagacgggcgcgcagctaaccgatgaagaaatagatgcaatgcatcaggacgagttagcccgtcagtttgcgcagtcgcagcagcatcgttatggtgagacgtatcagcatgatactcaacaggcagaagatgacgataccgctgcggaagctgaattagcccgccagtttgccgcttcgcaacagcagcgctattccggcgagcaacccgctggcgcgcagccgttctcactggacgatctggatttctcgccaatgaaagtattggttgatgaaggtccgcacgaaccgctgttcacgccgggtgtcatgcccgagtcaacgcctgttcagcaacctgtagcgccgcagccgcagtatcagcagccggtagcgccgcagccacagtatcagcagccgcagcagccggtagcgtcgcagccacagtatcagcagccgcaacagccggtagcgcctcagccgcagtatcagcagccgcagcagccggtagcgccgcagccgcagtatcagcagccgcaacagccggtagcgccgcagccgcagtatcagcaaccgcaacagccggtagcgccgcagccacagtatcagcagccgcaacagccggtagcgcctcagccgcagtaccagcagccgcagcaaccgacagcgccgcaagacagtctgatccacccgctgttgatgcgtaacggcgacagtcgtccattgcagcgtccgacgacgccgctgccttcattagatcttctgacgccgccgccgagcgaagttgaaccggtagatacctttgcgctggaacaaatggcgcgtctggttgaagcgcgtctggcggatttccgcattaaagctgatgtggtgaactattcgccaggcccggtcattactcgctttgaactgaatctggccccgggcgttaaagcagcgcgtatctccaacctttcccgggatctggcgcgctccttgtcaacggtagccgtacgcgttgtggaagtcattccaggcaaaccttacgtagggttggaattgccgaacaagaaacggcaaaccgtttatctgcgcgaagtgttggataacgccaaattccgcgagaatccgtcgccgcttaccgtggtgttaggtaaggatatcgcgggcgatccggtagtggcggatctggcgaaaatgcctcacctgctggtggccggtacgaccggttccggtaagtcggtcggggttaacgccatgatcctcagtatgctgtataaagcgcagccggaagacgttcgctttatcatgatcgacccgaaaatgttagaactctcggtctatgaaggtataccgcatctgctgacggaagttgttaccgatatgaaagacgcagctaacgcgttacgctggagcgtcaatgagatggagcgtcgctataagctgatgtccgcgctcggcgtgcgtaatctggctggttataacgagaaaatcgccgaagcggcccgcatgggacgtccgattccggacccgtactggaagccgggcgacagtatggatgttcagcatccggttctggaaaaactgccgtatatcgtggtactggttgatgaatttgccgacctgatgatgaccgtcggtaaaaaagttgaagagctgatcgcgcgtttggcgcagaaagcgcgcgctgcggggattcacctggtactggcgacgcagcgtccgtcggtcgatgtgattactggtttaattaaagccaacattccaacccgtatcgcttttacagtatccagcaagatcgactcccgcaccattcttgatcagggtggcgctgagtcgttattgggaatgggggacatgctctattccggaccaaactccaccatgccggtacgtgtccatggggcgtttgtgcgtgaccaggaagtccatgcggtggtgcaggactggaaagcgcgcggtcgtccgcaatatgtggatggcattacctccgacagcgaaagcgaaggtggcggtggcggttttgacggcggcgaagaattagatgcgctattcgatcaggccgttaatttcgtcactcagaagcgaaaagcgtccatttccggcgttcagcgtcagttccgtatcggctataaccgtgcggcgcgtattatcgaacagatggaagcgcagggtattgtcagcgctcaggggcataacggtaatcgcgaagtgttggctccgccgccttttgagtaa

SEQ ID NO: 9912 - DNA, 219 bp, Salmonella typhi
  CDS (1)...(219)
atggccaaagaagacaatattgaaatgcaaggtaccgttctcgaaacgttacctaataccatgttccgcgtagagttagaaaacggtcacgtggttactgcacacatctccggtaaaatgcgtaagaactacatccgcatcctgacgggcgacaaagtgaccgttgagctgaccccgtacgacctgagcaaaggccgcattgtcttccgtagtcgctaa

SEQ ID NO: 9913 - DNA, 945 bp, Salmonella typhi
  CDS (1)...(945)
gtgtattttacgcgcccgagtgcaggcggcggcgttacgcgctgcagaacaaacggaaattcaatggagtgcgttatgagacctcgtcgcagtatgttgtttatccccggcgcaaatgcggccatgttgagcacctcgtttgtctatggtgcggacgcggtgatgttcgacttagaagacgccgtagcattacgtgagaaagataccgcccgtcttttagtccatcacgcgcttcaacatccgttctatcaggatgttgaaaaagtggtgcgcattaatccactgaacacgccattcggtctggccgatcttgaggccgtcgtgcgtggtggcgcggatatcgtgcgtctgccgaaaaccgacagcaaaaacgatgtgctggagctggaagcgcaggttgaacggatcgaacgtgaatgtggacgtgaagtcggcagtaccaggctgatggcggcgatcgaatcagcgaaaggcgtggtcaatgccgtcgacatcgccacctccagcccgcgcatggtggcaattgcgctggcggcatttgattacgtgatggatatgggcaccagccggggcgatggcaccgagctgttctacgcccgctgcgcagtgctgcatgcggcgcgcgttgcgggtattgccgcctatgatgtcgtttggtcggatatcaataatgaagaaggcttcctgaaggaagtgcagttggcgaaagggcttggttttaacggtaagtccttagtgaatccacgtcagattgagctgttacatcaggcttattctccgacgcgtaaagaagttgagcatgcgcacgaggtgattgccgccgctgaagaggctgagtctcgcggtctgggcgtcgtttcactcaacggcaaaatgattgacggcccgattatcgaccacgcgcgcaaagtggtggcgctgtcggcttccggtattcgtgattaa

SEQ ID NO: 9914 - DNA, 822 bp, Salmonella typhi
  CDS (1)...(822)
atgcatgaagcacaaatccgcgtcgccattgccggcgccggtggccgcatgggacggcagttaatccaggccgccatggcgatggaaggtgttcagctgggtgccgcgctggagcgcgaaggctcttccttgctgggcagcgatgctggcgaactggcgggggcgggaaagtccggcgtgatcgttcaaagcagccttgaggcggtaaaagatgattttgacgttttcatcgattttacccgtccggaaggcacgttgacgcatctggcgttttgccgccagcatggtaaagggatggtgattggtactaccggctttgacgacgccggtaaacaggccattcgtgaggcgtcgcaagagattgcgatcgttttcgccgcaaactttagcgtcggcgttaacgtcatgctcaagctgctggagaaagccgcgaaggtaatgggcgactatagcgatattgaaattattgaagcgcaccaccgccataaagtggatgcaccgtcggggacagcgctggcaatgggcgaggcaatcgccggggcgctggataaagatctgaaggactgcgcggtctactcgcgtgaaggttataccggcgagcgcgtaccgggaacgattggctttgcaaccgttcgggcgggcgacatcgtcggcgaacataccgcgatgtttgccgatattggcgagcgcgtagagattacgcataaagcttccagccgcatgacgtttgcaaatggcgcgttgcgatcggcgttatggctaaaaacgaagaaaaatgggctatttgacatgcgggatgtgctggggctggatgtattatag

SEQ ID NO: 9915 - DNA, 1272 bp, Salmonella typhi
  CDS (1)...(1272)
atggcgctgtgcttatccggcctacataccgcaaaaaatgccaggagaaaaacgatgaatcatttaccaatgccaacctttggtcctcttgctggggtacgcgttgttttttcagggatcgaaatcgccggtccgttcgccggacagatgttcgccgaatggggcgccgaggttatctggattgaaaacgtcgcatgggccgataccatccgcgtacagcctaactacccgcagctctcacgccgcaacctgcacgccctgtcgctgaatattttcaaagatgaaggtcgggaagcgtttctgaaactgatggaaaccaccgatattttcattgaagccagtaaaggcccggcctttgcccgccgtggtattactgatgaagtgctgtgggaacataacccgaaactggtcattgcccacctttccggcttcggccagtatggtaccgaggagtacaccaatcttccggcgtataacaccatcgcgcaggcattcagtggttatctgatccaaaacggcgacgttgaccaaccgatgccagccttcccgtataccgccgattacttctccgggatgaccgcgacgacagccgcgctggcagccctgcacaaagtacgcgaaacgggtaaaggtgaaagcatcgatatcgccatgtacgaagtgatgctgcgcatgggtcagtatttcatgatggactacttcaacggcggcgaaatctgtccacgtatgacgaaagggaaagacccctactacgccggttgcggcctgtataaatgcgccgatggttacatcgtcatggagttggtcggcatcacgcaaatcaacgagtgttttaaagatattggcctggcgcacattctcggtacgccggaagttccggaaggcacgcagctcatccatcgcgtggaatgcccttacggcccgctcgtcgaagagaaactggacgcctggctggcagcacataccatcgccgacgttcaggcgcgttttgctgagctgaatatcgcctgtgcgaaggtgctcaccattccggaactggaaggtaacccgcagtacgttgcccgcgaatcgattactcagtggcaaacaatggacggtcgcacctgtaaagggccgaacatcatgccgaaatttaaaaacaacccggggaaaatctggcgtggcatgccatcacacggcatggataccgccgccattctgaaaaacattggttatagcgaagcagatattaaggaactggtcggcaaaggcctggccaaagttgaggattaa

SEQ ID NO: 9916 - DNA, 480 bp, Salmonella typhi
  CDS (1)...(480)
atgatcagtctgattgcggcgttagcggtggatcgcgtcatcggtatggaaaacgccatgccgtggaacctgcctgccgatctcgcatggtttaaacgtaacacgttaaataaacctgtcgtcatgggacgtcacacctgggagtccatcggacgccccttaccgggacgtaaaaatattattatcagcagccagccgggcaccgacgatcgcgtgcagtgggtgaagtctgtcgatgaggcgattgccgcttgcggcgatgcgccggaaattatggtcattggcggcgggcgcgtgtacgagcagttcctgccaaaggcgcagaagctttatctgacgcatattgatgcggaagtcgaaggcgatacccattttccggattatgaaccggatgactgggaatcggtattcagtgagtttcacgatgccgacgcgcagaattctcacagctattgtttcgagattctggagcgtcgttaa

SEQ ID NO: 9917 - DNA, 822 bp, Salmonella typhi
  CDS (1)...(822)
atgaataatcgagtccatcagggccatttagcccgtaaacgcttcgggcaaaactttctcaacgatcggtttgtgatcgacagtattgtttctgctattaatccgcaaaaaggccaggcgatggttgaaatcggccccggtctggcggcgctgacggagccggtcggcgaacgactggataagctcacggtcattgaacttgaccgcgatctggcggcgcgtttgcaaacccatccgtttttagggccgaagctgactatttatcagcaggacgccatgaccatgaactttggcgaactgtctgcgcagttgggccagccgctgcgtgtgttcggcaatctgccctataatatctccaccccgctgatgttccatctctttagctatactgatgccattgccgacatgcactttatgttgcaaaaagaagtggtaaatcgtctggttgcagggccgaacagcaaagcgtatggtcgtttaagcgtgatggcgcaatattactgtcaggtgatcccggtgcttgaagtgccgccatccgccttcacgccgccgcccaaagtggactccgccgtggtgcgtctggttccacacgcaacgatgccttacccggttaaagatattcgcgtgttgagccgtattaccaccgaggcctttaaccagcgccgtaaaacgatccgtaatagtctcggcaatctttttagcgttgagacgttgacggaaatgggtattgacccggcaatgcgcgcggaaaatatctctgtcgcgcagtactgccagatggccaactatctgtcggaaaacgcgcctttgaaggagagttaa

SEQ ID NO: 9918 - DNA, 606 bp, Salmonella typhi
  CDS (1)...(606)
atggcagagaaatttacccagcataccggcctggttgtcccactggatgccgccaacgtcgataccgatgcaattatccctaaacagtttttgcagaaggttacgcgcaccggttttggcgcccatctgtttaacgactggcgtttcctggacgaaaagggccaacagccaaatccggaattcgtgttgaactttccggaatatcaaggcgcgtcgatactgttggcgcgggaaaactttggctgcggctcttcacgcgaacacgcgccgtgggcgttgaccgattacggttttaaagtggtgatcgcgccaagcttcgccgacatcttctacggcaacagtttcaataaccaactgctgccggtgaagttaagcgacgaacaggtcgatgagctgtttacgctggtgaaagccaatccgggcattaaatttgaagtggatctggaagcacaggtggtgaaagcaggcgataagacctacagttttaaaatcgacgacttccgccgccactgcatgttgaacggtctggacagcatcgggctgacgctgcagcacgaagacgcgattgccgagtacgaaaataaacaaccggcatttatgcggtaa

SEQ ID NO: 9919 - DNA, 1401 bp, Salmonella typhi
  CDS (1)...(1401)
  misc_feature (1)...(1401): n = A,T,C or G
atggccaaaacgttatacgaaaaattatttgatgcccacgtggtctttgaggcgccaaacgaaacgccgctgctgtacatcgatcgccacctggtacacgaagtgacctcgccgcaggcgtttgacggtctgcgcgcgcaccatcgtccggtacgtcagccggggaaaaccttcgccacgatggatcacaacgtctcgacgcagactaaagacattaatgcttctggtgaaatggcgcgtatccagatgcaagagctgattaagaactgtaacgagttcggcgtcgagctgtatgacctgaatcacccatatcanggcatcgtccatgtgatggggccggaacaggncgttaccctgccgggtatgancatcgtctgcggcgactctcacaccgctacncacggcgcgtttggcgcgttggcnttcggcatcggcacttctgaggtagaacatgtactggcgacgcaaaccctgaaacaggggcgcgctaaaaccatgaagattgaagtcacgggcaacgccgcaccgggcattaccgccaaagacatcgtgctggcgatcatcggtaaaactggtagcgccggcggcaccggacacgtggttgaattttgcggcgacgctatccgcgcgctgagtatggaaggccgcatgacgctgtgcaatatggcgattgagatgggcgccaaagccggtctggtcgccccggatgaaaccactttcaactacgtaaaagggcgtttgcacgcgccgaagggccgcgattttgacgaagccgtcgagtactggaaaacgctgaaaaccgatgacggcgcgacctttgatactgtcgtcaccctgcgagcagaagagatcgcgccgcaggtgacctggggcactaatccgggccaggtgatttccgtcaccgacatcatccccgatcccgcctcttttagcgatccggttgagcgcgccagcgccgaaaaagcgctggcttatatgggcttacagccgggcgtaccgttaacagacgttgctattgataaagtctttatcggctcttgtaccaattcgcgtattgaagatttgcgcgcggcggcggaagtcgccaaagggcgcaaagttgcgcctggcgtgcaggcgctggtggtgccgggttcaggtccggtgaaagcgcaggcggaagcggaaggtctggacaagatctttatcgaagcaggatttgaatggcgcttaccaggctgttccatgtgcctggccatgaataatgaccgcctgaacccgggcgagcgctgcgcctccaccagcaaccgtaactttgaaggtcgtcagggccgcgggggtcgcacgcatttagtcagcccggcgatggccgccgctgccgccgttaccggccacttcgccgatattcgcagcatcaaataa

SEQ ID NO: 9920 - DNA, 522 bp, Salmonella typhi
  CDS (1)...(522)
gtggttaagcaaaacggagaggacctgatgatgcgccggattttatcggtattactggaaaacgaatctggggcgttatcgcgggttatcggcctcttttcgcaacgcggatataatattgaaagcctgaccgttgcgccgacagacgatccgacgttgtcgcgcatgactatccagacggtaggcgatgaaaaagtgcttgagcaaattgaaaagcaactgcacaagctggttgatgtgctgcgcgtcagcgagctgggacagggagcgcacgttgagcgggaaatcatgctggtgaaaatccaggccagcggctacggacgggaagaggtgaagcgtaatacggaaattttccgtggtcagattattgacgttacgccaacgttgtataccgttcaactggcgggcaccagcgataaactggatgcttttctggcctcgctgcgcgatgtggcgaaaattgttgaagtggcgcgttcaggcgtcgtcgggctttcgcgcggcgataaggttatgcgctga

SEQ ID NO: 9921 - DNA, 1041 bp, Salmonella typhi
  CDS (1)...(1041)
  misc_feature (1)...(1041): n = A,T,C or G
atgaaacgacctggtatcaacaggtcaaggaagatatcgacgctgaacagtcagctaccgaaacgttatcggagcggctgcaggacttgtctctataagatgatggaaaattttaaacacactacggtactgttggatgaagccgttaatgggctgaatattcgtccggatggtatctatattgatggcacatttggtcgcggcggccactcgcgcctgatcctctcgcaactgggcgaagaggggcgcttgctggcgatcgatcgcgatccgcaggcgatcgccgttgcgcagaccattaatgatcctcgcttctccatcattcatggacctttttccgcgctggctgattatgtcgccgagcgcgagcttaccggcnagattgacgggatccttctcgatcttggcgtctcttctccgcagcttgacgatgcggagcgcggtttttcatttatgcgcgacggtccgctggatatgcgaatggacccgacgcgcggccagtctgccgccgagtggttacaaacggcggaggaggcggatatcgcctgggtgctgaaaacattcggcgaggagcgttttgccaaacgtattgctcacgccattgttgagcgcaatcgcgaacagccgatgacccgcaccaaagagctggcggaagtggttgcggcggcgaccccggtaaaagacaaattcaaacatcccgcgacccgtaccttccaggcggtgcgcatctgggtaaacagtgaactggaggagatagagcaggcgctaaaaagctcgctcagcgtactggcctcaggcgggcggctttcaatcatcagtttccactcgctggaagaccgtattgtgaaacgctttatgcgtgagcaaagccgcggtccgcaggtaccggcgggattaccgatgacggaagcgcagctcaaaaaactgggcggtcgtgagttacgagcgttaggcaagttgatgccgggtgaaaaagaggtagctgaaaatcctcgggcccgtagttcagttctgcgtatcgcagagaggacgaacgcatga

SEQ ID NO: 9922 - DNA, 1368 bp, Salmonella typhi
  CDS (1)...(1368)
gtgcctttacgattctattttgtgcagaaacgctcaccgccatacgctggtgattgcccctctcatctgtgctaccctacgcgccatttcgttttcacggtccctggctggaactatcatccggctcgcgtcactgtttgtgagaggttactccgcatgactgaatctacatttccgcaatatccccgtttagtcctcagcaaagggcgagaaaaatctttactccgccgccacccatgggtcttttccggcgccgtatcccgtctggaaggcaaagccaacctcggtgaaactatcgatatcgtcgaccatcagggaaagtggttagcacgcggcgcctggtcgccagcctcccagatccgcgcgcgcgtctggacatttgataaaacagaatccattgatattgcgtttttcacccgccgcctgcgccaggcgcagcagtggcgcgactggctggcgaaaaaagacggtctggatagctatcgtctgatcgccggtgaatccgatggcctgcctggcgtcactatcgatcgttttggtcattttttggtgctgcaactgctcagcgccggggccgaatatcaacgcgccgcattaattagcgctctgcaaacatgctatccggattgcgctatttacgatcgcagcgacgtcgccgtgcggaaaaaagaagggatggcgctgacgcaaggcccggtcactggcgaactgccgcctgcgcttttgccaattgaagaacacggtatgaaattgctggtcgatatacagggcggccacaaaaccggttattatcttgatcagcgcgacagtcgtctggtgacgcgccgctacgtagaaaatcagcgggtactgaactgcttctcttataccggcggttttgccgtgtcggcgttaatgggtggttgtcgccaggttgtcagcgtggatacctcacaggatgcgctggatatcgccaggcaaaacgttgaactgaaccaactggacttgagcaaagccgaattcgtgcgcgacgacgtgtttaagttgctgcgcgcttaccgtgaacacggcgaaaaattcgacgtcatcatcatggacccgcccaaattcgtcgaaaataaaagccagttaatgggcgcctgccggggctataaagacattaacatgttagcgattcaactgctcaatccgggcggcatactgctgacattctcttgctccggactgatgaccagcgatttatttcagaaaatcattgccgatgccgcaatagatgccggtcgtgatgtacaatttatagagcagttccgtcaggccgccgatcacccggtgatcgccacctacccggaagggctgtatctgaaagggtttgcctgtcgcgtcatgtaa

SEQ ID NO: 9923 - DNA, 294 bp, Salmonella typhi
  CDS (1)...(294)
atgagtattcgtccgttacatgatcgtgtgatcgtcaaacgtaaagaagttgagtccaaatctgctggcggcatcgtactgaccggttccgcagcgggtaaatcaactcgtggcgaaatcatcgctgtcggtaagggtcgcatcctggacaacggtactgtacagccgctggacgtgaaagttggcgacatcgttatttttaacgatggctacggtgtgaaatctgaaaagatcgacaatgaagaagtgttgatcatgtctgaaagcgacattctggcaattgttgaagcgtaa

SEQ ID NO: 9924 - DNA, 1290 bp, Salmonella typhi
  CDS (1)...(1290)
atgaagggtactgttttcgccgttgcgttaaaccatcgcagccagcttgatgcctggcaagaggctttctctcagcctccctataatgcgccgcctaaaaccgcagtgtggttcatcaagccgcgtaatacggtgattcgtcacggcgaacccattccttatccgcagggagaaaaggtactgagcggcgcgacagtggcgctcattgtggggaaaaccgccagccggatacgccctgaagcggcggcggactatatcgccgggtatgcgctggctaacgaggtcagcctgccggaagagagcttttatcgcccggcgattaaagcgaaatgtcgcgatggcttttgcccgctgggtgaaatggcgccgctgagtgatgtggataatctcaccattatcactgaaatcaacggacgagaagcggaccactggaatactgccgatttacagcgtagcgccgcacaactgcttagcgcgttaagtgagttcgctacacttaaccctggcgatgcgatcttacttggtacgccgcagaatcgcgttgcgctgcgtcccggcgatcgggtgcgtattctggcgaaaggtttacccgcgctggaaaatccggttgtcgcagaagatgaattcgcccgccaccagacgtttacgtggccgctgtcagcgacgggaacgttatttgcgctggggttgaactacgccgatcacgccagcgagctggcatttacgccgccgaaagagccgctggtatttatcaaagcgccaaacacctttaccgaacatcaccaaacgtcggtgcgcccgaacaacgtcgaatatatgcactacgaagccgagctggtcgtggtgattggcaaaacggcgcgtaaggtgagcgaagccgaagccatggagtatgtggccggttacaccgtctgtaacgactacgcgatccgcgactatctggaaaactactaccgtccgaatctgcgggtaaaaagccgcgacggcctgacgccgataggcccgtggattgtggataaagaggcggtttctgatccgcacaacctgacgttacgcacctttgtcaacggtgagctgcggcaggaagggacgaccgccgatctgatcttcagcatcccgttcctgatttcttatctgagcgaatttatgacgttgcaaccgggcgacatgattgccaccggtacgccgaaagggctgtccgatgtggtgccgggggatgaagttgtcgttgaagtagaaggcgtgggtcgcctggttaaccgaatcgtcagtgaggagagcgcaaaatga

SEQ ID NO: 9925 - DNA, 852 bp, Salmonella typhi
  CDS (1)...(852)
atgggcaagttagcgttagcagcaaaaattacccacgtgccgtcgatgtatctttctgaactgccaggaaaaaatcacggttgtcgtcaggcagccattgatgggcatattgaaattggcaagcgttgccgcgaaatgggcgttgacaccattatcgtattcgacacccactggctggtgaatagcgcttaccacattaattgtgccgaccatttccagggcgtctataccagcaacgaattgccgcactttattcgcgacatgacctatgactatgacggtaatccggcgctcggccatctgatcgccgacgaggcggtcaaactgggcgtgcgcgccaaagcgcacaacatcccgagcctgaagctggagtatggcacgctggtgccgatgcgctacatgaacagcgacaagcacttcaaagtggtctccatctcggcgttctgcactgtgcatgattttgccgacagccgcaaactgggcgaagccattctcaaggcgattgagaaatatgacggtaccgtagcggtattcgccagtggttctctgtcgcaccgttttattgacgaccaacgggcggaagaggggatgaacagctacacccgcgagttcgatcatcaaatggacgagcgcgtggtcaagctgtggcgcgaaggcaaattcaaggagttttgcaccatgttgccggagtacgccgactactgctacggcgaaggcaacatgcacgacacggtcatgctactgggaatgctggggtgggacaaatacgacggcaaggtggagttcatcaccgacctgttcgccagctccggtaccggccaggtaaacgctgttttcccgctgcctgcgtaa

SEQ ID NO: 9926 - DNA, 381 bp, Salmonella typhi
  CDS (1)...(381)
atgccgcactttattgctgaatgtactgaaaatattcgcgagcaggctgatttaccaagcctgttcagcaaggtaaacgaggcgctggccgccaccgggattttccccatcggcggtatccgcagtcgcgcccactggctggatacctggcagatggctgacggtaagcatgattacgcgtttgtgcatatgacgctgaaaatcggcgccgggcgcagcctggagagccgtcaggaagtcggcgaaatgctgtttgggctgattaaagcccacttcgccgacctgatggagaaccgctatctggcgctgtcgtttgagattgccgagttacatccaacgctcaattacaaacaaaacaacgtacacgcgttatttaaatag

SEQ ID NO: 9927 - DNA, 915 bp, Salmonella typhi
  CDS (1)...(915)
gtgccgcaatcagccctcaagagcaggaactatatggagcctcaacccccacgtcttaaacccggaaaaatccttgacactctgggtgctatgcaaaaaagcctgacacgtgcctcccagcgtattgcgcaatatattttagccttccccagacaggtgacacagtcatctattgccgatttgtcgcgcgacacacaggccggagaagccacggttattcgcttttgtcgcaccctgggctataaaggttttcaggattttaaaatggacctggccattgaacttgccactaccgagtctgatgacagtagtcctctactggatgccgaagttagcgaatccgacgatgcccacgccattggtttaaaattgcagaacaccattagtaatgtattatctgaaacgctaaatctgcttgatatgcaacaggttctcggtgtcgtggacgccctacgtcactgtcactcagtttatatctttggtgtgggctcatcggggatcacggcgctggatatgaaacacaagctaatgcgtattggtttacggggcgatgcggtaagcaataaccattttatgtacatgcaggctacgctattaaaagcaggcgatgtcgcgatgggtgtcagtcactcgggcacatcgccagaaacagtgcattcactccgattggcccgacaggctggcgccaccacagtcgccattacccataatctgggttctccattatgtgaagaggccgatttttgcctgatcaatggtaatcggcaaggaatgttgcagggtgactcgatcggtacgaaagccgcgcagcttttcgtctttgacctgctctatacccttcttgtacagtcctcgccggaacaggcccgagaaagcaaattacggacaatgaatgccctggacatgacaaaataa

SEQ ID NO: 9928 - DNA, 1080 bp, Salmonella typhi
  CDS (1)...(1080)
  misc_feature (1)...(1080): n = A,T,C or G
atgcaagcggcaacagtcgtcattaaccgccgcgctctgcgacacaacctgcaacgtctgcgtgaactggcgcctgccagtaagctggttgcggtggtgaaagcgaacgcttatggacacggtcttctggagaccgcgcgaacgctccctgatgctgatgcttttggcgtggcgcgtcttgaagaggctctacgtctgcgagcgggcgggattacgcagcctatcctgctgctggagggttttttcgacgccgccgatttgcctaccatttccgcgcaatgtctgcataccgccgtacataatcaggagcagcttgccgccctggaggcggtggagctggcggagccggtaacggtctggatgaagctggataccggtatgcatcgtctcggcgtgcgtcccgaagaggcggaggcgttctaccagcgtctgacgcactgtaaaaatgtacgccagccggtgaatatcgtcagccattttgcccgtgcggatgagccggaatgcggcgctaccgaacatcagctcgacatttttaatgccttctgtcagggtaaacccggtcagcgctctattgccgcgtctggcggtatcctgctgtggccgcagtctcactttgactgggcgcgtccgggcatcattttgtatggcgtatcgccgctggagcacaaaccttgggggccggattttggttttcagccggtgatgtccttaacttccagtttgatcgcggtgcgtgaccacaaagcgggcgaaccggtgggctacggcgggacatgggtgagtgagcgcgacacgcgcctgggcgtggtggcgatgggttatggcgatggctacccacgagcggcgccttccggtacgccagtactggtcaatggtcgtgaagtcccgattgtcgggcgggtggcgatggatatgatttgcgtggatttggggccaaacgcgcaggataacgcgggcgatccggtggtcttatggggtgaangtctgccggttgaacgtatcgctgaaatgacaaaagtaagtgcttacgaacttattacgcgcctgacctcaagggtggcaatgaagtatattgattaa

SEQ ID NO: 9929 - DNA, 870 bp, Salmonella typhi
  CDS (1)...(870)
atgctgaccgacacatctacccggcttaataaatatatcagtgaaagcggcatctgttcgcgtcgcgaggcggaccgttttatcgaacagggcaatgtctttatcaacggcaaacgcgccgccattggcgatcaggtggtcgccggggatgttgttaaagtaaatggtcggttgattgagccgcgagaagcggatgatttagtgctgattgcgctgaataaaccggttggcattgtcagtaccactgaagacggcgaacgcgacaatattgtcgattttgtgaaccacagcaaacgtatcttcccgattggtcgtctggataaagactcgcaggggctgatatttctgactaaccacggcgatctggtcaataagattctgcgtgccggtaacgatcacgaaaaagagtatctggtgacggtggataaaccgattaccgacgagtttattcgcggtatgggcgctggcgtgccgattctgggtaccgtcaccaaaaaatgtaaggtgaaaaaagaggcgccgtttgtctttcgcattaccctggtgcagggattaaaccgtcagatccgtcgtatgtgtgaatactttggttatgaagtgacgaaactggagcgtacgcgcattatgaacgtcagcctgagcgggattccgctgggcgagtggcgcgatctgacggacgatgagctgatcgatctgtttaaattgattgagggttcctcttccgaagccaaaccaaaggccaaagcgaagccgaagaccgcgggtattaagcgaccggtcgtggcgatcgaaaaaagcaatgagaaagcgcgcccggcatcaagcggtaagcgctttacctcgccgggacgaaagaagaaaggacgttaa

SEQ ID NO: 9930 - DNA, 1416 bp, Salmonella typhi
  CDS (1)...(1416)
  misc_feature (1)...(1416): n = A,T,C or G
atggcaggaaataaacccttcaacaaaccacagactgatgcccgcgaccgcgatccgcaggttgccgggataaaagtgccgccgcactcgattgaagcggaacagtcggtgttgggcggtttaatgctggataacgagcgctgggacgatgtggccgagcgcgtggtggcggaagatttctatacccgcccgcatcgccatatctttacggagatggggcgcttgcaggaaagcggcagtcctatcgacctgattacgctcgcggaatcgctggagcggcagggccaactggacagcgtcggcggtttcgcctatctggcggagctgtctaaaaacacgccaagcgcggcgaatatcagtgcttatgcggacattgtgcgcgaacgcgccgtggtccgcgatatgatcgcggtggcgcatgaaattgcggacgccggttacgatccacaggggcgcaatagcgacgaactgctggatctggcggagtcgcgcgtcttccagatcgcggaaaaccgggccaacaaagacgaaggtccgaaaagcatcgaccagattctcgacgccaccgtggcgcgtattgagcagttgttccagcaaccgcacgatggcgttacaggcgtggataccggctatcaggatctcaataaaaagacggcaggattacagcgttcggatttgattatcgtcgcggcgcgtccctccatgggtaaaaccacttttgcgatgaacctctgcgaaaatgcggcgatgttgcaggataaaccagtactgatcttcagcctggagatgcccggcgaacagatcatgatgcgtatgctggcctcgctgtcccgcgtcgatcagacacgtattcgtaccggtcaactcgatgatgaagactgggcgcgaatctccggcacgatgggcattctgctggagaaacgcaatatgtatattgacgactcctcaggtcttacgccgacagaagtccgttcgcgcgcgcggcgtattttccgcgaacatggcgggttaagtctgattatgatcgactacctgcaattgatgcgtgtgccgtcgctttctgataaccgtactctggaaatcgccgaaatttctcgctcgttgaaagcgctggcgaaggaactccaggtgccggtcgtggcgctatcgcagcttaaccgctccctggaacaacgcgcggataaacgtccggtgaactccgacctgcgtgaatccggctctattgaacaggatgccgacttaattatgtntatctaccgtgatgaggtttatcacgagaacagcgacttaaaaggcattgctgaaattattattggtaagcagcgtaacggtcctatcggtacggttcgtctgacgttcaatggtcagtggtcgcgcttcgataactatgcgggaccgcaatacgatgatgagtaa

SEQ ID NO: 9931 - DNA, 1047 bp, Salmonella typhi
  CDS (1)...(1047)
  misc_feature (1)...(1047): n = A,T,C or G
gtgaatggagttaccgagatagtgattgggtcgaaagattaccacatttcttttggaggaagcatggcaacgcgtattgaatttcacaagcatggtggtccggaagtgcttcagaccgtggagtttacgccaacggaaccggcggaacacgaaatccaggttgagaacaaagccattggtatcaacttcatcgacacctatatccgtagcggactctatccgcccccgtcgttgcctgcgggcctgggaaccgaagctgcgggtgtggtcagtaaagtcggcagcggcgtggagcacattcgcgtgggcgatcgcgtcgtctacgcgcagtcaacgcgcggcgctaacagtgccgtccataacatcgccgcagataaagccgcgattttgcctgacgccatgtctttcgaacaggcggcaatctctatactcaagggantgaccgtnttttacctgttgcgcaaaacctatgaagtgaaacccgacgaacccttcctgtttcatgccgctgcgggcggcgtcggtctgatcgcctgccaatgggcgaaagcgctgggcgcgaagcttatcggtaccgtcggtagcgcgcaaaaagcgcagcgggcgctggacgccggcgcctggcaggtgattaattaccgtgaggagagcattgtcgaacgggtaaaagagatcaccggcggcaaaaaagtccgcgtggtctatgactccgtggggaaagatacctgggaagcctcactggactgcctgcaacgtcggggactgatggtcagtttcggcaatgcgtccggccccgtcaccggcgtgaatttaggtattctgaatcagaaaggttccctgtatgccacgcgaccttcactacaggggtatattacgacgcgtgaagaactgaccgaagccagcaatgaattgttctcattgatcgccagcggcgtgattaaagttgatgtggctgaaaatcaacgctatgcgttaaaagatgcccgtcgcgcgcatgaggtgctggaaagccgggccacacagggctcaagcctgctgattccgtaa

SEQ ID NO: 9932 - DNA, 213 bp, Salmonella typhi
  CDS (1)...(213)
atgatgaataaagacgaagccggcggtaactggaaacagtttaaaggtaaaatgaaagaacaatggggcaaactgaccgatgacgatatgaccgttatcgaaggtaaacgcgaccaactggtaggtaaaatccaggagcgttacggttaccagaaagatcaggcggaaaaagaggttgttgactgggaaacccgtaacaactatcgctggtaa

SEQ ID NO: 9933 - DNA, 1131 bp, Salmonella typhi
  CDS (1)...(1131)
gtgaaagtactgactgtatttggtacacgaccggaggccattaagatggcgcctctggtccatgcgctggaaaaagatcctcatttcgaggccaaagtatgcgttactgcgcagcatcgggagatgcttgatcaggtattaactcttttttctattgtgcctgattacgatctcaacattatgcagccgggacaggggttgacggaaattacctgccgaattctggagagattaaagccgatcctggcagattttaaacctgatgtggtgctggttcatggagataccaccactacgattgctaccagcctggcggctttctatcaacgaattccggtagggcacgtagaagccgggttgcgaaccggcgatctctattccccctggccggaagaggcaaaccgcacgctgaccggacatctggcgatgtaccactttgcgccgacggaaaactcgcggcagaatctgttgcgggagaacattccggatgagcgcatttttgtcactggcaataccgttattgacgcgctgatctgggtacgcgatcgcgttctgacgagcgatacattacaggctgaactggccgagcagtatcctttcctcaacgcgaataagaagatgattttggtgaccggtcatcggcgtgaaagctttggtcagggctttgagcatatctgccaggcgctggcggaaattgccgccgcgaaccagaatgtgcaaattgtctatccggtgcatctcaatcccaacgtcagcgaacctgtcaaccgtatcctcggccatgttgaaaacgtggtactgattgagccgcaggactacttaccttttgtctggctgatgaatcacgcctggctcattctgaccgattccggcggtattcaggaagaagcgccgtcattaggtaagccggtattggtcatgcgtgaaaccacagagcgtccggaagccattaccgctggtacggtaagactgatcggcacggactcccggcgcattgtggcggaagttatgcgtctgctgcacgacgaaaatgaatatcaaaccatgagccgcgcccataatccttatggtgacgggcaatcatgcgcgcgcattttacaggcgttaaaaagttatcgggtatcgttatga

SEQ ID NO: 9934 - DNA, 1332 bp, Salmonella typhi
  CDS (1)...(1332)
atggatgaccctgccataccattcacaacattaagttcgagatttaccccaagtttaagaactcacaccattatgaatcttaccgaattaaagaatacgccggtttctgagctgatcactctcggcgaaagtatggggctggaaaacctggcccgtatgcgcaagcaggacattatttttgccatcctgaagcagcacgcaaagagtggcgaagatatctttggcgacggtgtgctggagatattgcaggatggatttggtttcctccgttctgcagacagctcctacctcgccggtcctgatgatatctacgtttcccccagccaaatccgccgtttcaacctccgcactggtgataccatttctggtaagattcgcccgccgaaagaaggtgaacgctattttgcgctgttgaaagttaacgaagttaactacgacaaaccggaaaacgcccgtaacaaaatcctctttgagaacttaaccccgctgcacgcaaactctcgtctgcgtatggagcgtggtaacggttctaccgaagacttaacggcgcgcgttctggatctggcttcgccgatcggtcgcggccagcgcggtctgattgtcgcgccgccgaaggcgggtaaaaccatgctgctgcagaacatcgcgcagagcatcgcgtataaccacccagactgcgtgctgatggtgctgctgattgacgaacgtccggaagaagtaaccgagatgcagcgtctggtgaaaggcgaagtggttgcctctacctttgacgaaccggcatcccgccacgttcaggttgccgaaatggttatcgagaaggcgaaacgtctggttgaacacaagaaagacgtcatcatcctgctcgactccatcacccgtctggcgcgtgcctacaacaccgtggtgccggcttccggtaaagtactgaccggtggtgtggatgctaacgccctgcatcgtccgaagcgcttcttcggcgcggcgcgtaacgtggaagagggcggtagcctgactatcatcgcgacggcgctaatcgataccggttccaagatggacgaagttatctacgaagagtttaaaggcaccggtaacatggagctgcatctctcgcgtaagatcgctgaaaaacgtgtcttcccggctatcgactacaaccgttccggtacccgtaaagaagagctgctcaccactcaggaagagctgcagaaaatgtggatcctgcgtaaaatcatccatccgatgggtgagattgacgcgatggaattcctcattaacaaactggcgatgaccaaaactaatgacgactttttcgagatgatgaagcgctcataa

SEQ ID NO: 9935 - DNA, 1476 bp, Salmonella typhi
  CDS (1)...(1476)
atggctaactactttaatacactgaatctgcgccagcagctggcgcagctgggtaaatgtcgctttatgggccgcgacgaattcgccgacggcgcgagctacctgcagggtaaaaaagtggtcatcgtcggctgtggcgctcagggtctgaaccagggcctgaacatgcgtgactccggtctggatatttcctacgccctgcgtaaagaagctattgctgagaagcgcgcctcctggcgtaaagcgaccgaaaacggcttcaaagtaggcacctacgaagagctgatcccgcaggctgacctggtggttaaccttacgccggacaaacagcactccgacgttgtacgttctgtacagccgctgatgaaagacggcgcagcgctgggttactcccacggcttcaacatcgtcgaagtgggcgagcagatccgtaaagacatcaccgtggtgatggtggcaccgaagtgtccgggcaccgaagtacgtgaagaatacaagcgtggcttcggtgtgccaacgctgatcgccgttcacccggaaaacgatccgaaaggcgaaggtatggcgattgctaaagcctgggctgcggccaccggcggtcaccgtgcgggcgtactggaatcttctttcgtggcggaagtgaaatctgacctgatgggcgagcagaccattctgtgcggtatgctgcaggccggttctctgctgtgcttcgacaagctggtggcagaaggcaccgacccggcatacgccgaaaaactgattcagttcggctgggaaaccatcaccgaagcgctgaagcagggcggcatcaccctgatgatggaccgtctgtctaacccggcgaaactgcgtgcttacgcgctgtccgaacagctgaaagagattatggcgccgctgttccagaaacacatggatgacatcatctccggcgaattctcttccggcatgatggctgactgggcgaacgacgataagaaactgctgacctggcgtgaagagaccggtaaaaccgcgttcgaaaccgcgccgcagtttgaaggtaaaatcggcgagcaggagtacttcgataaaggcgttctgatgatcgcgatggtgaaagcgggcgttgagctagcgttcgaaaccatggtcgattccggcatcatcgaagaatccgcttactacgaatcactgcacgagttgccgctgattgccaacaccatcgcccgtaagcgcctgtacgaaatgaacgtggttatctccgataccgcagaatacggtaactacctgttctcttacgcttgcgtaccgctactgaaaccgtttatggcggaattgcaaccgggcgatctgggtagtgctatcccggaaggcgcggtagacaacgcacagcttcgcgacgtgaacgacgcgattcgtagtcatgcgattgagcaggtaggtaagaaactgcgcggctatatgacggatatgaagcgtattgcggtagcgggttga

SEQ ID NO: 9936 - DNA, 1851 bp, Salmonella typhi
  CDS (1)...(1851)
atgcctaagtaccgttccgccaccaccactcatggtcgtaatatggcgggtgcccgcgcgctgtggcgcgccaccggaatgaccgacagtgattttggcaaaccgattatcaccgtggtgaactcattcactcagtttgtgccgggtcacgttcatctgcgcgatctcggtaagctggtcgccgaacagattgaagcttccggcggtgtggcgaaagagttcaacactattgccgtggatgacgggatcgccatggggcacgggggtatgctctattcactgccgtcgcgcgagctgatcgccgactccgtggagtacatggtgaacgctcactgcgctgacgcgatggtgtgtatctccaactgcgacaaaatcaccccagggatgctcatggcctcgctgcgcctgaatattccggtgatctttgtctccggcggcccgatggaagccgggaaaaccaaactgtccgatcagatcatcaagctcgatctggttgatgccatgattcagggagcggacccgaaagtctctgacgatcaaagtaaccaggttgaacgctccgcctgtccaacctgcggctcctgctccggcatgtttaccgctaactccatgaattgcctgatcgaagcgctgggcctgtcgcagccgggcaacggctcgctgctggcgacccatgctgaccggaagcagttgttcctcaatgctggtaagcggattgttgaactgactaaacgctattacgagcaggatgacgaaagcgcactgccgcgtaacatcgccaacaaggcggcgtttgagaatgcgatgacgctggatattgcgatgggcggttcgaccaataccgttctgcatctactggcggcggcgcaggaagcggaaatcgacttcaccatgagtgatatcgacaagctgtcccgcaaggtgccgcagctgtgtaaagtggcgccaagtacccagaaataccatatggaagatgttcaccgtgccggcggtgtgctgggtattttaggcgagctggatcgcgccgggctgctgaaccgcaacgtgaaaaacgtattaggcctgacgctgccgcaaacgctggaacagtacgacatcacggttacgcaggacgaagcggttaaaaaaatgttccgtgctggccctgccggtatccgtactacccaggcgttctctcaggattgtcgctgggattcgctggatgacgaccgcgcagcgggttgcatccgctcgctggaatatgcctatagcaaagacggcggtctggcggtgctgtatggcaacttcgccgaaaacggctgcatcgtaaaaaccgcgggcgtggatgacagcatccttaaatttaccggtcctgtcaaagtttacgaaagccaggacgatgcggtagaggcgattctcggcggcaaagtagtggaaggcgatgtggtcgtaatccgctacgaagggccgaaaggcgggccgggaatgcaggaaatgctctatccgaccagtttcctgaagtcgatggggctgggcaaagcctgcgcgctcatcaccgatgggcgtttctccggcggtacttcgggtctttccatcggccacgtctcgccggaagcggccagcggcggcactattgcgctgattgaagatggcgacaccattgcgattgatatcccgaaccgcagcattcagttgcagttgagcgaggctgaaatcgccgcacgccgcgaggcgcaggaagctcgcggcgataaagcctggacgccgaaaaatcgtcagcgtcaggtttcgtttgccctgcgtgcctacgccagcctggcgaccagcgccgataaaggcgcggtgcgcgataaatcgaaactgggaggttga

SEQ ID NO: 9937 - DNA, 1647 bp, Salmonella typhi
  CDS (1)...(1647)
  misc_feature (1)...(1647): n = A,T,C or G
atgaacggggcacagtgggtggtacatgctttgcgagcgcagggggtgaaaaccgtatttggttatcctggcggcgcaattatgccggtttacgacgcgttgtatgacggtggtgtggagcatttgttgtgccgacacgagcagggtgccgcaatggcggcaatcggttatgcccgttctaccggcaaaaccggtgtttgtatcgccacctcgggccctggcgccactaacctgatcactggcctggcggatgcgttgttagattcggtccccgttgtcgcgatcacgggtcaggtttccgccccgttcatcggcaccgatgcgttccaggaggtggatgtgttanggctgtcgctggcctgtaccaaacacagcttcctgatgcagtcgctggcagagttgccgcgcatcatggcggatgcttttnaantcnccaacgctgacagtnccgnaccagttctggtggatatcccnaannatatccagttggccagcggtgagctagnaccntggtntactaccgtcgataacgaagcgactttcccgcaggctgatgtggaacaggcgcgccagatgctggaacaggcgaaaaaacccatgctgtacgtcggcggtggtgttggtatggcgaaggcggttccggcgctgcgtaaatttatcgcggtaacgcaaatgccagttacctgcacgctgaaaggtctgggggctgttgaagctgattatccgtactatctgggcatgctgggaatgcacggtactaaagcggctaatttcgcggtgcaagagtgtgatttactgatcgcagtgggtgcacgttttgatgaccgggtgaccggtaagctgaatacgtttgcgcctaacgccagcgtaatccatatggatatcgacccggcggaaatgaacaaactgcgtcaggcacacgtcgcgttgcagggcgatttaaattcgctgttgccggcattacagcaaccgctgaagatcgacgcatggcgtcagtcttgtgcagagctgcgcgcagaacacgcctggcgctatgaccatcctggcgagactatctatgcgccgttgttgttgaagcaattgtcggaacgcaaacccgcagacagtgtggtgacgacggatgtggggcagcatcagatgtggtcagcccagcatatgacttacacccgcccggagaacttcatcacttccagcggtctggggacgatgggattcggcttaccggcggccgttggcgcgcaggtagcgcgaccgaatgataccgttatctgtatctccggtgacggctccttcatgatgaatgttcaggagttgggcaccgtaaaacgcaagcagttaccgttgaagatagtcttactcgacaaccagcggttagggatggttcgacaatggcagcaactgtttttccaggagcgatatagcgaaaccaccctgaccgataaccccgatttcctcatgctggccagcgccttcggcattccaggccagcacattactcgtaaagaccaggttgaagcggcactcgacacgatgttggcaagcgaagggccgtacctgcttcacgtctcaatcgacgaacttgaaaatgtctggccgttggtgccgcctggcgccagtaactctgaaatgctggagaaattatcatga

SEQ ID NO: 9938 - DNA, 2157 bp, Salmonella typhi
  CDS (1)...(2157)
  misc_feature (1)...(2157): n = A,T,C or G
atgacccgcgccgcccccgatgtagaagaggtactcagtgagcgcgcgctaagccaatgggcgcaggccatcagccatgtcgccggtcattatcgcgttgcctgttctcccggttcaattcaggccaacgccccgtggtttaggggtaaaagcagaacgaccgccttaacgcagctcgcgcggcaggcgggtttatcctttcatgcgccggacatagacaaaacggcatttagtcagtggcgattgccgttggttgtcgagctccgngacgggcagttattggtcatcgaacatgttaatggcgaagatgcggtagacgtttttgtgattgaagaagagggtcagcgtaaccgcctgacgctcagcgagttattgccggagatcctctatgttgccgcgctacgcccgctatcggcgctcaaggatagccgcgtcgaccgctatatctcccgctttaaacccgactggatgcgcgagctggttctgcaggatattcgcccttatttaccggtaatggtcgccgcctttctgattaacgtgctgtctctggccgggattgtgttctctatgcaggtttacgatcgggtgatccccgctcagtcatatcctaccctgtacgtgctctccttcggcgtgctggtagcggtgctgttcggttttctgctgcgtgaagcgcgtacgcacattatggacgtgctcggtaaacgcgccgatatgcgcatttccgatcgggtattcggtcatgcgttaaggctgcgcaacagcgctatcccccgttccaccggcagttttatctcgcagttacgtgaactggagcagatccgcgagatgattacctcttcaacgctggcgaccattgtcgatctgcctttctttttcctgtttatgatagtcttggcgattattgccccaccgctggcatggatagcgcccgtggcggctctgctgatgatcctgccgggcgtcgcactgcaaaaaaaactggctgtcctcgccaaccaggccgcccacgaagcgacgctacgcaatgcggtcttggtcgaaagcgttcaggggctggaagatattaaactgatgcaggcggagaaccgctttcttcagcagtggaatagctatatccgtattaccggcgagtcgggtctacgcacccgcaaactcacgcaaaggcttatcagttgggggatgtcggtacaaagtctggtgtatgccgcagtgattatgttcggcgcgccgatggtcattgaaggcagtatgactaccggcgccgtggtcgccgcgtcgatgctcggctcacggatgatcgcgccaatggctaacctgtgcggcgtgctggcgcgctggcagcaggtgaaagcggcgaagatgggtctcgacaacattatgcaactgcccactgagacacagcatgacgatagcctgatacaccgcgacatcctccacgggcattacctctttgaaaacgctcagtttcgttaccataacgacgatcaacgcataccgctgcgcctcgtgcgtctggagatcatgccaggcgagcggattgcgatactggggcgtaacggtgcgggtaaatccacacttttacaggcgatggcgggcggcctggagatgattcagggagatgcccggcttgataatctcagcttgtcgcacatcgatatggcggatttacgccgcaacatcggctttcttagccagaacgcgcggcttttcttcggcaccctacgagagaacctgacgctcggcgcgccgcacgccaacgatgaacagatttttgacgcgctcgaagtcagcggcggcgccgtcttcgtcaggcggctggcaaaagggttggatcatcccattatggagggtggtaacggcctgtccggcgggcagcgtcagtccctgttgctggcgagaatgctgctgcgctcccccaatattgtgctacttgacgaacccagcgcctcgctggacgagcatacggaacgagagtttattcagcggttacatcagtggcttggcaaccgtaccctggtcgtcgcaacgcaccgggtaccaatactggagctggttgagcgtgtcgttgtcctgaaagaaggacaactggtgatggacgcgccaaaagcgcaggcgcttaacgcggatcggatgcaaagtcaccgtcgggagtag

SEQ ID NO: 9939 - DNA, 954 bp, Salmonella typhi
  CDS (1)...(954)
  misc_feature (1)...(954): n = A,T,C or G
atgtatacgaagattattggtactggcagctatctgcccgaacaagtgcggactaacgccgatttggaaaaaatggttgagacctctgacgagtggattgtcactcgtacaggtattcgtgaacgccatatcgccgcgccgaatgaaactgtcgcgacgatgggctttaccgctgcgaatcgcgcgattgagatggcggggatcgataaagaccaaattggcttgattgtggtagcgaccacatcagcaacgcatgcatttccaagcgcggcatgtcagattcaaagtatgctcggtattaaaggttgcccggcgtttgatgtcgcggcagcgtgcgcaggtntcacntacgcgttaagtatcgccgaccagtacgttagatccggcgtggttagacacgcgctggtggtcggttccgatgtattagcccgcacttgcgatcctggcgatcgcggtacgatcattattttcggcgatggcgcaggcgcgnccgtactgagcgcttctgaagaaccgggtattatctccactcatcttcatgccgatgncngttacggtgaattactgaccntgccgaatgccgatcgtgtaaatccggataacccgatttacctgacgatggcgggtaatgaagtctttaaagtggcggtcactgaactggcgcatattgtcgatgagacgctggcggctaataacctggatcgctcagaactcgattggctggtgccgcatcaggctaacctgcgtatcattagcgcgacagcgaaaaaactcggcatgtcgatggacaatgtcgtcgtcacgctggacaggcacggcaatacctccgcggcttctgtgccgtgcgcgctggatgaagccgtgcgtgacgggcgaattaaagccggtcagctggtattgcttgaagccttcgggggtggattcacctggggctccgcgctgattcgtttctag

SEQ ID NO: 9940 - DNA, 576 bp, Salmonella typhi
  CDS (1)...(576)
atgaaaaaaaacctgctgggattcaccctcgcatccttgttattcacgaccggttccgccgtggcggcggagtataaaattgataaagaaggccaacatgcgttcgtcaatttccgcatccagcatctgggctacagctggctatacggcacctttaaagatttcgacggcacgttcacttttgacgaaaaaaatccgtcagcagacaaagtgaatgtgaccattaacaccaatagcgtcgacactaaccatgccgaacgtgacaaacacctgcgtagcgcggagtttcttaatgttgcgaaattcccgcaggcaaccttcacctctaccagcgtgaaaaaagagggcgatgaactggatattaccggcaatctgacgctcaatggcgtgactaaaccggtgacgctggaagcgaagctgatgggccagggcgacgatccgtggggcggtaagcgcgcgggctttgaggccgaaggaaaaattaagctgaaagatttcaatataactaccgatctcggcccagcctcacaagaggtggagcttatcatctcagtagaaggcgttcagcagaagtaa

SEQ ID NO: 9941 - DNA, 1053 bp, Salmonella typhi
  CDS (1)...(1053)
atgccagtgttacacaaccgcatctctaatgacgagctgaaagccaaaatgctggcggaaagcgagccgcgtacgacaatttctttttataaatatttcactatcgcctcgccgcaacagacgcgggacgcgttgtatcaggtgtttacggcgttggacgtttttggtcgcgtttacctggcgcatgagggcatcaatgcgcaaatcagcgtgccgcaaagcaaggttgagacctttcgtcaacagctttatacgttcgaccccgcgctggacggggtgcgtttaaatatcgcgctggaggatgacggaaagtcattttgggtgctgcgtatgaaagttcgcgaccgtatcgtcgctgacggtattgacgatccgagttttgacgccagtaatgtcggcgattatctgaaggcggcagatgtgaatgcgatgctggacgatcctgacgcggtctttattgatatgcgcaaccactatgagtatgaagtcggccatttcgaaaatgctctggaaatcccggcggatacgtttcgtgaacagttgccaaaagcggttgaaatgctgcgggaacatgcagataaaaagatagtgatgtactgtaccggcggtattcgttgtgagaaagccagcgcctggatgaaacacaacggtttcaataaagtctggcatattgagggtggcatcattgagtacgcccgtcgcgcgcgcgagcaggggcttcccgttcgctttatcggcaaaaactttgtatttgatgagcgaatgggcgagcgcatctcggatgaggttatcgcgcattgccatcagtgcggcgtgtcctgcgatagccataccaactgcaaaaacgacggttgccatctgctgtttatccagtgtccgcagtgcgccagtaaatttaacggctgctgtagtgaacaatgctgtgaagagttggccttgccggaggaagaacagcgccgacgtcgcgcgggtcgtgagaacggcaacaaaatttttaataaatcgcggggtcggcttaatagcaaactgagcattcccgatccggctgagtaa

SEQ ID NO: 9942 - DNA, 1029 bp, Salmonella typhi
  CDS (1)...(1029)
atgacccattccctaaaaccctggaataccttcggcattgatcattgtgcaaagcacatcgtatgcgctgaaaacgaacaacaactactgagcgcctggcagcaagcaactcgtgagggactgccggttatgatcctgggtgaaggaagcaacgtcctgtttctggaaaattacgccggcaccgtgatccttaaccgcctgaaaggcattgaggtgaatgaaaccgcggacgcctggcacctacacgtcggcgcaggcgaaaactggcatcagctggttcgctatgcgctggacaacaacatgcccggcctggagaatctggcgctcatccctggctgcgttggttcctcgcctatacagaatattggcgcgtatggcgtagaactacatcgcgtctgcgactacgttgactgcgttgaactggaaacgggaaaacgtctgcgtttgtccgcggcggaatgccgtttcggctatcgtgacagtatcttcaaaaatgaatatcaggatcgcgttgcgatcgtcgcggtgggtctgcgtttgtcaaagcaatggcagccggtgttgacctatggcgatcttactcgtctggacccgaaaacggtcaccgcgcaacaggtgtttgatgctgtatgccatatgcgcaccacaaaattgccggatcctaaagtgaatggcaatgcgggcagcttttttaaaaatcccgttgtcgcagccgatatcgctatggaactgttagaacgatttcccaacgcgccgcattaccctcaggcagacggctcagtgaagctggcggcaggctggctgatagatcaatgtcagttgaaaggcgtcaccattggcggcgctgcggtgcatcgccaacaggcgctggtattgattaatgcgaatgatgcgacaagtaaagatgtggtggcgctggcgcatcatgtccggcaaaaagtgggtgaaaaatttaatgtctggctggagcctgaggttcgctttattggtcagttcggagaggtgaacgctgtggagagcattgcatga

SEQ ID NO: 9943 - DNA, 636 bp, Salmonella typhi
  CDS (1)...(636)
atgtatcagcctgatttcccaaccgtgccgttccgcctcgggctttacccggtggtggacagcgttgcatggattgaacgcctgctggaggcgggcgtgcgcaccatccagttgcgtatcaaagataagcgcgatgaagaggtggaagccgacgttatcgccgccatcgcgctggggcgttgttatgacgcccgcctgttcatcaatgattactggcgtctggcaattaagcacaacgcctacggtgtacatttgggccaggaagatctcgaaaccactgacctgaaggcgattcaggcggcggggttacgcctgggcgtatcgacccacgatgatatggagatagacatcgcactcgccgctaagccttcttatatcgcgctgggtcatgtattccccacgcaaaccaagcagatgccttccgccccacaggggctggcgcagctggcgcggcatattgaacgactggcggattatcccaccgtcgctatcggcggcatcagccttgaacgcgctccggcggtactagcgaccggcgtcggcagtattgccgtggtcagcgccattactcaggctgccgactggcgcgccgctaccgcgcagttactggcaatcgcgggagtgggcgatgaatga

SEQ ID NO: 9944 - DNA, 4224 bp, Salmonella typhi
  CDS (1)...(4224)
  misc_feature (1)...(4224): n = A,T,C or G
gtgaaagatttattaaagtttctgaaagcgcagactaaaaccgaagagtttgatgcgatcaaaattgctctggcttcgccagacatgatccgttcatggtctttcggtgaagttaaaaagccggaaaccatcaactaccgtacgttcaaacctgagcgtgacggccttttctgcgcccgtatctttgggccggtaaaagactacgagtgcctgtgcggtaagtacaagcgcctgaaacaccgtggtgttatttgtgagaagtgcggcgttgaagtgacccagaccaaagtacgccgtgagcgtatgggccacatcgagctggcgtctccgactgctcacatctggttcctgaaatcgctgccgtcccgtatcggtctgctgctcgatatgccgttgcgtgatatcgaacgcgtactgtacttcgaatcttatgtggttatcgaaggcggtatgaccaacctggaacgtcaacagatcctgactgaagagcagtatctggacgcgctggaagagttcggtgacgaattcgacgcgaagatgggtgcggaagctatccaggccctgctgaagagcatggatctggagcaagagtgtgaaactctgcgcgaagagctgaacgaaaccaactccgaaactaagcgtaaaaagctgaccaagcgtatcaaactgctggaagccttcgtacagtctggcaacaagccagagtggatgatcctgaccgttctgccggttctgccgccagatctgcgtccgctggttccgctggatggtggtcgtttcgccacgtcagatctgaacgatctgtatcgtcgcgtgatcaaccgtaacaaccgtctgaaacgtctgctggatctggctgcgccggacatcatcgtacgcaacgaaaaacgtatgctgcaggaagcggtcgacgccctgctggataacggtcgtcgcggtcgtgcgatcaccggttctaacaaacgtcctctgaaatctttggccgacatgatcaaaggtaagcagggtcgtttccgtcagaacctgctcggtaagcgtgttgactactccggtcgttctgtaatcaccgtaggtccatacctgcgtctgcatcagtgcggtctgccgaagaaaatggcgctggagctgttcaaaccgttcatctacggcaaactggaactgcgaggactcgccaccactatcaaagccgcgaagaaaatggttgagcgcgaagaagctgtcgtttgggatatcctggacgaagtgatccgcgaacacccggtactgctgaaccgtgcaccaacactgcaccgtttgggtatccaggcatttgaaccggtactgatcgaaggtaaagctatccagctgcacccgctggtttgtgcggcatataacgccgacttcgatggtgaccagatggctgttcacgtaccgctgacgctggaagcccagctcgaagcgcgtgcgctgatgatgtctaccaacaacatcctgtctccggcgaacggcgaacctatcatcgttccgtctcaggacgtggtattgggtctgtactacatgacccgtgactgtgttaacgccaaaggcgaaggcatggtgctgactggcccgaaagaagctgagcgtatctatcgcgcaggtctggcctctctgcatgcgcgcgttaaagtgcgtatcactgaatatgaaaaagatgaaaacggcgaattcgttgcgcacaccagcctgaaagacacgaccgttggtcgcgccattctgtggatgatcgtaccgaaaggtctgcctntctccatcgtcaaccaggcgctgggcaagaaagcgatctccaaaatgctgaacacttgctaccgtattctgggcctgaaaccgaccgttatttttgcggaccagacgatgtacaccggctttgcttatgcagcgcgttcaggtgcgtccgttggtattgatgacatggtcatcccggagaaaaaacacgagatcatctctgaagcggaagccgaagttgctgagatccaggagcagttccagtctggtctggtaaccgctggcgaacgctataacaaagttatcgatatctgggctgcggcgaacgatcgtgtatccaaagcgatgatggataacctgcaaaccgaaaccgtgattaaccgtgacggccaggaagagcagcaggtttccttcaacagcatctacatgatggccgactccggtgcgcgtggttctgcggcacagattcgtcagctggcaggtatgcgtggtctgatggcgaagccagatggctccatcatcgaaacgccaatcaccgcgaacttccgtgaaggtctgaacgtactccagtacttcatctccacgcacggtgcgcgtaaaggtctggcggataccgcactgaaaaccgcgaactccggttatctgacccgtcgtctggttgacgtcgcgcaggatctggtggtgaccgaagatgactgtggtacgcacgaaggtatcctgatgaccccggttatcgagggtggcgacgtgaaagagccgctgcgtgaccgcgttctgggtcgtgtgacggcggaagatgtgctgaagccgggtacggcggacattctggttccacgcaacacgctgctgcacgaacagtggtgtgacctgctggaagcaaactccgttgacgccgttaaagtgcgttccgttgtatcctgcgataccgattttggtgtatgtgcgcactgctatggtcgtgacctggcgcgtggccacatcatcaacaaaggtgaagctatcggcgttatcgcggcacagtccatcggtgaaccgggtacacagctgacgatgcgtacgttccacatcggtggtgcggcatcgcgtgcggctgctgaatccagcatccaggttaagaacaaaggtagcatcaagctcagcaacgtgaagtcggttgtgaactccagcggtaaactggttatcacttcccgtaacaccgaactgaagctgatcgacgaattcggtcgtaccaaagagagctataaagtgccttatggcgcagtcatggcgaaaggtgatggcgagcaggttgccggcggcgaaaccgtggcaaactgggacccgcacaccatgccggttatcaccgaagtgagtggtttcatccgcttcactgacatgatcgacggtcagaccattacgcgtcagaccgacgaactgaccggtttgtcttcgctggtggttctggattcggctgaacgtactaccggtggtaaagatctgcgtccggcgctgaaaatcgttgatgctcagggtaatgacgttctgatcccgggtaccgatatgcctgcgcagtacttcctgccgggtaaagcgattgtacagctggaagatggcgtacagatcagttctggtgacaccctggcgcgtattccgcaggaatccggcggtaccaaggatatcaccggtggtctgccgcgcgttgccgatctgttcgaagcgcgtcgtccgaaagagccggccattctggcggaaatcgcaggtatcgtttccttcggtaaagaaaccaaaggcaaacgtcgcctagtgattacgccggttgatggtagtgacccgtacgaagagatgattccgaaatggcgtcagctcaacgtgttcgaaggggaacgtgtagaacgtggtgatgtgatttccgatggtccggaagcgccgcacgacattctgcgtctgcgtggcgttcatgctgtgacgcgttatattgttaacgaagttcaggatgtataccgtctgcagggcgttaagattaacgataaacacatcgaagttatcgttcgtcagatgctgcgtaaagcgaccatcgaaagcgccggtagttccgacttcctggaaggcgaacaggttgaatactctcgcgtcaagatcgctaaccgcgagctggaagcgaacggcaaagtgggggctaccttctcccgcgatctgctgggtattaccaaagcgtctctggcaaccgagtcgttcatctctgccgcatcgttccaggagaccacgcgtgtcctgaccgaagcagccgttgcgggtaaacgcgacgaactgcgcggcctgaaagagaacgttatcgtgggtcgtctgattccggccggtaccggttatgcgtaccaccaggatcgtatgcgccgtcgcgccgcgggcgagcagccagcaacaccgcaggtcactgcggaagatgcatctgcaagcctggcagagctgctgnacgcaggtctgggcggttctgataacgagtaa

SEQ ID NO: 9945 - DNA, 4143 bp, Salmonella typhi
  CDS (1)...(4143)
  misc_feature (1)...(4143): n = A,T,C or G
gtgatagcaacaggcattgcggaaagtatccattttccggtcaacaaaatagtgttgcacaaactgtcccccgcaggacagatgggtcgacttgtcagcgagctgaggaaccctatggtttactcctataccgagaaaaaacgtattcgtaaggattttggtaaacgtccacaagttctggatgtaccttatctcctttctatccagcttgactcgtttcagaagtttatcgagcaagatcctgaagggcagtacggcctggaagcagccttccgttccgtgttcccgattcagagctacagcggtaattccgagctgcagtacgtcagctaccgccttggcgaaccggtgtttgacgttcaggaatgtcagatccgtggcgtgacctattccgcaccgctgcgcgtaaaactgcgtctggtgatctacgagcgcgaagcgccggaaggcaccgttaaagacattaaagaacaagaagtctacatgggcgaaattccgctcatgaccgacaacggtacctttgttatcaacggtactgagcgtgttatcgtttctcagctgcaccgtagtccgggcgtcttctttgactccgacaaaggtaaaactcactcttcgggtaaagtgctgtataacgcgcgcatcattccttaccgtggttcctggctggacttcgaattcgatccgaaggacaacctgttcgtgcgtatcgaccgtcgccgtaaactgcctgcgaccatcatcctgcgtgcgctgaactacaccactgagcagatccttgacctgttctttgagaaagtcgtcttcgaaattcgcgacaacaagctgcagatggagctgattccagaacgtctgcgcggcgaaaccgcgtcgttcgatatcgaagctaacggcaaggtgtacgttgaaaaaggccgtcgcattaccgcgcgtcatatccgtcagctggaaaaagacgatatcaagcatatcgaagttccggttgagtacatcgcaggtaaagtcgtctctaaagactacgttgacgaatctactggcgagctgatctgcgcggcgaacatggagctgagcctggatctgctggctaagctgagccagtccggccacaagcgtatcgaaacgctgtttaccaacgatctggaccacggcccgtacatttctgaaacggtacgcgtcgatccaactaacgatcgtctgagcgcgctggtagaaatctaccgcatgatgcgccctggtgagccgccgacacgcgaagcggctgaaagcctgtttgagaacctgttcttctccgaagaccgctatgacctgtctgcggtgggtcgtatgaagttcaaccgttctctgctgcgcgacgaaatcgaaggttccggtatcctgagcaaagacgacatcattgatgtcatgaagaagctcatcgatatccgtaacggtaaaggcgaagtggatgatatcgaccacctcggcaaccgtcgtatccgttccgtcggcgaaatggcggaaaaccagttccgcgttggcctggtgcgtgtagagcgtgcggtgaaagagcgtctgtctctgggcgatctggataccctgatgcctcaggatatgatcaacgccaagccgatttccgccgcagtgaaagagttctttggttccagccagctgtctcagtttatggaccagaacaacccgctgtctgagattacgcacaaacgtcgtatctccgcactcggcccaggcggtctgacccgcgaacgcgcaggcttcgaagttcgagacgtacacccgacgcactacggtcgcgtatgtcctatcgaaacgccggaaggtccgaacatcggtctgatcaactccctgtccgtgtacgcacagactaacgaatatggcttccttgagacgccgtaccgtcgtgtggttgatggcgtggttactgacgaaattcattacctgtctgctatcgaagaaggcaactacgttatcgctcaggcgaactccaacctggatgacgaaggccactttgtagaagatctggtaacctgccgtagcaaaggcgaatccagcttgttcagccgcgaccaggttgactacatggacgtttccacccagcaggtggtctccgtcggtgcgtccctgatcccgttcctggaacacgatgacgccaaccgtgcattgatgggtgcgaacatgcaacgtcaggcggttccgactctgcgtgctgataagccgctggtgggtaccggtatggaacgtgctgtcgccgtcgactccggtgttactgcagtagctaaacgtggcggtactgttcagtacgtggatgcatcccgtatcgttatcaaagttaacgaagacgagatgtacccgggtgaagcaggtatcgacatctataacctgaccaaatacacccgctctaaccagaacacctgtatcaaccagatgccatgtgtgtctctgggcgagccggttgaacgcggcgacgtgctggcagacggtccgtccaccgacctcggtgaactggcgctcggtcagaacatgcgcgtggcgttcatgccgtggaacggctacaacttcgaagactccatcctcgtttccgagcgtgttgtccaggaagaccgtttcaccaccatccacattcaggaactggcgtgcgtgtcccgtgacaccaagctggggccggaagagatcaccgctgacatcccgaacgtgggtgaagctgcgctctccaaactggatgaatccggtatcgtttacatcggcgcggaagtgactggcggcgacattctggtcggtaaggtaacgccgaaaggtgaaacccagctgacgccggaagagaaactgctgcgtgcgatcttcggtgagaaagcgtctgacgttaaagactcttntctgcgcgtacctaacggtgtctccggtacggttatcgacgttcaggtctttactcgcgatggcgtagaaaaagacaaacgtgctctggaaatcgaagagatgcagctcaagcaggcgaaaaaagacctgtctgaagaactgcagatcctcgaagcgggcctgtttagccgtatccgtgcggtgttggtgtccggcggcgttgaagctgagaagctcgacaaactgccgcgcgaccgctggctggaactcggtctgaccgacgaagagaaacaaaatcagctggaacaactggctgagcagtatgacgaactgaaacacgagttcgagaaaaaacttgaagcgaagcgccgtaaaatcacccagggcgacgatctggcgccgggcgtgctgaagatcgtgaaggtctatctggccgttaaacgccgtatccagccgggtgataagatggcaggtcgtcacggtaacaagggtgttatctctaagatcaacccgatcgaagacatgccttacgatgaaaacggcacgccggtagacatcgtactgaacccgctgggcgtaccgtctcgtatgaacatcggtcagattctggaaacccacctgggtatggctgcgaaaggtattggcgacaagattaacgccatgctgaaacagcagcaggaagtcgcgaaactgcgcgaattcatccagcgtgcctacgatctgggcgccgacgttcgtcagaaagtcgacctgagcaccttcagcgatgatgaagtgctgcgtctggcagaaaacctgcgcaaaggtatgccgattgccacaccagtgttcgacggtgcgaaagaagcggaaatcaaagagctgctgaaactgggcgacctgccgacctccggtcagatcaccttgttcgatggccgtacgggtgaacagttcgaacgtccggtaaccgtcggttacatgtacatgctgaaactgaaccacctggttgatgacaagatgcatgcgcgttctaccggttcttacagcctggttactcagcagccgctgggtggtaaggcgcagttcggtggtcagcgcttcggggagatggaagtgtgggcgctggaagcttacggcgccgcctacaccctgcaggaaatgctcaccgttaagtctgatgacgtgaacggtcgtaccaagatgtataagaacatcgtggacggcaaccatcagatggaaccgggtatgccggaatccttcaacgttctgttgaaagagatccgctcgctgggcatcaacatcgaactggaagacgagtaa

SEQ ID NO: 9946 - DNA, 366 bp, Salmonella typhi
  CDS (1)...(366)
  misc_feature (1)...(366): n = A,T,C or G
atgtctatcactaaagatcaaatcattgaagcagtatccgctatgtcngtaatggacgttgtagaactgatntctgcaatggaagaaaaattcggtgtctccgctgctgctgctgtagctgtagctgctggcccggctgaagctgctgaagaaaaaactgaattcgacgtaattctganagctgctggcgctaacaaagttgctgttatcaaagcagtacgtggcgcaactggcctgngtctgaaagaagctaaagacctggtagaatctgctccggccgctctgaaagaaggcgtgagcaaagatgacgctgaagcactgaaaaaatctctggaagaagctggcgctgaagttgaagttaaataa

SEQ ID NO: 9947 - DNA, 531 bp, Salmonella typhi
  CDS (1)...(531)
  misc_feature (1)...(531): n = A,T,C or G
atgagttccggcanacatccaggagcaaagctaatggctttaaatcttcaagacaaacaagcgattgttgctgaagtcagcgaagtagccaaaggcgcgctgtctgcagtagttgcggattcccgtggcgtaactgtagatnaaatgactgaactgcgtanagcaggtcgtgaagctggcgtatacatgcgtgttgttcgtaacaccctgctgcgccgcgtcgttgaaggtactcagttcgagtgcctgaaagacacgtttgttgntcngaccctgattgcatactctatggnacacccgggcgctgctgctcgtctgttcaaagagttcgcgaaagcgaatgcaaaattngaggtcaaagctgcagcctttgaaggtgagctgatcccggcgtctcagatcgaccgcntggcaactctgccgacctacgaagaagcaattgcacgcctgatggcaaccatgaaagaagcttcggctggcaaactggttcgcacactggctgctgtacgcgatgcaaaagaagctgcgtaa

SEQ ID NO: 9948 - DNA, 705 bp, Salmonella typhi
  CDS (1)...(705)
  misc_feature (1)...(705): n = A,T,C or G
atggctanactgaccaagcgtatgcgcgtgatccgtgaaaaagttgatgcgaccaaacagtacgacatcaacgaagctattgccctgttgaaagagctggccactgctaaattcaacgaaagcgttgacgttgccgttaacctcggcatcgacgctcgtaaatctgaccagaacgttcgtggcgcgactgtactgccgcacggtactggccgttctgttcgcgttgccgtatttacccagggcccgaacgctgaagcagctaaagctgctggcgctgagctggtaggtatggaagatctggctgaccagatcaagaaaggcgagatgaacttcgaagttgttatcgcttccccggatgcaatgcgcgttgttggccagctgggccaggttctgggtccgcgcggcctgatgccaaacccgaaagtcggtaccgtaacgccgaacgttgctgaagcggttaagaacgctaaagcaggtcaggttcgttaccgtaacgacaaaaacggcatcatccacaccaccatcggtaaagtggactttgacgctgacaaactgaaagaaaacctggaagctctgctggttgcgctgaaaaaagcaaaaccgagccaggcgaaaggcgtgtacatcaaganagtnagcatctccaccaccatggntgctggcgttgccgttgatcaggctgntctgagcgcatctgcgaactaa

SEQ ID NO: 9949 - DNA, 1449 bp, Salmonella typhi
  CDS (1)...(1449)
atgcaacttaacgactctaccctgttccgccagcaggcctttatcgatggcgactggcgcgacgcgcgcggcggcgatgtcatccccgtgagcaaccccgccaacgggaaaccgcttggcaatgtgcccaaaatgggggcggaagagacgcgcgacgccatcaacgccgccaatcgcgccctgcccgcctggcgcgcgctcaccgccaaagagcgagccaatatcctgcgtcgctggttcaatctgatgatggaacatcaggacgatttggcgcgtctgatgacgctggaacagggcaaaccgctggcggaagcgaaaggcgaaattagctacgccgcctcgtttattgaatggttcgccgaagaggggaagcgtatctatggcgacacgattccaggtcatcagaccgataaacggctgctggtgattaaacagcccatcggcgtcaccgccgcgattaccccgtggaactttccctcggcaatgatcacccgtaaagccggccccgcgctggccgcaggctgcacaatggtactcaaacccgccagccagacgccgttttccgcgctggcgctggcggaactggcccagcgcgccggaattctcgcaggcgtatttaacgtcgttaccggttcggcaggcgatatcggcggcgagctgaccagcaacccgctggtacgcaaactgtcgtttaccggctcgacggagattggccgccagctaatggaacaatgcgccaaagacattaaaaaagtatcgctggagttgggcggcaatgcgccgtttatcgtctttgacgatgccgatctggataaagccgtcgagggcgcgctggcttcgaagtttcgcaacgccgggcagacctgtgtctgcgccaatagattgtatgttcaggacggcgtttacgatcgttttgcggaaaaactcaaccaggcggtaaataagctcgcggtcggcgacggcctgcaagccgacgtcgctatcgggccgctgattgatgaaaaagccgtggctaaagtccaggagcatatcgccgacgcgctggaaaaaggcgcccgcgtaattacgggcggtgaagcgcacaaattaggcggcaacttctttcaaccgaccattctggcggatgttcctgataacgcgaaagtcgccaaagaagagacattcgggccgctcgcgcctctgttccgcttcagcgacgaggcggatgtcatcaggcaggctaacgataccgagttcggcctggcagcctatttttatgcacgcgatttaagccgcgttttccgcgtcggcgaagcgctggaatacggcatcgtcggtattaataccggcattatctccaacgaagtcgcgcctttcggcggtattaaggcctccggattaggccgtgaaggttccaaatacggcatcgaagattatttagaaatcaaatatatgtgcatcggcctttaa

SEQ ID NO: 9950 - DNA, 1401 bp, Salmonella typhi
  CDS (1)...(1401)
  misc_feature (1)...(1401): n = A,T,C or G
atggggcaattgtcagaatcacatgcattagggggcgggctgaaatcacgccacgtcaccatgttatcgatcgccggcgtcatcggcgccagcctgtttgtcggttccagcgtggcgattgcggaggccggccctgcggtactgctggcctatctgttcgcaggacttttagtcgtcatgattatgcgaatgctggctgaaatggccgtcgccacaccggataccggttctttttccacctatgcggataaagcgatcggcccctgggccgggtataccatcggctggttatactggtggttttgggtgctggttattccgctggaggccaatattgccgccattattctgaattcatggataccgggtattccggtgtggctattttcattagtgattacgcttgccttaaccggaagcaatttattgagcgtcaaaaattacggtgaattcgaattctggctggcgctatctaaagtaattgccattctggcgtttatcgcgctgggcgcggcggcgattagcggtttttatccgtatgccgaggtaagcggtatttcccggctctgggatcacggcggttttatgcctaacggcttcggtgcggtgttaagcgccatgttgatcaccatgttctcttttatgggcgcggaaatcgtcactattgctgccgcggaatccgatacgccggataaacatatcgtacgcgccaccaattctgttatctggcgaatttccatcttttacctgtgttccatttttgtggtagtggcgctgatcccgtggaatatgccgggtctgaaaagcgtaggttcgtaccgttcggtactggagctgcttcatattccgcacgcaaaattcattatggactgcgtgattttattgtcggtgaccagttgtctgaactccgcattatataccgcctcccggatgctctattcccttagccgccgcggcgatgcgcctgcgataatgggaaaaactaaccgtagcaaaacgccctgggtggcggttctcctctctaccggcgcggcctttttaaccgttatcgtcaattattacgccccggcaaaagtgtttaaatttcttatcgacagttccggcgccatcgcgctgctggtctatctggtgattgcgatttcgcaattgcggatgcgtaaaattctgctggcgcagggcggagaaattaagttgaaaatgtggctttatccgtggctcacctggctggttatcggctttatctgctttgttctggtggtgatgctatttcgaccggcacagcaactanaagtcatttcaacggggctgttagggctgggcataataggtactgtccctattatgtctcgctggaaaaaactgataaggtggcaaaaagcccccctgcaaaacctacgttag

SEQ ID NO: 9951 - DNA, 2118 bp, Salmonella typhi
  CDS (1)...(2118)
  misc_feature (1)...(2118): n = A,T,C or G
atgcaggaaaccatggattaccacgccctgaacgcgatgctgaatctttacgataaagcaggccatattcagttcgacaaggaccagcaggcgatcgacgccttctttgccgcccacgtccgcccgcattccgtgaagtttgccagccagcatgaacgtctggagacgctggttcgggaagggtattacgatgacgccgtcctcgcgcgttacgaccgcgccttcgtcttccgcctgttcgagcacgcccacgccagcggctttcgcttccagacgtttcttggcgcctggaagttctataccagttacacgctgaaaaccttcgacggcaaacgttatctggaacactttgaagatcgggtgacaatggtggcgttgacgctggcgcagggtgacgaaacgctggccacccaactgaccgatgaaatgctttctggtcgctttcagcccgctaccccgacttttttaaattgcggtaaacagcagcgtggggaactggtctcctgcttcctgctccgtatcgaagacaatatggaatcgatcgggcgagcggtgaattcggcgctgcaactctccaaacgcggcggcggcgtcgcatttttactctccaatctgcgcgaggcgggcgcgccgatcaaacgcattgagaatcagtcttccggcgtgatcccggtgatgaaaatgctggaagacgcgttttcgtatgccaaccagcttggcgcgcgccaaggggccggcgcggtttatctccatgcgcaccatccggatattctgcgttttctggataccaaacgggaaaatgccgacgaaaaaatccggatcaaaacgctctctctcggcgtggtgatcccggacatcaccttccggctggcgaaagaaaacgcgcaaatggcgctcttttcgccctatgacatacaacgacgctacggcaaaccgtttggcgatatcgccattagcgaacggtacgatgaattaattgccgatccgcacgtgcgcaaaacctatattaacgcccgtgacttttttcaaacactggcggaaattcagttcgaatccgggtatctctacatcatgtttgaagatacggtaaaccgcgcgaatcctattgctggtcgcattaatatgagcaacctgtgctcggaaattttacaggtcaatagcgcctctcgttacgacgataaccttgactatacccacatcgggcatgacatctcctgcaatctcggctcgctgaatatcgctcacgtcatggattcaccggacattggccgtaccgtagaaaccgctattcgcggcctgacggcggtgtcggacatgagccatatacgcagcgtgccctcaatagccgccggtaatgccgcctctcatgccatcggtctgggccagatgaatctgcatggctatctggcgagggaaggtattgcctacggttcgccggaggcgttggatttcaccaatttctatttttacaccattacctggcatgccgtgcatacttcaatgcggctggcccgcgaacgcggcaaaaccttcgccggatttgcgcagtcgcgctatgccagcggcgactattttacgcagtatntacaggacgactggcaaccgaaaacggcgaaagtcagggcgctatttgcccgcagcggcattacgctgcccacacgcgaaatgtggctaaagctgcgcgacgatgtgatgcgctatggcatctataaccaaaatttgcaggcggtgccgccgaccggttcgatttcttacattaatcatgcgacctccagcattcatccgattgtggccaaaattgagattcgcaaagagggcaaaaccgggcgtgtgtattaccccgcgccgtttatgactaatgaaaacctggacatgtatcaggatgcttacgatatcggtccggaaaaaattattgatacctatgccgaggccacgcgccacgtcgatcaaggactgtcgctcaccctgtttttccccgataccgccacgacccgcgatatcaacaaagcgcagatctatgcctggcgaaaaggtattaagtcactgtattacatccgacttcgccagttggcgctggaaagtactgaaattgaaggctgcgtatcctgcgcgctataa

SEQ ID NO: 9952 - DNA, 1230 bp, Salmonella typhi
  CDS (1)...(1230)
atgaaaacctggacatgtatcaggatgcttacgatatcggtccggaaaaaattattgatacctatgccgaggccacgcgccacgtcgatcaaggactgtcgctcaccctgtttttccccgataccgccacgacccgcgatatcaacaaagcgcagatctatgcctggcgaaaaggtattaagtcactgtattacatccgacttcgccagttggcgctggaaagtactgaaattgaaggctgcgtatcctgcgcgctataaggaaagccatatgaaattatctcgtattagcgccatcaactggaacaagatccaggacgacaaagatctggaggtgtggaaccggctgaccagtaacttctggctgccggaaaaagtgccgttatcgaatgatattccggcctggcagacgctgagcgccgccgaacagcagctcaccattcgcgtgtttacgggtcttacgctgctcgacactatccagaacatcgcaggcgcgccgtcgttaatggcagatgccatcacgccgcatgaagaggccgtactgtcgaacatcagctttatggaagcggtacacgcccgctcttacagttctattttctccacgctgtgccagacgaaagaggttgatgccgcctacgcctggagcgaagaaaacccaccgcttcagcgtaaggcgcagattattttagctcattacgtcagcgatgaaccgctaaagaaaaagattgccagcgtctttttagagtcttttctgttctattccggcttctggttgccgatgtatttctccagccgcggtaagctcacgaacactgccgacctgattcgtttaatcattcgcgatgaagcggttcacggttattatattggctataagcatcagatagcgctacaaaaactatcggcaatcgagcgtgaagagttaaagcttttcgcgctggatttattgatggaactgtacgacaacgaaatctgctacacagaagcgttatatgcggaaaccggctgggttaacgacgtcaaagccttcttgtgctacaacgccaataaagccttaatgaacctgggttatgaggcgttatttccgccggagatggcagacgtgaatcccgcaatccttgccgcgctctcgccgaatgccgacgaaaaccatgatttcttttccggctcaggttcatcttatgtgatggggaaaacggtcgaaaccgaagacgaagactggaatttttaa

SEQ ID NO: 9953 - DNA, 531 bp, Salmonella typhi
  CDS (1)...(531)
atggatagttcgtttacgcccattgaacaaatgctaaaatttcgcgccagccgtcacgaagactttccttaccaggaaattcttttgactcgtctttgtatgcacatgcaaggcaagctcctggaaaaccgcaataaaatgctgaaggctcaagggattaacgagacgttgtttatggcgttgattacgctggagtctcaggaaaaccacagtattcagccgtctgaattaagctgcgcgctgggttcatctcgcaccaatgcgacacgcattgcagatgagctggaaaaacgcggctggattgagcgtcgtgagagcgataacgaccgccgttgcctgcatctgcaattaacggagaaaggccaggcatttttgcaagaagtgcttccgcctcagcatcattgtctgcatcaactctggtcatcacttagcacagccgaaaaagatcaacttgagcacatcactcgtaaactcctgacgcgtcttgatcaaatggagcaggaaggcactgttcttgaggcgctgcgctaa

SEQ ID NO: 9954 - DNA, 1215 bp, Salmonella typhi
  CDS (1)...(1215)
  misc_feature (1)...(1215): n = A,T,C or G
atgtngtctccgccccgccagtcaatgcggggcggtaaatttttgatatcgggggtcagaatgtatgctttaacncagggccggatctttaccggtcacgggattcttgatgaccatgcgcttgttgtcgctgatggcctgattgaccgcgtttgtccgatggccgagctgccgccgggaatagaacgacgctcattgaatggggccattctctcccccggttttattgatgtgcagctanacggctgcggcggagtgcagtttaacgatnccgcagaagcngtcagcgttgaaacgctggaaattatgcagaaagccaatgaaaaatcgggctgtactaactttctgccaacgcttatcactaccagcgacgaattgatgaaacagggtattcgcgtcatgcgcgagtatctggaaaaacatccgcaccaggcgctgggtctccacctggaaggcccctggcttaatctggtaaaaaaaggcacccataatcctgatntcgtgcgtaaaccagacgctgcgctggtcgatntcttatgcgataatgccgacgtcatcaccaaagtnactctcgcgccggaaatggtgcctgctgacgtaatcgctaaactggcgaatgcgggcattgtggtttccgcaggtcactccaacgcgacgttaaaagaggcaaaagcgggcttccgcgccgggattacctttgcgactcacctgtttaacgcgatgccgtacattacagggcgtgagccgggccttgctggcgctgttctggacgaagcggatatntattgcggcgttatcgccgatggtctgcatgtcgactacgccaacattcgcaatgccaaacgcctgaaaggcgacaaactttgtctggtgacagacgccaccgcaccggcgggggccaatattgagcagttcattttcgcaggtaaaacaatatactaccgcaatggactgtgtgtggatgaaaacggtacgttgagcggttcgtccttaaccatgattgaaggcgtacgcaacctggtcgcgcattgcggcatcgcgctggatgaagtgctgcgcatggcaacgctctatccggcacgcgctatcggcgttgataagcatctcggtagcattgcgccgagtaaagtcgccaacctgaccgcgttcacccacgattttaaaattatcaagaccatcgttaatggtgacgaggtcgttgacttgagtaagtga

SEQ ID NO: 9955 - DNA, 453 bp, Salmonella typhi
  CDS (1)...(453)
  misc_feature (1)...(453): n = A,T,C or G
atgactgacaannntaccgcattaaagaaggctggcctgaaagtaacgcttcctcgtttaaaaattctggaagttcttcaggaaccagataaccatcacgtcagtgcggaagatttatacaaacgcctgatcgacatgggtgaagaaatcggtctggcaaccgtataccgtgtgctgaaccagtttgacgatgccggtatcgtgacccgccataactttgaaggcggtaaatccgtttttgaactgacgcaacagcatcatcacgaccatcttatctgccttgactgcggaaaagtgattgaatttagtgatgactctattgaagcgcgccagcgtgaaattgcggcgaaacacggtattcgtttaactaatcacagcctctatctttacggccactgcgctgaaggcgactgccgcgaagacgagcacgcgcacgatgacgcgactaaataa

SEQ ID NO: 9956 - DNA, 1209 bp, Salmonella typhi
  CDS (1)...(1209)
atgagtagcgtagatattcttgttcccgacctgcctgagtccgtagcggacgcgaccgtcgccacctggcataaaaaaccgggcgatgcggttgttcgtgacgaagtgctggtagaaatcgaaactgacaaagtggtactggaagtaccggcatcagcggacggcattctggatgcggttctggaagaagaggggacgactgtcacctctcgccagatcctgggtcgcctgcgtgaaggcaacagcgcgggtaaagagaccagcgcgaaatctgaagagaaagcgtctacgccggcacagcgccagcaggcgtcgctggaagaacaaaacaacgatgcgctcagcccggcgatccgtcgcctgctggctgaacacaatctggaagccagcgccattaaaggcactggtgtgggtgggcgtctgacccgtgaagatgtggaaaaacatctggcgaaaggcgagtctaaagcacccgctgttgaacctgcagcacaacccgctctgggcgcgcgcggcgaaaaacgcgtgccaatgacccgcctgcgtaagcgcgtggccgagcgtctgctggaagcgaaaaattccaccgccatgctgacgaccttcaatgaagtcaacatgaagccgattatggatttgcgtaagcagtatggcgaagtgtttgaaaaacgtcatggtatccgcctgggctttatgtccttctacgtgaaagcggtagtggaagcgctgaagcgttatccggaagtgaacgcctctatcgacggcgatgacgtggtgtatcacaactactttgatgtgagcatggcggtgtctacgccgcgcggcctggtcacgccggtcctgcgtgacgtggatacgctgggcatggctgacatcgagaaaaaaattaaagaactggctgtcaaaggccgcgacggcaagctgaccgtagaagacctgaccggcggtaactttaccattaccaacggcggcgtattcggttcgctgatgtctaccccgatcatcaacccgccgcagagcgcgattctgggaatgcatgctattaaagacaggccgatggcggtggatggcaaggtggaaatcctgccgatgatgtacctggcgctctcttacgatcatcgcctgatcgatggtcgcgaatccgtgggcttcctggtcaccatcaaagagttgctggaagatccgacccgtctgctgttggacgtgtag

SEQ ID NO: 9957 - DNA, 2802 bp, Salmonella typhi
  CDS (1)...(2802)
atgcagaacagcgctttgaaagcctggttggactcttcttacctctctggttcgaatcagagctggatagaacagctctatgaagacttcttaaccgatcctgactcggtagacgctaactggcgtttgacgttccagcagttacctggtaccggagtcaaaccggatcaactccattcaaaaacacgtgaatatttccggcggcaggcgttggctggctcacgtcactcttctacgatttccgaccctgacaccaatgtgaagcaggttaaagtcctgcagcttatcaacgcttatcgtttccgtggccatcagcatgcaaacctcgatccgctgggactgtggaaacaagaacgcgtggcggatctggacccttctttccatgatttgaccgaggccgatttccaggaaaccttcaatgtcggctcctttgccagcggcaaagagacgatgaagctgggggagctgctcgacgcgctcaaacagacctactgcggcccgattggcgctgagtatatgcacatcaccagcaccgaagagaaacgctggatccaacagcgcatcgaatccggtcgtgcggcctttagcgctgacgagaaaaaacgcttcctgaacgaactgaccgccgctgaagggctggaacgttatctgggcgccaaattcccgggtgcgaaacgtttctcgctcgaggggggagatgcgctgatacctatgctgaaagagatggttcgccatgcgggtaacagcggcactcgcgaagtggtgctggggatggcgcaccgcggtcgtctgaacgtgctgatcaacgtactgggtaaaaaaccgcaggatctgttcgacgagtttgccggtaaacataaagaacatctgggtaccggcgacgtgaagtatcacatgggcttctcgtcagatatcgaaactgaaggcggtctggttcacctggcgctggcgtttaacccatcgcatctggaaattgtgagcccggtggtgatgggctccgtgcgcgcccgtctggaccgactggacgaaccgagcagtaataaagtgctgccgatcactattcacggcgacgccgcggtgaccggccagggcgtggttcaggaaaccctgaacatgtcgaaagcgcgcggttacgaagtgggcggtacggtacgtatcgttatcaacaaccaggtgggcttcactacctctaacccactggatgcgcgttcaacgccttactgcaccgatatcggtaaaatggtccaggcgccgattttccacgtcaatgcggacgatccggaagccgtcgcttttgtgacccgtctggcgctggacttccgtaatacctttaaacgcgatgtgttcatcgatctggtgtgctaccgccgtcacggccacaacgaagccgacgagccaagcgcaacccagccgctgatgtaccagaaaatcaaaaagcatccgacgccgcgtaaaatctacgccgacaagctggaagctgataaggtcgcaacgctggaagatgccaccgaaatggtcaacctctatcgcgatgcgctggatgcaggcgaatgcgtggtgaaagagtggcgtccgatgaatatgcactcgttcacctggtcgccgtatctaaaccacgaatgggatgaagcatacccgaacaaggtagaaatgaagcgtctgcaggagctggcaaaacgtatcagcaccgtgccggaagccattgaaatgcagtctcgcgtggcgaaaatttatggcgaccgtcaggcaatggcggcaggcgagaaattgtttgactggggcggcgcggaaaatctggcttacgccacgctggtcgatgaaggcattccggtgcgcctgtccggggaagactccggtcgcggcaccttcttccatcgtcatgcggtgatccacaaccagacgaacggctcaacgtatacgccgttgcagcatattcacagcggtcagggacagtttaaagtctgggactccgtgctgtctgaagaagcggtactggcttttgaatacggttatgccacggcggaaccacgtaccctgactatctgggaagcgcagtttggcgattttgccaacggcgcgcaggtagtgattgaccagttcatctcctctggcgagcagaaatggggccggatgtgcggtctggtgatgctgttgccgcacggctatgaagggcaggggccggagcactcctccgcgcgtctggaacgttatctgcaactttgcgccgagcagaatatgcaggtttgcgtaccgtccactccggcgcaggtctaccatatgctgcgccgtcaggcgctgcgcgggatgcgtcgtccgctggtggtgatgtcgccgaaatcgctgctgcgtcacccgctggcggtttccacgcttgatgaactggcgaacggttccttccagccggccattggcgaaattgacgagctggaccctaaagccgtaaaacgcgtggtaatgtgttctggtaaggtttattacgacctgctggaacaacgtcgcaaaaacgaccagaaagatgtcgctatcgtgcgcatcgaacagctctatccgttcccgcataaagcggtgcaggaagcgctgcaaccatacgctcacgtccatgattttgtctggtgccaggaagagccgctcaaccagggcgcatggtactgcagtcagcatcatttccgtgaagtgattccgtttggggccgctctgcgttatgcaggtcgcccggcctccgcctctccggcggtagggtatatgtccgttcaccagaaacagcaacaagatctggttaatgacgcgctgaacgtcgattaa

SEQ ID NO: 9958 - DNA, 870 bp, Salmonella typhi
  CDS (1)...(870)
atgtccgttttaattaataaagataccaacgttatctgccagggcttcaccggtagccaggggactttccactccgaacaggcgattgcttacggtacgcaaatggtcggcggcgtaacgccgggcaaaggcggcaccacgcatctgggtctgccggtgttcaacaccgtgcgcgaagcggtagaagctaccggtgcgaccgcatccgttatctacgtcccggcgccgttctgcaaagactccattctggaagcgatcgacgcaggcatcaaactgattatcaccatcaccgaaggtattccgacgctggatatgctgaccgtgaaagtgaagctggacgaagcgggcgtacgcatgatcggcccgaactgcccaggtgtgatcaccccgggcgaatgcaaaatcggcatcatgccgggtcacattcataagccgggtaaagtgggtatcgtttcccgttccggcacgctgacctatgaagcggttaagcagaccaccgactacggtttcggccagtccacctgcgtgggtatcggcggcgacccgattccgggctctaacttcatcgacattctgaaactgttccaggaagatccgcagactgaagcgatcgtgatgatcggcgagatcggcggcagcgcggaagaagaagcggcggcttatattaaagaccacgtgaccaagccggttgttggctatatcgcgggcgttaccgcgccgaaaggcaaacgtatgggccacgctggcgccatcattgccggtggtaaaggtaccgctgatgagaaattcgctgctctggaagcggctggcgtgaagacggttcgcagcctggccgatatcggcgaagcgctgaaagcaattataaaataa

SEQ ID NO: 9959 - DNA, 849 bp, Salmonella typhi
  CDS (1)...(849)
atggcgggacacagtctatggtcattaacggcaatattcggggttactatgaaattagcactgctgggacgtcaggcactgatgggagtaatggctgtagcgctggtggcgggaatgagcgcgaagagctttgccgatgagggtttgctgaacaaagttaaagaacgcggcacgctgctggtagggctggaaggtacctatccgccgtttagctttcagggcgacgacggcaaattaaccggttttgaagtcgatttcgccgaggcgttggcaaaacatctgggcgttaaagcgtcgttgaagccgaccaaatgggacggaatgctggcgtcgctggactctaaacgcattgatgtagtgataaaccaggtcacgatttcagacgtccgcaagaaaaaatatgatttctctacgccttatactgtctccggcgttcaggcgctggtgaaaaaaggcaatgaaggcacgatcaaaacggcggccgatctgcagggcaaaaaagtcggcgttgggctggggactaactatgaagagtggctacgtcaacatgttcagggcgtggatatccgcacctatgacgatgatcctacaaaatatcaggatctgcgcgtaggccgtattgacgcgattttagtcgatcgtctggcggcgttggatctggtgaaaaaaaccaaaggtacgctggccgtcaccggtgatgcgttttcgcgtcaggagtccggcgttgcgttacgtaaaggcaacgaagatttgctgaaggcggtagataatgccattgcggaaatgcaaaaagatggcaccttaaaagcgctctccgaaaaatggtttggcgctgacgtgacccaataa

SEQ ID NO: 9960 - DNA, 549 bp, Salmonella typhi
  CDS (1)...(549)
atgcaatttaatatccctacgttgctcacgctgtttcgcgtcatcctgattccattctttgtcgtggtgttttatttgccgttcgcctgggcgccgatggtcagcgcgctgattttctgtattgccgcgattaccgactggtttgacggctttctggcgcgacgctggaaccagagtacgcgtttcggcgctttcctcgaccccgtcgccgacaaggtgctggtggcgatcgccatggtgctggtcaccgagcattatcatagctggtgggtgacgttacctgcggcgacgatgatcgcccgcgaaattattatctctgctctgcgtgaatggatggcggagctgggcaaacgcagtagtgtagcggtctcctggatcggtaaagtcaaaactaccgcgcagatggtggcgctggcgtggctcttgtggcgtccgaatatctgggtagagtatgccgggatcgcgcttttctttgtcgcagcggtgctaacattgtggtccatgttgcaatatttgagcgctgcacgcggagatttgcttgatcagtga

SEQ ID NO: 9961 - DNA, 2139 bp, Salmonella typhi
  CDS (1)...(2139)
  misc_feature (1)...(2139): n = A,T,C or G
gtgtacangaagactnctgccggtnactggtgcccgaacgatcagaccgttctcgccaacgnacaggtgatcgacggctgctgctggcgttgcgncaccananttgagcgtaaagagatcccacagtggtttatcaaaatcaccgcttacgcagacgagctgttgcgcgatctggataagctggaccactggcctgataccgtaaaaacgatgcagcgcaactggattggccgctctgaaggcgtggaaatcaccttcgatgtgaagggttacgataacacgctgaccgtctataccacccgtccggatacctttatgggcgccacctacctggcagtggccgccggtcatccgctggcgcaaaaagcggcggcgaacaacgccgagctggcggcgttcatcgacgaatgccgtaacaccaaagtggccgaagccgaaatggcgaccatggagaaaaaaggcgtcgacaccggctataaagcgattcatccgttaactggcgaagagatcccggtctgggcggcaaactttgtcctgatggagtacggcactggcgcggtgatggccgttccgggtcacgatcagcgcgactacgaatttgcctccaaatacggtttgaccatcaagccggtgattctggccgctgacggttccgagccggatctttccgaacaggcgctgaccgaaaaaggcgtgctgtttaactccggtgagttcgacggtctggcctttgaagcggcgtttaacgccattgccgataaactggcggaaaaaggcgtcggcgaacgtaaagtgaactaccgtctgcgtgactggggcgtttcccgtcagcgttactggggcgcgccgatcccgatggtcaccctggaagacggcaccgtgctgccgacgccggaagatcaactgccggttattttgccggaagacgtcgtcatggacggcatcaccagcccgatcaaggccgatcctgagtgggcgaaaaccaccgttaacggtatgccggcgctgcgtgaaaccgacaccttcgacacctttatggaatcgtcatggtactacgcgcgttacacctgcccgcagtatcaggaaggaatgctggattcgaaagcggcaaactactggctgccagtcgacatctacatcggcggtattgaacatgccatcatgcacctgctctacttccgcttcttccataagctgatgcgcgatgcgggcatggtcacctctgacgagccggctaaacagttgctgtgccagggcatggtactggcggatgcgttctattatgtcggcgagaacggcgagcgtaactgggtttcgccagttgacgctatcgtcgagcgcgatgaaaaaggccgcatcgtcaaagcaaaagacgcagcgggtcatgagctggtctacactggcatgagtaaaatgtccaagtcgaaaaataacggtatcgacccgcaggtaatggttgaacgttatggcgcggatacggtacgcctgtttatgatgttcgcttctccggcggatatgactctggaatggcaggagtccggcgtagaaggcgcaaaccgctttattaaacgcgtctggaagctggtttacgaacacaccgctaaaggtcctgtcgcggcgctgaacgtcgatgcgctgagcgaagatcaaaaagcgctgcgtcgcgatgtgcataaaaccattgccaaagtgaccgatgatatcggccgccgtcagacgttcaacaccgccattgcggcgatcatggagttgatgaacaaactggcgaaagccccgcaggaaggcgaacaagaccgcgcactgcttcaggaagcgctgcaggccgtcgtgcgtatgcttaacccgttcaccccgcacgtctgctttaccttgtggcaggaactgggtggcgaaggcgatatcgacaacgcgccgtggccggttgccgacgagcaggcaatggtggaaaacaccacgctggttgtcgtgcaggttaacggtaaagttcgcggtaagatcaccgttgcggtggatgccaccgaagaacaggtgcgtgaacgtgcaggccaggaacatctggtggcaaaatatcttgatggcgttaccgtgcgtaaagtgatttacgttccgggtaaactcctcaatctggttgttggctaa

SEQ ID NO: 9962 - DNA, 741 bp, Salmonella typhi
  CDS (1)...(741)
atgtcaatagactggaactggggtatttttttacaggaagcccccttcggcaataccacctatctcggctggctatggagtggttttcaggtcaccgtagccctttcgattaccgcctggattatcgctttcctggtaggatctattttcggcattttacgtaccgttcccaaccgtttcctctccggactgggcacattgtacgtagaactgttccgcaacgtgccgctgatcgtgcaattcttcacctggtacctggtggtgcctgaactgttgccggaagatcttggcatgtggtttaaggcggaactcgatcccaatattcagtttttcctctcctcaatgatctgtctgggactgtttaccgccgcccgtgtttgcgaacaggtgcgcgccgcgattcagtctctgcctcgcggacagaagaacgcggcgctggcgatggggctaacgctgccgcaggcttatcgctatgtcctgctgccgaatgcctatcgcgttatcgtgccgccaatgacgtcagagatgatgaacctggtgaaaaactcggctattgcatcaaccatcggcctggtggatatggcggcgcaggcaggcaaactgttggattactcggcgcacgcctgggaatccttcaccgccattacgctggcctatgtgctgattaacgccgttatcatgctggtcatgagcctggttgaacgcaaagtccgcctgccgggcaacgtggggagcaaataa

SEQ ID NO: 9963 - DNA, 1659 bp, Salmonella typhi
  CDS (1)...(1659)
atggttaccagttcaaagtggcaatggccgatagtcgtcgtattattcaggtgcatgtcaggatcccggatgactcgccccagccaaaactggacgaataacagcaatagtggactaaaaatggcatttgcctcgttaattgaacgccagcgtattcgcctgctgctggcgttattattcggcgcctgcggaacactggctttctctccgtatgacgtctggcccgcagcgatagtgtcgcttatcgggctgcaggccttaacgtttaatcgccgcccgctccagtctgccgccatcggctattgctggggactcggacttttcggcagcgggattaactgggtttatgtcagtatcgcgcagtttggcggcatgccgggcccggttaacgtttttctggtggtgctgcttgcagcttatctctcgctgtataccggactgtttgccgggattttgtcgcgcctgtggccaaaaaccaactggctgcgcgtcgctatcgccgcgcctgcaatatggcaaatcaccgaatttttacgcggctgggtgctgaccggcttcccctggctgcaatttggctatagtcaggtcgacggcccgctaaaaggcctggcgccggtaatgggcgtcgaagcgatcaacttcctgctgatgatggtcagcggcctgttagcgctggcactggcgacgcggaactggcgtccgctggctgtcgccgtgattctgtttgctttgccctttccgctacgttatatccagtggtttacgctggaacctaccaaagcgacccaggtatcgctggtgcagggcgatattccgcagtcgctgaagtgggacgaaaaccagctactgaatacgctaaacatttatctcaacgaaactcgcccagagttaggcaaatcacagattattatctggcctgagtcggcgattccggatctcgaaatcaatcagcagcctttccttcgttcgctggacgagatgttacgcgaaaaaaatagcacgctgatcaccggtattgtcgatgcgcgtctcaataaacagaatcgatacgacacctacaatacgattattacgttgggcaaggataatccatacagttatgactcgcccaatcgctacaataaaaatcaccttgtaccctttggcgagttcgttccgctggagtctatcctgcgtccgctggcgccgttcttcgatctgcccatgtcctcctttagccgcggcccttatatccagccgcagttacatgcgcacgactataagctgacggcggcaatctgttatgaaattattcttggcgaacaggtgcgggataacttccgcccggacaccgactatctgctgacgatttctaacgacgcctggtttggtaagtccattggcccgtggcaacatttccagatggcgcggatgcgttcgctggagctggcgcgtccgttgctgcgcagtactaataacggtattacggcggtgattggcccgcagggcgaaattcaggcgatgatcccgcagttcacacgccaggtgctaactaccaaagtcacgccgaccaccggcctgacgccgtacgcacgaaccggcgactggacggtgtggttgattaccgtactgttcggctttggcgcgctggtgatgagcctgcgtcaacgccgcaaataa

SEQ ID NO: 9964 - DNA, 966 bp, Salmonella typhi
  CDS (1)...(966)
  misc_feature (1)...(966): n = A,T,C or G
atgagtaaacccattgtgatggaacgcggtgtaaaataccgcgatgccgataagatggctcttatcccggttaaaaatgtggtcacagagcgcgacgctctactacgtaaaccggaatggatgaaaataaaacttccggcggattctacccgtatccaaggcatcaaagccgcaatgcgcaaaaatggcctgcattctgtctgtgaggaagcgtcttgcccaaacctggctgaatgtttcaaccacggtaccgctacgtttatgatccttggcgccatttgcactcgccgctgtccgttctgtgatgtcgcccatggccgccccgttgcgccggatgcggaagagccgcagaaactggcgcaaacgatcgccgacatggcgctacgctatgtggtcatcacctctgtcgaccgtgacgatctgcgtgacggcggcgcccagcactttgctgactgcatcaccgccatccgcgccaaaagcccggagataaaaatagagaccctggtgccagacttccgtggacgtatggatcgcgcgctggatattcttaacgcgacgccgccggatgtgtttaaccacaacctggaaaacgtgccgcgtatttaccgccaggttcgtccgggcgccgattacaactggtcgctgaaattactggaacgcttcanagaagcgcacccggaaattccgacaaaatcnggtctgatggtgggcttangcganaccaatgcgganatcattgangtnatgcgcgacttacgccgtcacngcgtnaccatgctgacgcttggtcagtatctacagccaagccgccatcacctgccggtacagcgttatgtcagcccggaagaatttgacgagatgatagcagaagccctggcgatgggctttactcatgccgcctgttggccctttgtacgttcttcgtaccatgctgatctccatgccatatgcatggaagtgagatga

SEQ ID NO: 9965 - DNA, 852 bp, Salmonella typhi
  CDS (1)...(852)
  misc_feature (1)...(852): n = A,T,C or G
ctgctgtttatctctggctttgcggcgaatcaggcggtcattaccgccttaatgaaaaaaaatgaccggattgtggccgacaggttgagtcatgcttncntgctggaagccgctaatctgagtccggcgcagcttcgccgctttatccataacgatacgcagcatctgtcgcgtttactgcaatcgccctgcgtgggtcagcaactggtggtgacagaaggtgtatacagcatggacggcgacagcgcgccgctggcggaaatccagcacattgcccgcaggcatcatgcctggctgttggttgatgatgcgcacggcatcggcgtgactggcgatgaggggcggggcacctgctggcagcggggggtgaagcctgagttgctggtggtgactttcggtaaggggtttggcgtcagcggcgcagcggtgctctgctcggaaagcgtcgcagattatctgctgcaattcgcccgtcatctggtttacagcaccagtatgccgcccgcccaggcgcaggcgttaagcgcctcgctggcggtgatccgtagcgatgaaggtcgtgaacggcgcgaaaaactcgccgctctggttcagcgctttcgggccggcgttaacgcgtcccgatttacgctactgaatgcccatagcgccatccagccgttaatcgtgggcgataacagccgtgcattgcgcctggcggaggcgctgcgtcaacaaggatgctgggcgacggcgattcgtccgccgacggtgcctgtcggtacggcgcgcctgcgcttaacgttaacgcaggcgcatgaagcgtgcgatatagaccgtctgctggaggtgctgcatggcgcaggtgaataa

SEQ ID NO: 9966 - DNA, 1371 bp, Salmonella typhi
  CDS (1)...(1371)
  misc_feature (1)...(1371): n = A,T,C or G
atgttaaatagtgctatgagcgtagtgatccttgccgcaggtaaaggcacgcgcatgtattccgatattcctaaagtgctgcacacgctggcgggtaaacccatggtgcagcatgtcattgatgcagctactaaattaggggccgcacaggttcatctggtctatggccacggtggcgagttgttaaaacagaccctgaaagatgacaagctgaactgggtgcttcaggcggaacagttgggaacaggtcacgcaatgcagcaggccgcgcccttttttagcgacgatgaagatattttaatgctttacggcgacgtgccgctgatttcggttgaaaccttacagcgcctgcgcgatgccaaaccgcagggtggtattgggttattaaccgtgaagctggacgatccgagcggctatggccgtattacgcgtgaaaacggtaaagtgaccggcatcgttgaacataaagacgccactgatgaacagcgtcagatccaggaaattaacactggtattctgatcgccaacggcgcggacctgaaacgctggttgtctaagctgactaacaataatgcgcagggtgaatattacatcacagatatcatcgcgctggcttatcaggaaggacgggaaatcgccgcggtgcatccggctcgcatcancgaaacggacggcgtgaataaccgtctacagctttctcgtctggagcgtatttaccaggccgaacaggcggagaaactgctgttatccggcgttatgttgcgcgatccggcacgttttgatctccgcggcaccctttattgtggaatggatgtcgaaattgacgctaacgttatcatcgaaggttatgtaacgctcggtcaccgcgtgaagatcngcgcgggctgcattattaaaaacagcgttattggcnatgactgcgaaattagcccatacagcgtggnggaagatgcgcatctggaagcggcctgcaccatcggcccgtttgctcgcctgcgtcccggcgctgagctgttagcgggcgctcacgtcggcaattttgttgaaatgaaaaaagcgcgtctgggtaaaggttctaaagccggccatctgacctacctgggcgatgcggaaattggcgacaacgtgaatattggcgcggggaccatcacctgtaactatgatggcgcgaacaaattcaaaacggttattggcgacgatgtgtttgtcggctccgatacccaactggtggcgccggttactgttggtaaaggggccaccatcgccgcagggactaccgtcacccgtaatgtagccgacaatgaactggtattaagccgcgtgccgcaggtgcataagcaaggctggcagcgtccggtgaagaaaaagtga

SEQ ID NO: 9967 - DNA, 1830 bp, Salmonella typhi
  CDS (1)...(1830)
atgtgtggaattgttggcgctatcgcgcagcgtgatgtagctgaaatccttctcgaaggtttacgtcgtctggaataccgtggttacgactctgccggtctggccgtggtggatgcagaaggtcatatgacccgcctgcgtcgcctcggtaaagtccagatgctggctcaggcagcggaagaacacccgctgcatggcggcaccggtattgctcacactcgctgggcgacgcacggtgaaccttcagaagctaacgcgcatccgcatgtttctgaacacattgtggtggtgcataacggcatcatcgaaaaccatgaaccgctgcgtgaagcgttaaaagcgcgtggctataccttcgtttctgaaaccgacaccgaagtgattgcacacctggtaaactgggaactgaaacaaggtggtactctgcgagacgcgattttgcgtgcgatcccgcaactgcgtggcgcatatggcacggtgatcatggatacccgccatccggatacgctgctggctgcccgttcaggtagcccgctggtgattggcctgggtatgggcgaaaactttatcgcttctgaccagctggcgctgttgccagtgactcgtcgctttatcttccttgaagagggcgatatcgctgaaatcactcgccgttcggtaaatatcttcgataacaccggcgcggaagtaaaacgtcaggatatcgaatccaatctgcaatatgacgcgggcgataaaggtatttaccgccactacatgcagaaagagatctacgaacagccgaacgcgatcaaaaacacccttaccgggcgcatcagccacggtcaggtggatttaagcgagctgggaccgaacgccgatgatctgttgtcgaaggttgagcatattcagatcctcgcctgcggtacgtcttacaactccggtatggtttcccgttactggtttgaatcgctggcaggtattccgtgcgacgttgaaatcgcctctgaattccgctatcgcaaatctgccgtgcgccgtaacagcctgatgatcacgctctcccagtctggcgaaacggcagataccctggctggcctgcgtctgtcgaaagagctgggatatttgggctctctggccatttgtaacgtgccgggctcttcgctggtgcgtgaatccgatctggcgctgatgaccaacgcgggtacggaaattggcgtagcatctaccaaagccttcaccacccagttaaccgtgctgttgatgctggtggcgaaactgtctcgcctgaaaggtctggatgcgtccattgagcatgatatcgtgcatggcctacaggcgctgccgagccgtattgagcagatgctgtcgcaggacaaacgcatcgagctgcttgcagaagatttctctgacaagcatcacgcgttattcctcggtcgtggcgatcaatatccgattgcgctcgaaggcgcgctgaagctgaaagagatctcttacattcacgcggaagcctatgctgcaggcgagctgaaacacgggccgttggcgctgattgacgccgatatgccggtgattgtggtggcgccgaacaacgaactgctggagaaactgaaatccaacatcgaagaagttcgcgcgcgtggcggtcagttgtacgtcttctccgatcaggatgcgggttttgtgagcagcgacaacatgcacatcattgagatgccgcatgtggaagaggtcattgcgcctatcttctacaccgttccgctgcaactgctggcgtatcacgtggcgctgattaaaggcaccgacgttgaccagccgcgtaacttggcgaaatcggtgacggtagagtaa

SEQ ID NO: 9968 - DNA, 1542 bp, Salmonella typhi
  CDS (1)...(1542)
  misc_feature (1)...(1542): n = A,T,C or G
cagccgaatctggtgatcttccagcaagcggttgaatatctgattgtcgaaaacgatcgcgttgtcggcgccttgacccaaatggggctcaaattccgcgcgaaagcggtggtgctgaccgtcgggactttcctggacggcaaaattcatattggtctggataactacagcggcggtcgtgctggcgatccgccatccatcccgctgtctcgccgtctgcgtgagcttccgctacgcgtcagccgcctgaaaaccggcacaccgccgcgtattgatgcgcgtactatcgatttcagcgtgttggctcaacagcatggcgataacccgatgccggttttctcgtttatggggaatgcttttcagcatccgcaacaggtgccgtgttacatcacgcataccaatgagaaaacccatgacgtgattcgtaataacctcgatcgtagcccaatgtacgctggcgtgatcgaagggatcggcccacgctactgtccttcgatcgaagacaaggtgatgcgttttgccgatcgtaaccagcatcagatcttccttgagccggaaggactgacctctaacgagatttaccctaacggtatctccaccagcctgccgtttgacgtgcagatgcagattgtccgttccatgcagggcatggagaacgcgaagatcgttcgccctggttacgcgattgagtatgatttcttcgacccgcgagatctgaaaccgactctgganagtanatntattcacggnctgttctttgctggtcaaatcaacggtactaccggctatgaagangctgcggcgcanggcttgctcgctggtctgaatgccgcgcgtctttccgccgacnaaganggctgggcgcctgcgcgtnctcangcttatctcggcgtgctggtggacgatctctgtacgctgggcaccaaagagccgtatcgcatgtttacctcccgcgccgaatatcgcctgatgctgcgtgaggacaacgccgatctgcgtctgaccgaaatgggccgcgagctgggtctggtggatgatgaacgctgggcgcgcttcaacgagaagctggaaaatatcgaacgcgaacgtcagcggctgaaatcgacatgggtaacgccgtctgcggaatccgctgatgaagtgaatgcgcatttgaccacgccactctcccgtgaggccagcggcgaagatctgttgcgtcgtccggaaatgacatatgcgcagctcacttcgcttgccgcattcgcgcctgcgcttgaagatgagcaagccgctgaacaggtggaaatccaggtcaaatacgaaggctatatcgctcgccagcaggatgagattgaaaaacaactacgtaacgagaatacgttgctgcctgccacgctggattatcgtcaggtttccggtctgtcgaacgaagttatcgccaagctgaacgatcataaaccggcgtctatcggnccagncatcgcgtatctncggcgttacgccagcggcaatctccattctgctggtatggctgaaaaaacaaggtatgctgcgtcgtag

SEQ ID NO: 9969 - DNA, 816 bp, Salmonella typhi
  CDS (1)...(816)
  misc_feature (1)...(816): n = A,T,C or G
atggcttcagaaaatatgacgccgcaggaatacataggacaccatctgaataaccttcagctggacctgcgtactttctcgctggtggatccgcagaaccccccagccaccttctggacgctcaatattgactccatgttcttctcggtggtgctgggtctgttgtttctggtgatgttccgtagcgttgctaaaaaagcgaccagcggcgtgccaggcaagtttcagaccgcgattgagctgatagtcggctttgtgcatggcagcgtcaaagacatgtaccatggcaaaagcaagctgattgcgccgctggncctgacgattttcgtctgggtattccttatgaacctgatggacttactgcctatcgacctgctgccgtatatcgctgagcattggctgggtctgccggcaacgcgcgtggtgccgtctgctgacgtcaacatcaccctgtcgatggcgctgggcgtattcatccttattctgttctacagcatcaaaatgaaaggcatcggcggcttcgcaaaagagttgacgctgcagccgttcaatcactgggcgttcattcctgtcaacttaatccttgaaggggtaagtctgctgtccaaaccggtttctctcggtctgcgactgttcggcaacatgtatgccggtgagctgattttcattctgattgctggtctgttgccgtggtggtcacagtggattctgaatgtgccgtgggccattttccacatcctgattattacgntgcaagccttcattttcatggttctgacgattgtctatctgtcgatggcgtccgaagagcattaa

SEQ ID NO: 9970 - DNA, 471 bp, Salmonella typhi
  CDS (1)...(471)
  misc_feature (1)...(471): n = A,T,C or G
gtgaatcttaacgcaacaatcntcggccaggccatcgcgtttattctctttgtctggttttgcatgaagtacgtatggccgccgttaatggcagccatcgagaaacgtcagaaagaaattgctgacggtctcgcttctgctgaacgagcacataaggatcttgaccttgcaaaggccagcgcgaccgaccagctgaaaaaagcgaaagcggaagctcaggtaatcatcgagcaggcaaacaaacgccgcgctcagatcctggacgaagccaaaactgaagcagagcaggaacgtactaaaatcgtggcgcaggcgcaggcggaaattgaagccgagcgtaaacgtgcccgtgaagagctgcgtaagcaagttgctatcctggctgttgctggcgccgagaagatcatcgaacgttccgtggatgaagctgctaacagcgacatcgtggataaacttgtcgctgaactgtaa

SEQ ID NO: 9971 - DNA, 1542 bp, Salmonella typhi
  CDS (1)...(1542)
atgcaactgaattccaccgaaatcagcgaactgatcaagcagcgcattgctcagttcaatgtggtgagcgaagctcacaacgaaggtactattgtttctgttagtgacggtgttatccgcattcacggcttggccgattgtatgcagggtgaaatgatctccctgccgggtaaccgttacgctatcgcactgaacctggagcgcgactccgtgggtgcggtagtcatgggtccatacgctgaccttgccgaaggcatgaaggttaaatgtacgggtcgtatcctggaagttccggttggccgcggtctgctgggacgtgtggtaaacaccctgggtgcgccaatcgacggtaaaggtccggttgataatgacggcttctctgccgttgaagcgattgcgccgggcgttatcgatcgtcagtctgtcgatcagccggtgcagaccggctataaagccgttgactccatgatcccaatcggtcgtggtcagcgtgaactgatcatcggtgaccgtcagaccggtaaaaccgcgctggctatcgacgccatcatcaaccagcgcgactccggcatcaaatgtatctatgtcgctatcggccagaaagcgtccaccatctctaacgtggtgcgtaaactggaagagcacggcgcgctggctaacaccattgttgtggtggcgaccgcgtccgaatccgctgcgctgcaatatttggcgccgtatgccggttgcgcaatgggcgaatacttccgtgaccgcggtgaagatgcgctgatcatttacgatgacctgtctaaacaggctgttgcttaccgtcagatctccctgctgctccgtcgtccgccaggacgtgaagcattcccgggcgacgtattctacctccactctcgtctgctggagcgtgctgcgcgtgttaacgccgactacgtcgaagccttcactaaaggtgaagtgaaagggaaaaccggttcactgactgcgctgccgattatcgaaacgcaggcaggtgacgtttccgcgttcgttccgaccaacgtaatttccattaccgatggtcagatcttcctggaatctaacctgtttaacgccggtattcgtcctgcggttaacccgggtatctcggtatcccgtgtaggtggcgcagcccagaccaagatcatgaaaaaactgtccggaggtattcgtaccgcgctggcgcagtatcgtgaactggcggcgttctctcagtttgcatccgaccttgacgatgccacccgtaaacagcttgaccacggtcagaaagtgaccgaactgctgaaacagaaacagtatgcgccgatgtccgtcgcgcagcagtctctggttctgttcgcagcagaacgtggttatctggcggatgtcgaactggcgaaaatcggtagcttcgaagccgcactgctggcttacgtcgaccgtgatcacgctccgctgatgcaagagatcaaccagtccggtggctataacgacgaaatcgaaggcaagctgaaaggcatcctcgattccttcaaagcaacccagtcctggtaa

SEQ ID NO: 9972 - DNA, 642 bp, Salmonella typhi
  CDS (1)...(642)
atgggcagtaattatatcgtcatcgagggcctggaaggcgccggaaaaaccactgcgcgcgacgtggtggtggagacccttgagcaactgggtattcgtaacatgatttttacccgtgagccgggcggtacgcagcttgccgaaaaactaagaagtctggtgctggatatccgatcggtaggcgacgaagtgattaccgataaagcggaagtgctgatgttttatgccgctcgcgtacagctcgtcgaaacggtaatcaaacccgcgctggcgcaaggcgtatgggtgatcggcgatcgccacgatctctcgacccaggcgtatcaggggggagggcgcggcattgatcaaaccatgctggcgacactacgcgatgccgtgctgggcgattttcgtcctgacctgacgctgtatctggatgtcacgccggaagtcgggctaaaacgcgccagagcgcgcggcgatttggatcgcattgagcaggaatcttttgatttctttaaccggactcgcgcgcgctatctggaactggcggcgcaagactcgcgtatccgcaccattgacgcgacccagccgctggatgccgtcatgcgcgacattcgcgccacggtgacgaagtgggtgcaggagcaagcggcatga

SEQ ID NO: 9973 - DNA, 624 bp, Salmonella typhi
  CDS (1)...(624)
  misc_feature (1)...(624): n = A,T,C or G
atgtggtcttttncctgcggcgtgcatccgttaaatcaggatgaagtatatgacgtagaagaactgcgcctccttgctgcagaagacgatgtggtggcgatgggcgagaccgggcttgattacttttacacgcctgagaccaaaatccgccagcaggcgtcttttattcatcatatccagattggccgcgaattgcataaaccggtgattgtccatactcgcgacgcgcgtgccgatacgctggctatcctgcgcgaagaaaaagtgacggattgcggcggcgtactacactgttttacagaagacagagaaacggccggcaaattgctggatctggggttttatatctctttttccggcatcgtaacgttccgtaacgctgaacagttgcgtgatgcggcgcgctatgtgccgctggatcggttattagtcgagaccgattctccttatctggcgccggtgccgcatcgcggtaaagagaaccagcctgcgatggtacgcgacgtcgcagaatatatggcggtattgaaaggggttgccgttgaagaactggcgcagatcaccaccgataactttgctcgcctgttccatattgacgcgtctcgcctgtcatcaatccgttaa

SEQ ID NO: 9974 - DNA, 813 bp, Salmonella typhi
  CDS (1)...(813)
  misc_feature (1)...(813): n = A,T,C or G
atggctaccaaactgcaggacgagaatacaccttgtctggcagctacaccttctgaaccacgtcccaccgtgctggtatttgattccggcgtcggtggattgtcggtctatgatgagattcggcggctcctgccggatctccactatatatatgctttcgataacgtggctntcccctacggngaaaagagcganacgtttatcgttgagcgcgttgtcgagattgtgactgcggtacagcagcgctatcccctttcactggcggtgattgcctgtaataccgccagtacggtctcacttcccgcattacgtgaaaagtttgccttcccggtggtgggcgttgtgcctgcgattaaaccagcggcgcggcttaccgccaatggcgtcgtcgggctactggcgacgagagccacggtcaaacgtccttatactcacgagctgattgcgcgcttcgccaatgaatgtcagatagcgatgttggggtcggcagaactggtggaactggcggaagctaaattacatggcgattcggtatcgctggaagaactgcgccgtatattacgcccatggctacgaatgccggagccgcctgacacggtcgttctggggtgtacgcatttccctctattacgggacgagcttttgcaagtcctgcccgaagggacgcggttagtggattccggcgcggcgatagcgcgtcgtacagcctggctgttggancatgaagcgccggatgcgaaatcaaccgatgccaatattgcttattgcatggcaatgacgccaggagctgaacaattattacccgttttacat

SEQ ID NO: 9975 - DNA, 1455 bp, Salmonella typhi
  CDS (1)...(1455)
  misc_feature (1)...(1455): n = A,T,C or G
ccgtgggtggctggactacccgcgcgagaactgcgagagatgacgctcgacagccgtgtggctgcggcgggcgatctctttgtggcagtggtgggtcatcaggcggacgggcgtcgttatatcccgcangcgatagcgcaaggcgtagctgccattattgcagaggcgaaagacgaggcgagtgacggtgagattcgcgaaatgcacggcgtaccagtcgtctatctcagccagctcaatgagcgtttatctgcgctggcgggccgcttttaccatgagccatctgaaaacatgcgtctggtggcggtgaccggcaccaatggcaagaccaccaccacccaactactggcgcagtggagccagttgctcggcgaaaccagcgcagtgatggggacggtaggtaacggactgttgggtaaagtgatcccgacggagaacacaaccggttccgcagtggatgttcagcatgtgctggccagtctggttgcgcagggcgcgaccttcggcgctatggaagtctcttctcacggcctggtgcagcatcgcgtggcggcgctgaaatttgccgcctccgtgtttactaatttgagccgcgaccatctcgactatcatggcgatatggcgcattacgaggcggcaaaatggatgctttattccacccaccatcacggtcaggcaatcgtcaacgccgatgatgaagttggacgccgctggctggcgtcgctacccgatgcggtcgcggtttcaatggaagggcatatcaaccctaactgtcacggtcgttggctgaaagcggaggcggtggagtaccacgaccgcggagtgacgattcgttttgcttcaagctggggtgaaggcgaaatcgaaagctgcctgatgggcgcgtttaacgtcagcaacttactgctggcattggcgacgctgctggcgctgggctatccgttaacggatttgctgaaaaccgccgcgcgtttgcagccggtttgcgggcgtatggaagtgttcactgcgccaggcaaaccgacggtggtggtggattacgcgcacacgccggatgcgctggaaaaagcattgcaggcggcgcgcctgcactgcgccggaaaattgtggtgcgtctttggctgtggcggggatcgtgacaaaggtaagcgcccactcatgggggccattgccgaagaattcgcggatatcgtcgtggtgactgacgataacccgcgtaccgaggagccgcgcgccattatcaacgatattctggccggaatgctggacgccgggcaggtcagggtaatggaaggccgcgctgaggcggtaaccaatgccattatgcaggcaaaagacaatgacgtcgtgctgattgcaggtaaagggcacgaggattaccagattgtcggcacgcagcgtcttgattattcagaccgcgtgaccgcagcgcgtttgctgggggtgatcgcatga

SEQ ID NO: 9976 - DNA, 1359 bp, Salmonella typhi
  CDS (1)...(1359)
  misc_feature (1)...(1359): n = A,T,C or G
atgattagcgtaacgctcagcaaaattgccgatgtccttggcgccgaacaccgcggggcggatctcacgctcgatacggtcattaccgacacacggaaagtgacgccgggatgcctgttcgtggcgctgaaaggggaacgctttgatgcgcatgattttgctgataaagcaaaagcgancggcgctggcgccctgctggtcagtcgtcctctggatatcgatcttccgcaggtgattgtaaaagacacgcgtcaggcatttggccaactggccgcctgggtacgtatgcaggtaccggcgcgggtggtggcgttaaccggttcgtccggcaaaacctcggtcaaagagatgaccgccgcgattcttagccagtgcggaaatactttgtataccgcaagcaattttaacaacgacatcggcgtgccgataacgctgctgcgcttaaaccatgattatgactatgcggtgatcgagttaggcgctaatcaccagggagaaatcgcctggaccgttagcctgacgcgcccggaagcggcgctggtcaataacctggcggcggcgcatctggaaggtttcggctcgctggccggcgtggcgaaagcgaaaggcgaaatctataccggtttgcctgagaacggtatcgcgattatgaatgccgataataatgactggctgaactggcaaagcattattggcgatcgtcaggtgtggcgcttttcgccgaatgcggcaaacagcgactttaccgctgcgaatatccacgtgacgtcacacggtaccgaatttaccctgcaaacgccgatgggcagcattgatgtgctgctgccgttgccggggcggcacaatattgccaacgcgctggcggccgctgctttatcaatggcggtgggggcgacgctggcggcggttaaagcagggctggcggcgttaaaagccgtacccgggcgtctgttcccgattcaactaagtgaaaaccaactggtactggatgacgcttataacgccaacgtcggttcgatgaccgccgcagtgcaggtcctttctgaaatgcccggctaccgcgtgctggtggtaggcgatatggccgagctgggcgcagaaagcgaagcgtgccacctccaggttggcgaggccgcaaaagcggcgggtattgatcgcgtgttaagcaccggaaaactcagtcaggttatcagccacgccagcggcgtcggcgaacattttgccgataaagccgcgctcattgcgcgtttacacgctctgcttcaggagcaaccgatgatgactattttagtgaaaggatcacgcagcgccgcgatggaagatgtggttcatgcgttacaggagaaaggttcatgttag

SEQ ID NO: 9977 - DNA, 1083 bp, Salmonella typhi
  CDS (1)...(1083)
  misc_feature (1)...(1083): n = A,T,C or G
atgttagtttggctggccgagcatttggtcaaatattattccggctttaacgtcttttcttatctgacgtttcgcgccatcgtcagcctgttgaccgcgctgttcatctctttatggatgggcccgcgtatgatcgctcgtctgcaaaaactctcttttggccaggtggtacgtaacgatggcccggaatcgcacttcagtaaacgcggtacgccgacgatgggcggcatcatgatcctgacggcgattgtgatttccgttctgttatgggcttacccgtctaacccgtacgtctggtgcgtgctggtggtattgatcggctacggcattatcggttttgtcgatgactaccgcaaagtggtgcggaaagataccaaagggctgattgcgcgctggaaatatttctggatgtcggttatcgcgctcggcgtggcctttgcgctttatctcgtcgggaaagacacgcccgcgacccaactggtggtgccgttctttaaagatgttatgccgcaattggggctgttttacattctgctgtcctactttgtcatcgtcggtacgggtaacgccgtaaacctgaccgacgggcttgatggtctggcgattatgccgactgtcttcgttgccgccggctttgcgctggtggcttgggcgaccgggaacatgaacttcgccaattacctgcatattccgtatttacgccatgcgggcgagctggtgattgtctgtacggcgattgtcggcgcgggattaggattcttgtggtttaacacctatccggcgcaggtttttatgggcgatgtcggatcgctggcgttgggcggcgcgttgggcattatcgccgtgctgctgcgtcaggaatttctgctggtgatcatgggcggcgtctttgtggtggaaactctgtcggtcatcctgcaggtgggttcctttaaactacgcggacagcgtattttccgtatggcgcctatccatcaccactatgaactgaaaggctggccggaaccgcgcgtgattgtgcgcttctggattatttcgctgatgctggtgctgattggcctggcaacgctgaangtacgttaa

SEQ ID NO: 9978 - DNA, 1317 bp, Salmonella typhi
  CDS (1)...(1317)
atggctgattaccaggacaaaaacgtcgtcattatcggtctgggcttaaccggactctcttgcgtggacttttttctcgcccgcggcgtgacgccgcgggtgatggatactcgcgtgacgccgccgggtctggataagctgccgcaagaggttgagcgtcacgttggcggcctgaacgacgagtggctcttagcggcggatttaatcgtcgccagccctggtattgctctggcgcatccctctcttagcgctgccgccagcgctggagtggaaattgtcggcgatatcgaactgttttgccgcgaagcgcaagcgccgattgtggccatcaccggctcgaacggcaaaagcaccgtgaccaccttagtgggcgagatggcgaaggcggcgggcgtcaatgtcggcgttggcggcaatatcggtcttccggcgctgatgctgctggatgccgatcgcgaattgtacgtgctggaattatccagtttccaattggaaactacctcaagtttgcaagcggcggcggcaacggtgctcaacgtcactgaagatcatatggaccggtatccgtttggtttgcaacagtaccgggcggcgaaactgcgcgtctacgagaaggcgaaagtgtgcgtagtgaatgccgatgacgcgttgacgatgccggtacgcggggccgatgagcgctgcgtcagctttggcgtcaatatgggtgattatcaccttaatcgtcagcagggcgaaacctggctacgagtcaaaggtgagaaggtgctgaacgtgaaagagatgaagctttccggtcagcataactataccaatgcgttagcggcgctggcgctggcggatgccgtaggtctgccgcgcgccagcagtttgaaggcgttgacgacatttaccggtctggcgcatcgcttccagctggcgttggagcataacggcgttcgttggatcaacgactcgaaagcgaccaatgtcggcagtaccgaagcggcgctaaacggtttgcatgtggacggtacgctgcatctgctgctgggcggcgacggtaagtcggcagacttttctccgctggcgcgctatctgaccggcgatcgtatccgcctgtattgctttgggcgcgatggcgcgcagcttgccgcactgcgtccggaaatcgcccaacagactgagacgatggaagaggcgatgcgtttgctggcgccgcacgttcagccgggtgatatggtgctgttgtcgcccgcctgcgccagcctcgatcagtttaaaaattttgagcaacggggcgatgtctttacccgtctggcgaaggagttaggttga

SEQ ID NO: 9979 - DNA, 1245 bp, Salmonella typhi
  CDS (1)...(1245)
atgcgtttatctctcccccgtctgagaatgccgcgcgtaccaggctttggcctcctggcctggctgtttgcggcgcttaaaggctgggtgatggcttcgcgcgataaagacgccgacagtctgatcatgtatgaccgcacgctgctatggctgaccttcgggctggcggcgattggttttgtcatggtgacgtcggcctccatgccagtcgggcagcgcctggcgaacgatccgtttttgtttgccaaacgtgatgcgctctatatcttcctggcattttgtctggcgatggtcacgctacgtttgcccatgaccttctggcaaaaatacagcacgacgatgctgattgcgtcgatcattatgctgcttatcgtgctggtcgtcgggagctcggttaacggggcgtcgcgctggattgcgctggggccgctgcgtattcagcctgcggagtttaccaagctgtcgctgttctgctacctcgcgaactatctggtgcgtaaggttgatgaagtgcgaaataacctgcgcggctttttaaaaccaatgggcgtgattctggtgctggcggtgttactgctggcacagcctgacctcgggacggtggtcgtactgtttgtcaccacgctggcgatgctgtttcttgccggggcgaaattatggcagttcatcgccattatcgggatgggcatctcggcggtgattctgttaatcctcgccgaaccgtatcgtattcgccgcgttacctcgttctggaacccctgggaagatccgttcggcagcggttatcagctgacgcagtcgctgatggcttttggtcgcggtgagatatgggggcaagggctggggaattcggtgcagaaactggagtatttgccggaggcgcacaccgatttcatcttcgccattattggggaagaactgggttatatcggtgtggtattggcgcttttaatggtatttttcgtcgcttttcgcgcgatgtcgattggccgtaaggcattggagattgaccaccgtttttccggatttttagcgtgttctatcggtatctggtttagttttcaggcgctggtaaacgttggcgcggccgcggggatgctgccgaccaaaggtcttacgctgccgctgatcagttatggcgggtcgagtctgttgattatgtcgacggccattatgtttttattacgtattgattatgaaacgcgtctggaaaaagcgcaggcgtttacacgaggttctcgatga

SEQ ID NO: 9980 - DNA, 1068 bp, Salmonella typhi
  CDS (1)...(1068)
atgagtggtcaaccgaagcggttaatggtgatggcgggcggtaccggcgggcacgtgttccccggactggccgttgcgcatcatttaatggcccagggctggcaggttcgctggctgggtacctccgatcgtatggaagcggatttagtgccgaagcatggcatcgatattgactttattcggatctccggtctgcgcggtaaaggcgtaaaagcgcttctggcggcgccgctgcggatttttaacgcctggcggcaggcgcgggcgatcatgaagcggtttaagccggatgtcgtgctgggaatgggcggttatgtttccggccccggcggtcttgccgcctggtcattgggtattccggtcgttttgcatgagcaaaacggtatcgccgggctaaccaatcagtggctggccaaaatcgcgaccacggtgatgcaggcgtttcccggtgcgttcccgaacgcggaagtggtgggtaacccggtgcgtaccgacgtactggcgttgccgttgccgcaggtgcgtctggccggtcgtgacggcccgattcgcgtgttggtggtcggcggttctcagggggcgcgagtcctgaaccagacgatgccgcaggttgccgccagactgggcgatacggttacaatctggcatcaaagcggaaaaggcgcgcagctcacggtagagcaggcatatgccggggcgggacaaccgcagcataaggtaacggaatttatcgatggcatggccgccgcctatgcgtgggcggatgtggtggtatgtcgttccggcgctttaacggtgagcgagatcgccgccgccgggttaccggcgatattcgtgccgtttcagcataaagacaggcagcagtactggaatgcgctgccgttagaaaacgccggcgcagctaagatttttgagcagccgcagtttactgtagaggctgtcgccgacaccctggcggggtggtcgcgcgaggcgttgttaaccatggcggagcgtgcccgcgcggtatccattccggatgctaccgagcgcgtcgccagtgaagtcagccgggttgcccggacataa

SEQ ID NO: 9981 - DNA, 1476 bp, Salmonella typhi
  CDS (1)...(1476)
  misc_feature (1)...(1476): n = A,T,C or G
atgaatacacaacaactggcaaaactgcgttccatcgtgcccgaaatgcgtcgcgttcggcacattcactttgtcggcatcggtggtgctggtatgggcggtattgccgaagttctggccaatgaagggtatcagatcagtggttccgatttagcgccgaatccggtgacccagcagttgacgagcctgggggcgacgattttctttaaccatcgtccggaaaatgtgcgtgatgccagcgtggtcgtcgtttccagcgcaatttccgcggataacccggaaattgtcgcggcgcatgaagcgcgtattccggttattcgccgtgcggaaatgctggcggaactgatgcgttttcgccacggcatcgccattgccgggacgcacggaaaaaccacaacgaccgcgatggtgtccagtatttatgccgaagcggggctggacccgactttcgtgaatggcggattggtgaaagccgcaggcgttcatgcgcgtctgggccatagtcgttacctgattgccgaggcagatgagagcgacgcatccttcctgcatttgcagccgatggttgcgatcgtcaccaacatcgaagccgaccatatggatacctatcatggcgactttgaaaatttaaagcagacgtttattaacttcctgcataacctgccgttctacggtcgcgcggtaatgtgcgtcgacgatccggtcatccgcgagttgctgccgcgggtggggcgtcagaccacgacgtatggctttagcgaggatgctgacgtccgcgtagaagattatcagcagatagggccgcaggggcactttacgctgttgcgccagggaatgccggatctgcatgtcacgttgaatgcgccgggtcgccacaatgccctgaatgccgccgcggcagtggcggtagcgaccgaagaaggcatcgacgatgacgctatcctgcgcgcgctgganagcttccaggggaccgggcgtcgttttgacttcctcggcgagttcccgcttgagccggtgaatggtaaagccgggacggcgatgctggtggatgactatggacatcatccgaccgaagtggacgccaccattaaagctgcgcgagcagggtggccggataaaaacctggtgatgctgtttcagccgcatcgttacacgcgcacgcgcgatctgtatgacgatttcgccaatgtgctgacccaggtcgatgcgctgctgatgctggacgtttacccggcgggcgaagcgccgattccgggcgcggatagccgttctttatgtcgcacgattcgtaatcggggaaaaattgacccgattctggtttccgatccggctcaggttgcgacaatgttagcgccggtgctgacgggtaacgacttgatattagtgcaaggcgcaggaaatgttggcaaaattgcgcgttacttatctgaaatcaagctgaagccgcaaatccaggaggaagagcaacatggctga

SEQ ID NO: 9982 - DNA, 1992 bp, Salmonella typhi
  CDS (1)...(1992)
  misc_feature (1)...(1992): n = A,T,C or G
atgttcggaaaattatcactggatgcagtaccgttccatgaacctatcgtcatggtaacgatcgctgcaattatcgtcgggggactggcgatactggcagcgattacttacttcggtaagtggacctacctatggaaagagtggttaacgtcggttgaccataaacgcctcggtatcatgtatatcatcgtcgcgattgtgatgctgttacgtggtttcgccgatgccatcatgatgcgtagccagcaggcgcttgcctccgcaggcgaagcgggttttctaccgccgcaccactacgatcagatctttaccgctcacggcgtaatcatgatcttcttcgtggcgatgcccttcgttatcggtctgatgaacctggtggttccgctgcagatcggcgcgcgcgacgttgctttccctttcctgaacaacctgagcttctggttcaccgttgtcggcgttattctggttaacctctcgctgggcgtgggtgaattcgcgcagacagggtggctggcttatccgccgctatcgggaatagagtacagtcccagcgtcggggtcgattactggatatgggcgttgcaactctcgggtattggtacgacgttaaccggtatcaacttcttcgtgacgatcctgaagatgcgtgcgccgggtatgacaatgttcaagatgccggtctttacctgggcctctttgtgcgccaacgtactgatcatcgcctctttcccgattctgacggttaccgtcgcgttgctgaccctggatcgctatctgggcacccatttctttaccaacgatatgggcggcaacatgatgatgtacatcaacctgatttgggcctggggccatccggaagtgtacattctgattctgccggtcttcggggtattctccgaaatcgcagcgaccttctcgcgtaaacgtctgttcggctatacctcgctggtttgggcgaccgtctgtattaccgtactgtcgtttatcgtttggctgcaccacttcttcacgatgggcgcgggcgcgaacgttaacgccttcttcggtatcaccaccatgattatcgccatcccgaccggggtgaagatcttcaactggttgttcaccatgtatcagggccgtatcgtcttccattccgcaatgatgtggaccatcggctttatcgtgaccttctcggtcggcggtatgaccggcgtgctgctggcggtaccgggcgcggacttcgtcctgcacaacagcctgttcctgattgcgcacttccataacgtgatcatcggcggcgtggtgtttggctgcttcgcaggtatgacttactggtggccgaaggcgtttggcttcaagctgaacgaaacctggggtaaacgcgccttctggttctggattatcggtttctttgtagcctttatgccgctgtacgtactgggcttcatgggcatgacccgtcgcctcagccagcaaattgatccgcagttccatacgatgctgatggttgccgccgccggcgccgcgctgattgcgctgggtatcctgtgccaactgattcagatcttcgtttctattcgcgaccgcgatcagaaccgcgatctgaccggcgacccatggggtggccgtacgctggagtggtcaacctcgtctccgccgccgttctataactntgccgttgtgccgcacgttcacgnacgtgacgccttctgggaaatgaaagaaaaaggcgaagcgtaccaacagcctggacagtatgaagagattcatatgccgaaaaatagcggtgccggtattgttatcgccgccttcgcgacggtatttggcttcgccatgatctggcatatctggtggctggcgatagtgggtttcgcaggcatgatcatcagctggattgtaaaaagctttgatgaagatgtggattactacgtgccggtcccggaagtcgaaaaactggaaaaccagcatttcgatgagattactaaggcagggctgaaaaatggcaactga

SEQ ID NO: 9983 - DNA, 957 bp, Salmonella typhi
  CDS (1)...(957)
  misc_feature (1)...(957): n = A,T,C or G
atgagactcaggaaatacaataaaagtttgggatggttgtcattaattgcaggcactgcattactcagtggctgtaattctgcgctgctggatcccaaaggncagantggnctgnagcaacgttcgctgatnctgacggcatttggcctgatgttgatcgtcgttattcccgccatcttgatggctgttggttttgcctggaagtatcgtgcgagtaataagnatgcgaagtatancccgaactggtcacactccaataaagtggaagccgtggtctggacggtgcctatcttaatcatcattttccttgccgtactgacctgtaaaaccacgcacgcgcttgaaccaagcaagccgctggcgcatgacnaaaaaccgatcaccatcnaagtggtttccatggactgganatggttcttcatctatccggagcagggtatcgccaccgtcaacgagatcgccttcccggcgaacacgccggtttatttcaaagtgacctccaactccgtgatnaactccttctttatcccgcgtctgggtagccagatttatgccatggccggtatgcaaacacgtttgcatctgatcgccaacgaacccggaacctacgatggcatctccgccagctatagcggcccgggcttctctggtatgaagtttaaagctatcgccaccaaagaccgcgcagaattcgaccaatgggtcgcaaaagcgaagcagtctccgaacaccatgaatgatatggcggcgttcgagaaagtggctatgccaagcgagtacaacaaggtggaatatttctccagcgtgaaaccagatttgttcaaggacgttattaacaaattcatgggccacggtaagagcatggacatgacccaacctgaaggtgagcacagctcgcatgaaggaatggaaggtatggacatgagccacgcggaatccgccaactccaagggttga

SEQ ID NO: 9984 - DNA, 975 bp, Salmonella typhi
  CDS (1)...(975)
  misc_feature (1)...(975): n = A,T,C or G
atgcaatacaacacgttaggaaataccgatcttcgggtgtcccgcctttgtctgggctgtatgacattcggcgagccgagtcgcggcaatcacgcctggacgcttcccgaagagagcagccgtcccatcatcaagcgcgccnttgagggcggcattaacttttttgataccgccaacagctactccgacggcagcagcgaagagattgtcggtcgcgcgctgcgtgattttgcccggcgcgacgaggtggtggtagcgacgaaagtcttccatcgcgtcggcgatctgccggaaggattgtcccgcgcgcaaatcctgcgctctattgacgatagcctcacccgtctgggaatggagtatgtcgatatcctgcaaatccaccgctgggattacaccacgccgatagaagaaactctggaagcgctaaacgacgtggtaaaggcgggtaaagcccgctatatcggcgcttcctcaatgcacgcctcacaatttgcccaggcgctggcgctacaaaaacaacacggctgggcgccgtttgtcactatgcaggatcactataacctgatctaccgcgaggaagagcgtgagatgctaccgctgtgctggcaggaaggggtcgccgtgattccgtggagtccgctggcgcgcgggcgcttaactcgcccctggggagaaaccacggcccggctggcctcggatgacgtgggcaaaaatttatacgatgaaagcgataaaaatgatgcgcaaatagcggaacggctggctggcgtcagcgaggcgcttggcgcaacgcgagcgcaggttgcgctggcctggctgctcagcaaacgaggcgtcgccgcgccgattatcggcgcttcgcgtgaagagcagttagatgagttgctgaatgccgttgatttaacgctcaaaccggagcagattgccgaactcgaaacaccgtacaagcagcatccggtggtgggatttaaataa

SEQ ID NO: 9985 - DNA, 1863 bp, Salmonella typhi
  CDS (1)...(1863)
atgagttttgatatagccaaataccctaccctggcattggtcgactccacccaggagttacgactgttaccgaaagagagtctgccgaaactctgcgacgagctacgccgctacttactcgacagcgtaagccgttccagcgggcatttcgcttccgggctgggcacggtagaacttaccgtggcgctgcattatgtctacaacaccccgtttgaccagctaatctgggatgttggacaccaggcttatccacataaaatccttaccggtcgtcgcgacaaaatcggcaccattcgccagaaaggcggtctgcacccgttcccgtggcgcggagaaagcgaatacgatgtgctgagcgttgggcattcctccacctccatcagcgccggtatcggtattgccgtggcggcggagaaagaaggcaaagatcgccgcaccgtctgtgtgattggcgacggcgccatcaccgccggtatggcgtttgaagcaatgaatcacgcaggcgatatccgacccgacatgctggtcattctgaacgacaatgaaatgtcgatttcggaaaacgtcggcgcgctcaacaaccatctggcgcggctactttccggtaagctttactcttctctgcgcgaaggcggaaaaaaagtcttctccggcgtaccgccaattaaagaactgctcaagcgtaccgaagaacatattaaaggcatggttgtgccgggaacactgttcgaagagctgggctttaactacatcgggccggtcgatggtcacgatgtcatggggcttatcagcacattgaagaacatgcgtgacctgaaagggccgcagttcctgcatatcatgaccaaaaaaggccgcggctatgagcccgcggaaaaagatccgatcactttccatgcggtgcctaaatttgatccctccagcggatgtttgccgaaaagcagcggcggtctgccaggttattcaaaaatcttcggtgactggctgtgtgaaaccgccgccaaagacagcaagctgatggcgatcaccccggcaatgcgcgaaggttccggcatggtggaattttcacgtaaattcccggatcgctattttgacgtcgctatcgccgagcagcatgccgtcaccttcgccgcaggtctggcgattggcggctataagcccgtcgtggcgatctactctactttcctgcaacgcgcctacgatcaggtcatccatgacgtcgctatccagaaactgccggtcatgttcgccatcgatcgcgccggtatcgttggcgcggatgggcaaacacaccaaggcgcgttcgatctctcctatctgcgctgcatcccggatatggtgatcatgacgccaagcgacgagaacgaatgtcgccagatgttatttaccgggtatcactataacgacggcccgacggcagtacgttatccacgcggtaatgcgcagggcgtggcgctaaccccgctggaaaaactgcctattggtaaaggtcttgtgaagcgtcatggcgaaaaactggcgattctgaactttggcaccttaatgcctgaggcggcgaaagtcgccgaagcgctgaatgccacgctggtcgacatgcgctttgttaaaccgctggacgacacgttaattctggagatggccgcgcagcatgacgcgctggtgacgctggaagaaaacgccattatgggcggcgctggcagcggcgtaaacgaagtgctaatggcccatcgtaaacctgtacctgtgctgaatatcggtcttccggatttctttatcccgcaaggaacgcaggaagaagcccgcgcggaactggggcttgacgccgcaggcattgaagccaaaatcaaggcctggctggcataa

SEQ ID NO: 9986 - DNA, 900 bp, Salmonella typhi
  CDS (1)...(900)
atggactttacgcagcagctacaggcttgcgtaacgcaagcgaatcaggcgctgagccgttttatcgcgccactgccctttcagaacactcccgtggtcgaagccatgcagtatggcgcattattaggcggtaaacgcctgcggccatttctggtttacgccaccggtcaaatgtttggcgtcagtacggcaacgctggatgcgccagctgcggcggtcgaatgcattcatgcctattcgctgatccatgacgacctgccagcaatggacgatgacgatttgcgtcgcggcctgccgacttgccatattaaatttggcgaagccaacgcaatcctggcgggagacgcgttgcaaacgctggcgtttaccattatcagcgacgcgccgatgccggaagtcgccgatcgcgatcgtatcgcgatgatcgccgaactggcaaacgccagcggtatcgccggtatgtgcggcggtcaggcattggatctggcggcagaaggccagcggatcactctggacgcgctggaacgcattcatcgccataagaccggcgcgctcattcgcgccgccgttagacttggcgcgttgagcgcgggcgataaaggacggaatactctgccgatacttgaccgctatgcagagagtatcggccttgccttccaggttcaggatgacattctggatgtggtgggcgatactgcaacgttaggtaaacgtcagggcgcagaccagcagcttggcaaaagtacctaccctgcacttctgggtcttgagcaagcccggaataaagcccgggacctgatagaggacgcccgtcagtcgttacatcagctggccgcgcaatcactggacacctcggcactggaagcgctagcgaactacataatccagcgtgataaataa

SEQ ID NO: 9987 - DNA, 768 bp, Salmonella typhi
  CDS (1)...(768)
gtgtttattggcatcgttagcctgtttcctgaaatgttccgcgcaattaccgattacggggtaactggccgggcagtaaaaaaaggcctgctgaacatccaaagctggagtcctcgcgacttcgcgcatgaccggcaccgtaccgtggacgaccgtccttacggcggcggaccggggatgttaatgatggtgcaacccttgcgggacgccattcatgcagcaaaagccgcggcaggtgaaggcgctaaagtgatttatctgtcgcctcagggacgcaagcttgatcaagcgggcgttagcgagctggccacgaatcagaaactcattctggtgtgtggtcgctacgaaggcgtagatgagcgcgtaattcaggccgaaattgacgaagaatggtcaattggcgattacgttctcagcggtggcgaactaccggcaatgacgctgattgactccgtcgcccggtttataccgggggttctggggcatgaggcatcagcaatcgaagattcgtttgctgatgggttgctggattgtccgcactatacgcgccctgaagtgttagaggggatggaagtaccgccagtattgctgtcgggaaaccatgctgagatacgtcgctggcgtttgaaacagtcactgggccgaacctggcttagaagacctgaacttctggaaaacctggctctgactgaagagcaagcaaggttgctggcggagttcaaaacagaacacgcacaacagcagcataaacatgatgggatggcatag

SEQ ID NO: 9988 - DNA, 348 bp, Salmonella typhi
  CDS (1)...(348)
  misc_feature (1)...(348): n = A,T,C or G
atgagcaacattattaagcaacttgaacaagagcagatgaagcagaacgtaccttccttccgtccgggcgataccgtggaagtgaaagtatgggttgttgaaggtaccaagaaacgtctgcaggcattcgagggcgtggttatcgctattcgtaaccgcggtctgcactctgcattcactgttcgtaaaatttccaacggcgaaggcgttgagcgtgtcttccagactcactctccggtagttgacagcattgctgttaaacgtcgtggtgctgttcgtaaagctaaactgtactacntgcgtgagcgtactggtaaagcagctngtatcaaagagcgtcttaactaa

SEQ ID NO: 9989 - DNA, 981 bp, Salmonella typhi
  CDS (1)...(981)
  misc_feature (1)...(981): n = A,T,C or G
atggcacaacgagtacaactcaccgcaacggtctccgaaaaccaactcggtcaacgcttagatcaggctttggccgaaatgttcccggattattcacgttcgcgtataaaagaatggattttgaatcagcgcgtgttggtcaatggtcaactttgcgataagccaaaagaaaaagtgttaggcggcgagcgggtggctattgatgcggagatcgacgaagagattcgttttgaagcgcaggatatcccgttagatattgtttatgaagatgacgatattctggttatcaacaaaccacgcgatctggtggtacatcctggcgcgggtaacccggacggtacggtactgaacgcgttgctacattattatccgccgattgcggatgtcccgcgcgcgggcattgtgcatcgtctggataaggacacgacggggctgatggtggtggccaaaaccgttccggcgcaaacgcgcctggtggagtctttgcagctgcgcgagatcacccgcgaatatgaagcggtcgcgatcggacatatgacggcgggaggaacggtgaatgaacccatcagtcgtcacccgaccaaacgtacccatatgtcggtgcatcctatgggcaaaccggcggtgacccactaccgcattatggaacatttccgtgtgcacacgcgtcttaggttgcgtctggagaccgggcgtacgcaccagatccgcgtgcatatggcgcatattacgcatccgttagtgggcgatcaggtctacggtggtcgtccacgtccaccgaaaggcgcatcggaagaatntatttccacgctgcgtaagtttgaccgccaggcgctgcatgcaacgatgctgcgtctctaccatcctgtatcnggtatcgaaatggagtggcacgcgccgattccacaagatatggtggaccttatcgatgcgatgcgcgccgatttcgaagatcataaagatgatgtggactggttatga

SEQ ID NO: 9990 - DNA, 2586 bp, Salmonella typhi
  CDS (1)...(2586)
  misc_feature (1)...(2586): n = A,T,C or G
atgggaggagttatgcgtctggatcgtcttactaacaaattccagcttgctcttgccgatgcccagtcgctcgcgctggggcacgacaaccaattcatcgaacctcttcatttaatgagcgccttgctgaaccaggaagggggatcgatacgtcctttattaacctccgccggcattaatgctggccagttgcgcactgctatcgatcaggcgctgagccgtttaccgcaggtggaaggcaccggcggcgacgtacagccttcttcggaactggtacgcgtactgaacctttgcgacaagctggcgcaaaaacggggggacaattttatttcgtcagagctgtttgttctggcggcgcttgagtctcgcggcacgttaaccgatctgctgaaatcagccggtgcgactacggccaatatcactcaggcaattgaacagatgcgcggaggtgaaagcgtgaacgatcaaggggctgaagaccaacgtcaggccttgaaaaaatataccgtcgatctgaccgagcgggctgaacaaggtaagcttgacccggtaattggtcgtgatgaagaaattcgccgtaccattcaggtattgcaacgtcgtactaaaaacaacccggtgttaatcggtgagccaggcgtaggtaaaaccgccattgttgaagggctggcgcaacgtattatcaacggtgaagtaccggaaggcctgaaagnccgtcgcgtgctggcgctggatatgggcgcgctggtggccggggcgaaatatcgcggcgaatttgaagagcgtctgaaaggcgtgctgaacgacctcgcaaaacaggaaggcaacgtcatcctgtttatcgacgagctgcacaccatggttggcgcaggtaaagctgatggcgccatggatgccggtaacatgctgaaaccggcgctggcacgtggggaactgcactgtgtgggcgccaccacgctggacgaatatcgtcagtacatcgaaaaagacgcggcgctggaacgtcgattccagaaagtgttcgtggcagagccgtcggtggaagacaccattgcgattttgcgtggtctgaaagagcgttatgaactgcatcaccatgtgcagatcactgacccggcgattgtggcggcggcaacattatctcaccgctatatcgccgaccgtcagttaccggataaagctatcgacctcatcgatgaagcggcatccagcattcgtatgcagattgactcgaagccggaggagctggacaggctcgaccgccgcattattcagctcaaactggaacagcaggcgttgatgaaagagtctgacgaggcgagtaaaaaacgtctcgatatgctgaatgaagaactggacgataaagagcgtcagtactctgagttagaagaagagtggaaagcggaaaaagcgtcgctctctggtacgcaaactattaaagcggagctggagcaggcgaagatcgccatcgagcaggcgcgtcgcgttggcgacctcgcgcgaatgtctgaactgcagtacggcaaaattccggagctggaaaaacagctggaagccgcgacccagtcggaaggtaaaaccatgcgtctgttacgtaacaaagtaacggatgcggaaattgccgaagtgctggcgcgctggaccggtattccggtttccagaatgctggaaggcgaacgtgaaaaactgttgcgtatggaacaagagttacacagccgtgtgatcgggcagaatgaagccgttgaagcagtatcgaacgccatacgccgtagccgcgcggggctgtccgatccgaaccgtccgattggttccttcctgttccttgggccgaccggggtcggtaaaaccgaactgtgtaaagcgctggctaactttatgttcgacagcgacgacgcgatggtgcgtatcgacatgtctgagtttatggagaaacactccgtgtctcgtttggtcggggcgcctccaggatatgtcggctatgaagaaggcggttatttgacggaagcggtgcgccgtcgcccttattccgtcatcttgttggatgaagtggaaaaagcgcatccggatgtattcaacattctgttgcaggtgctggacgacggtcgactgactgacgggcaggggagaacggtcgacttccgtaatacggtggtcattatgacttctaacctcggttccgatctcattcaggagcgctttggcgaactggattacggtcgaatgaaagagatggtgctgggtgtggttagccaaaacttccgtccggaatttatcaaccgtattgatgaagttgtggtattccatccgttaggtgagcaacacatcgcttctattgctcagatccagctgcagcgtctgtacaaacgtctggaagaacgtggttatgaaatccatatctccgacgaggcgctgaaactgttgagcgccaacggttacgatccggtctacggggcgcgtccgttaaaacgtgctattcaacagcagatcgaaaacccactggcgcagcaaatcctgtctggtgaactggttcctggcaaagtgattcgccttgaagccaatgatgatcgtattgtggcagtgcagtaa

SEQ ID NO: 9991 - DNA, 1506 bp, Salmonella typhi
  CDS (1)...(1506)
  misc_feature (1)...(1506): n = A,T,C or G
gtgagaaagagaagcagtatagcgttacgtgaccgcagctccaaccgttgcataacaacaaagacggcttcatggtatactgtggcgaaattctgtaactgtgtcgctgcggcgaccaaccgnttccaccccaggcgagagacnatgtttgataatttaaccgatcgtttgtcgcgcacgctgcgcaatatcagtggccgtgggcgccttactgaagacaacgttaaagagacgctgcgcgaagtgcgcatggcgctgctggaggctgacgttgcgctgccggtagtgcgtgagttcatcaatcgcgtaaaagagaaagcggttggtcatgaagttaacaaaagcctgaccccagggcaggagttcgtcaagattgtccgtagcgaactggttgcggcaatgggcgaagaaaaccagaccctgaatctggctgcgcagccgccagccgtagtattgatggcgggtctgcagggggcgggtaaaaccaccagcgtcggtaagttgggtaaattcttgcgcgagaagcacaagaagaaagtgctggtcgtctctgccgacgtctatcgcccggcggcgatcaaacagctcgaaacgctggctgagcaggttggcgtggatttcttcccgtctgatgtcggccagaaaccggttgatatcgtcaacgccgcgctgaaagaagcgaagctcaaattctacgacgtgctgctggtggataccgccggtcgtctgcacgttgacgaagcgatgatggacgaaatcaaacaggtccacgcttctatcaagccagtagaaacgctgtttgtcgtcgatgcgatgaccggtcaggatgcggcgaataccgcaaaagcctttaacgaagcactgcccttaaccggtgtggtgctgaccaaagttgatggtgatgcgcgtggcggtgcggcgctctctattcgtcatatcaccggcaagccgatnanattcntcggtntnggcgagaanaccgacgcgctggagcngttccacccggatnntatcgcctngcgnattntcggcatgggcgacgtactgtctcttatcgaagatatcgaaagcaaagttgaccgcgcacaggctgagaagctggcgaccaaactgaagaaaggcgacggtttcgacctgaacgacttcctggagcagctcaaacagatgaaaaacatgggcggtatggccagtctgatgggcaaattaccgggcatggggcagattccggacaacgttanatcgcagatggatgataaggtgctggtgcgtatggaggcgatcatcaattcgatgacgctgaaagaacgcgcgaagccggaaatcattaaaggttcccgcaagcgtcgtatcgcgcagggctgtgggatgcaggtgcaggacgttaaccgccttctgaaacagttcgacgacatgcagcgcatgatgaagaaaatgaagaagggcgggatggcgaagatgatgcggagtatgaaggggatgatgccgcctggttttccaggccgctaa

SEQ ID NO: 9992 - DNA, 249 bp, Salmonella typhi
  CDS (1)...(249)
atggtaactattcgtttagctcgtcacggcgctaaaaagcgtccgttctaccaggttgttgtcaccgacagccgtaatgcacgcaacggtcgcttcattgagcgcgttggtttcttcaacccaatcgctagcgaaaaagaagaaggcacccgcctggatctggatcgcatcgctcactgggttggccagggcgcaaccatttccgatcgcgttgcggcgctgatcaaagaagtaaaaaaagcagcttaa

SEQ ID NO: 9993 - DNA, 1746 bp, Salmonella typhi
  CDS (1)...(1746)
gtgaaaaagaaaagcgacggcgatacccgtaattttacacccatacgttttgcactactttgcactgccattctgctcagtatggcattgttgttagggcgggtggcatggctgcaaattgttacgccgtcgaaactggtgaaacaagaagatatgcgctcgcttcgtgaagtgaccacggcctctccacgcggcatgatcaccgacagagaagggcggcccttagcggtgagcgttccggttaatgctgtctgggccgatccgaaaactatcataagcaaaggcggcgttggctacaatgagcgctggcaggcgctggccagcgccttacatctgtctctcagtacgcttgcggaacgggtaaacagtaacccggcaggtcgttttatctacctcgcgcgccaggtttcaccccagcaagccgaatggatagataaactgaatctaccgggtattaacctgcgggaagagtcgcgccgtttttaccctgccggacatgtagcggccaatttgatcggctttaccaatatcgacgggcagggaatagaaggtattgaaaagagctttaacgcgcaactgacgggaaaaccgggctcccggctggtgcgtaaagataaatttggtcacgttattgagaacattacggaagtgaatccggttcctgctcatgaacttcagcttagcattgatgaacgtctgcaaacggttaccgaagatgcgctggataacgccgtcatctggaacaaagcggaatccggcgctgccgtattgattaacatcccaacgggtgaaattctctcgatggcgagctacccggatttcaacccgaacaaccgtgaaggcgcgcagttggacgattttcgtaaccgcgcgattagcgacactttcgaacccggttctactgtgaagccattggtcattatgactgcgttacagcagggtatcgtgcaaccggacagcgttatcgatacccatccttttactctcgatggacaccgtatccgcgacgtcggctactatccggaactgacattaaccggcattttgcaaaaatccagcgataccggcgtttctcacctttctctggcgatgccggtgcagaaattaatggatacttataaaagctttggtttcggcgtgcctaccggactgggtctcaccggagagagcagcgggttattaccgaaacgccgttactggagtgatttagatcgcgctaccttcgcttttggctatggattaatggtgacgccgctgcaactggcgcatgtttatgccacgattggcagctttggtatctaccgtccgttatcgatcaccaaagttgatccgcccgtgatcggcacgcgagtaatgccggaagaactggtgcacgaggtggaacatatgatggagagcgtcgcgttgcctggcggcggcggaacaaaagccgcagtaagagactaccgtattgcggtcaaaaccgggacggcgaaaaaaattggcgatgatggtaaatacgttgataagtatgtggcatataccgcaggcgtcgcgccggcaagtaaccccagatttgcgctggtggtggtgattaataatccacaaaatggggcttattatggcggtgcggtatctgcgcccgtattcagccagatcatgggcgatgtactgcggctggaaaatgttgagccagacggtatgccagccgattcagatcaccttctggtgatgcatggcagccacgttgcggttccgggctcgtaa

SEQ ID NO: 9994 - DNA, 792 bp, Salmonella typhi
  CDS (1)...(792)
atgggtaaactcacgggcaagacagcattgattacgggcgcatcgcagggcattggcgaagggatcgctcgcgtattcgcacgccacggcgcgaacttaatcttgctggatatctccgatgagattgaaaagctggcggatgagctgggcgggcgcgggcatcgctgtactgccgttaaagccgacgtcagagattttgcttcggtgcaggcggcggttgcgcgcgccaaagagactgaaggtagaattgatattttggtgaataacgctggcgtgtgccgtctgggcaacttcctcgatatgagtgaagaagatcgcgatttccacattgatattaatattaaaggtgtctggaacgtcaccaaagccgtcctgccggagatgatcaaacgtaaagatggccgcattgtgatgatgtcttccgtcacgggagatatggtggcggacccgggtgaaacggcctatgcgctgtcaaaagccgccattgtcggtttaaccaaatcgctggcggtagagtacgcgcagtccggtattcgtgtgaatgccatttgccccggttatgtaagaacgccgatggcggaaagcattgcccgtcagtctaaccctgacgatccggaatcggtattaacggaaatggcaaaagccattccgctacgccgtcttgccgatccgctggaagtaggggaactggcggcatttctggcttccgatgagtccagctatcttaccggaacgcaaaacgtcattgatggcggcagtaccctgcctgaaagcgtaagcgtaggcgtctga

SEQ ID NO: 9995 - DNA, 384 bp, Salmonella typhi
  CDS (1)...(384)
atgcgccatcgtaagagtggtcgtcaactgaaccgcaacagcagccatcgccaggctatgttccgcaacatggcaggttcactggttcgtcatgaaatcatcaagacgaccctgcctaaagcgaaagagctgcgtcgcgtagttgagccgctgattactcttgccaagactgatagcgttgctaatcgtcgtctggcattcgcccgtactcgtgataacgagatcgtggcaaaactgtttaacgagctgggcccgcgtttcgcgagccgcgccggtggttacactcgcattctgaagtgtggcttccgtgcaggcgacaacgcgccgatggcatacatcgagctggttgatcgttcagagaaaacagaagctgctgcagagtaa

SEQ ID NO: 9996 - DNA, 990 bp, Salmonella typhi
  CDS (1)...(990)
atgcagggttctgtgacagagtttctaaaaccgcgcctggtagatatcgagcaagtgagttcgacgcacgccaaggtgacccttgagcctttagagcgtggcttcggccatactctgggtaacgcactgcgccgtattctgctctcatcgatgccgggttgcgcggtgaccgaggttgagattgatggtgtactacatgagtacagcaccaaagaaggcgttcaggaagacatcctggaaatcctgctcaacctgaaagggctggcggtgagagttcagggtaaagatgaagttattcttaccttgaataaatctggcattggccctgtgactgcagccgatatcacccatgatggggatgtcgaaatcgtcaagccgcagcacgtgatctgccacctgaccgatgaaaacgcgtctattagtatgcgtatcaaagttcagcgcggtcgtggttatgtgccggcttctacccgaattcattcggaagaagatgagcgcccaatcggccgtctgctggtcgacgcctgctacagccctgtagagcgtattgcctacaatgttgaagcagcgcgtgtagaacagcgtaccgacctggacaagctggtcatcgaaatggaaaccaacggcacaatcgatcctgaagaggcgattcgtcgtgcggcaaccatcctggctgaacaactggaagctttcgttgatttacgtgatgtacgtcaaccggaagtgaaagaagagaaaccagaattcgatccgatcctgctgcgccctgttgacgatctggaattgactgtccgctctgctaactgcctcaaggcagaagctatccactatatcggtgatctggtacagcgtaccgaggttgagcttcttaagacgcctaacctgggtaaaaaatctcttaccgagattaaagacgtgctggcttcccgtggactgtctctgggtatgcgcctggaaaactggccaccggcaagcatcgctgacgagtaa

SEQ ID NO: 9997 - DNA, 621 bp, Salmonella typhi
  CDS (1)...(621)
atggcaagatatttgggtcctaagctcaagctgagccgtcgtgagggcaccgacttattccttaagtctggcgttcgcgcgatcgataccaagtgtaaaattggacaagctcctggccagcacggtgcgcgtaagccgcgtctgtctgactatggtgtgcagttgcgtgaaaagcaaaaagttcgccgcatttacggtgtgctggagcgtcagttccgtaactactacaaagaagcagcacgtctgaaaggcaacaccggtgaaaacctgttggctctgctggaaggtcgtctggacaacgttgtataccgtatgggcttcggcgccactcgtgcagaagcacgtcagctggttagccataaagcaattatggtaaacggtcgtgttgttaacatcgcttcttatcaggttagtccgaatgacgttgttagcattcgtgagaaagcgaagaagcagtctcgcgtgaaagccgctctggagctggctgagcagcgtgaaaagccaacctggctggaagttgatgctggcaagatggaaggtacgtacaagcgtaagcctgagcgttctgatctgtctgcggacattaacgaacacctgatcgtcgagctttactccaagtaa

SEQ ID NO: 9998 - DNA, 390 bp, Salmonella typhi
  CDS (1)...(390)
atggcaaaggcaccagtttgcgcacgtaaacgtgtaagaaaacaagtctctgacggcgtggctcatatccatgcttctttcaacaacaccatcgtgactattaccgatcgtcagggtaatgcgctgggttgggcaacagccggtggttccggtttccgtggttctcgcaaatccactccgtttgcagctcaggttgcagcagagcgttgcgctgacgccgtgaaagaatacggtatcaagaatctggaagttatggttaaaggtccgggtccaggccgcgaatctactattcgtgctctgaacgccgctggtttccgcatcactaatattactgatgtgactccgatccctcataacggttgtcgtccgccgaaaaaacgtcgcgtataa

SEQ ID NO: 9999 - DNA, 357 bp, Salmonella typhi
  CDS (1)...(357)
  misc_feature (1)...(357): n = A,T,C or G
gtggcccgtatagcaggcattaanattcctgatcagaaacacgccgtgatcgcgttaacttcgatctacggtgtcggcaagacccgttctaaagccatcctggctgcagcgggtatcgctgaaaatgttaagatcagtgagctgtctgaagaacaaatcgacacgctgcgtgacgaagttgccaaatttgtcgttgaaggtgatctgcgccgtgaaatcagcatgagcatcaagcgcctgatggatcttggttgctatcgcggtttgcgtcatcgtcgtggtctcccggttcgcggtcagcgtaccaagaccaacgctcgtacccgtaagggtccgtgcaaaccgatcaagaaataa

SEQ ID NO: 10000 - DNA, 1332 bp, Salmonella typhi
  CDS (1)...(1332)
  misc_feature (1)...(1332): n = A,T,C or G
atggctaaacaaccgggattagattttcaaagtgccaaaggtggcttaggtgagctgaaacgcagactgctgtttgttatcggcgcgctgattgtgttccgtattggctcttttattccgatccctggtattgatgccgctgtacttgccaaactgcttgagcaacagcgaggcaccatcattgaaatgtttaacatgttctctggtggtgctctcagccgtgcttctatctttgccctggggatcatgccgtatatttcggcgtcgatcattatccagctgttgacggtggttcatccaacgctcgcagaaattaagaaagaaggggagtctggtcgtcgtaagatcagccagtacacccgttacggtactctggtgctggcgatattccagtcgatcggtattgctaccggtttgccgaatatgcctggtatgcagggcctggtgatgaatccaggctntgcattctatttcaccgctgttgtaagtctggttacagggaccatgttcctgatgtggctcggcgaacagattactgagcgcggtatcggtaacggtatctcaatcatcatcttcgctggtatcgttgcgggactcccgccagccattgcccatactatcgagcaagcgcgtcaaggcgacctgcacttcctcgtgttgctgttggttgcagtattagtatttgcagtgacgttctttgtagtattcgttgaacgtggtcaacgccgtattgtggtaaactacgccaaacgtcagcaaggtcgtcgtgtctatgctgcacagagcacacatttaccgctgaaagtgaatatggcgggggtaatcccggcaatcttcgcttccagtattattctgttcccggcgaccatagcgtcatggttcgggggcggtactggttggaactggctgacaacaatttcgctgtatttgcagcctgggcaaccgctttatgtgttactctatgcgtctgcaatcatcttcttctgtttcttctacacggcgttggttttcaacccgcgtgaaacagcagataacctgaagaagtccggtgcatttgtaccaggaattcgtccgggagagcaaacggcgaagtatatcgataaagtaatgacccacctgaccctggttggtgcgctgtatattacctttatctgcctgatcccggagttcatgcgtgatgcaatgaaagtgccgttctacttcggtgggacctcactgcttatcgttgttgtcgtgattatggactttatggctcaagtgcaaactctgatgatgtccagtcagtatgagtctgcattgaagaaggcgaacctgaaaggctacggccgttaa

SEQ ID NO: 10001 - DNA, 435 bp, Salmonella typhi
  CDS (1)...(435)
  misc_feature (1)...(435): n = A,T,C or G
atgcgtttaaatactctgtctccggccgaaggctccaaaaaggcgggtaaacgcctgggtcgtggtatcggttctggcctcggtaaaaccggtggtcgtggtcacaaaggtcagaagtctcgttctngcggtggcgtacgtcgcggtttcgagggtggtcagatgcctctgtaccgtcgtctgccgaaattcggcttcacttctcgcaaagcagcgattacagccgaagttcgtctgtctgacctggcgaaagtagaaggcggcgttgtagacctgaacacgctgaaagcggcaaacattatcggtatccagatcgagttcgcgaaagtgatcctggctggcgaagtcactactccggtaactgttcgtggcctgcgtgttactaaaggcgctcgtgctgctatcgaagctgctggcggtaaaatcgaggaataa

SEQ ID NO: 10002 - DNA, 822 bp, Salmonella typhi
  CDS (1)...(822)
  misc_feature (1)...(822): n = A,T,C or G
atgatggaagcctatgctgtttttggaaatccgattgcgcacagcaaatcgccatttattcatcagcaatttgctcagcagctagatattgttcacccctatggtcgcgtgctggcccccattaataatttcattaatacgcttgatgcctttttcgcggcagggggaaaaggcgcaaacatcacagtaccttttaaagaggaggcgtttgcgcgttcggatgagttaacggaacgagcatcnctggcgggagccgtcnatacattnanacggctggaagatggtcgtttgcntggcgacaatactgacggtatcggtttattaagcnatctcgaacgtntaaattttatccgcccaggattgcgtattttgctgattggcgcggncggcgcatcccggggcgtgctgttacccctgctttctttggattgtgcggtcactatcactaaccgtacagcttcacgtgccgaagcgttggcgaaaatctttgctcataccggcagcgttcatgctatggatatggacaagctggatggttgtgagtttgacctgattattaatgcgacctccagcggcatacggggcgaaatcccggcgattccggcgtcacttattcatccttccctctgttgctatgacatgttctatcaaaaagggaatacgccatttctctcctggtgtgtacaacagggcgcgaaacgctacgcagatgggctgggaatgctggtggggcaggctgcacatgccgttttgctttggcacggtgtattaccgcaggtcgagccagtgattaagntgctacagcaggaattattagcgtga

SEQ ID NO: 10003 - DNA, 504 bp, Salmonella typhi
  CDS (1)...(504)
atggctcacatcgaaaaacaagctggcgaactgcaggaaaagctgatcgcggtaaaccgcgtatctaaaaccgttaaaggtggtcgtattttctccttcacagctctgactgtagtaggcgatggtaacggtcgcgtaggttttggttacggtaaagcgcgtgaagttccagcagcgatccagaaagcgatggaaaaagcccgtcgcaatatgattaacgtcgcgctgaacaacggcaccctgcagcacccggttaaaggtgttcacacggggtctcgtgtattcatgcagccagcttccgaaggtaccggtatcatcgccggtggtgcaatgcgcgccgttctggaagttgctggggttcataacgttctggctaaagcatacggttccaccaacccgatcaacgtggttcgtgcaactattgatggcctggaaaatatgaattctccagaaatggtcgctgccaagcgtggtaaatccgttgaagaaattctggggaaataa

SEQ ID NO: 10004 - DNA, 354 bp, Salmonella typhi
  CDS (1)...(354)
atggataagaaatctgctcgtatccgtcgtgcgacccgcgcacgccgcaagctcaaagagctgggcgcaactcgcctggtggtacatcgtaccccgcgtcatatttacgcacaggtaattgcaccgaacggttctgaagttctggtagctgcttctactgtagaaaaagctatcgctgaacaactgaagtacaccggtaacaaagatgcggctgcagctgtgggtaaagctgtcgctgaacgcgctctggaaaaaggcatcaaagatgtgtcctttgaccgttccgggttccaatatcatggtcgtgtccaggcactggcagatgctgcccgtgaagctggccttcagttctaa

SEQ ID NO: 10005 - DNA, 534 bp, Salmonella typhi
  CDS (1)...(534)
atgtctcgtgttgctaaagcaccggtcgttgttcctgccggcgttgatgtcaaaatcaacggtcaggttattacgatcaaaggtaaaaacggcgagctgactcgtactctcaacgatgctgttgaagttaaacatgcagataatgcactgaccttcggtccgcgtgatggttacgcagacggttgggcacaggctggtaccgcgcgtgccctgctgaactcaatggttatcggtgttaccgaaggcttcactaagaagctgcagctggttggtgtaggttatcgtgcagcggttaaagggaatgtagtaaacctgtctttaggtttctctcacccggttgaccatcagctgccggcaggtatcactgctgaatgtccgactcaaactgaaatcgtgctgaaaggcgctgataagcaggtgatcggccaggttgcagcagatctgcgcgcctaccgtcgtcctgagccttacaaaggcaagggtgttcgttacgccgacgaagtcgtgcgtaccaaagaggctaagaagaagtaa

SEQ ID NO: 10006 - DNA, 393 bp, Salmonella typhi
  CDS (1)...(393)
  misc_feature (1)...(393): n = A,T,C or G
atgagcatgcaagatccgatcgcggatatgctgacccgtatccgtaacggtcaggccgcgaacaaagctgcggtcaccatgccttcctctaagctgaaagtggcaattgccaacgtgctgaaggaagaaggttttattgaagattttanagttgaaggcgacaccaagccggaactggaactgactcttaagtatttccagggtaaagctgttgtagaaagcattcagcgtgtcagccgcccaggcctgcgcatctacaaacgtaaagatgagctgccgaaagttatggccggtctgggtatcgcagttgtttctacctctaaaggtgttatgacagatcgtgcagcgcgccaggctggtcttggtggcgaaattatctgctacgtagcctaa

SEQ ID NO: 10007 - DNA, 306 bp, Salmonella typhi
  CDS (1)...(306)
atggctaagcaatcaatgaaagcacgcgaagtaaaacgcgtagctttagctgataaatacttcgcgaaacgcgctgaactgaaagcgatcatctctgatgtgaacgcaaccgacgaagatcgttggaatgcggttcttaagctgcagactctgccgcgtgattccagcccgtcacgtcagcgtaaccgctgccgtcaaactggtcgtccgcacgctttcctgcggaagttcgggttgagccgtattaaggtccgtgaagccgctatgcgcggtgaaattccgggtctgaaaaaggctagctggtaa

SEQ ID NO: 10008 - DNA, 540 bp, Salmonella typhi
  CDS (1)...(540)
  misc_feature (1)...(540): n = A,T,C or G
atggcgaaactgcatgattactacaaagacgaagtagttaacaaactcatgactgagtttaactacaattctgtcatgcaagtccctcgggtcgagaagatcaccctgaacatgggtgttggtgaagcgatcgctgacnagaaactgctggataacgcagcagcagacctgacagcaatctccggtcaaaaaccgttgatcaccaaagcacgcaaatctgttgcaggcttcaaaatccgtcanggctatccgatcggctgtaaagtaactctgcgtggcgaacgcatgtgggagttctttgagcgcctgatcactattgctgttcctcgtatccgtgacttccgtggcttgtccgctaagtcattcgacggtcgtggtaactacagcatgggtgtccgtgagcagatcatcttcccagaaatcgactacgataaagtcgaccgcgttcgtggtttggatattaccattaccactactgcgaaatctgacgaagaaggccgtgctctgctggctgcctttgacttcccgttccgcaagtaa

SEQ ID NO: 10009 - DNA, 315 bp, Salmonella typhi
  CDS (1)...(315)
  misc_feature (1)...(315): n = A,T,C or G
atggcagcgannatccgtcgtgatgacgaagttatcgtgttaaccggtaaagataaaggtaaacgcggtaaagttaagaatgtcctgtcttccggcaangtcattgttgaangtatcaacctggttaaganacaccagaagccggttccggctctgaaccaaccgggcggcatcgttgaaaaagaagctgcaattcaggtntctaacgttgcaatcttcaatacggcaaccggcaaggctgaccgtgtaggctttagattcgaagacggcaaaaaagtccgtttcttcaagtctaacagcgaaactatcaagtaa

SEQ ID NO: 10010 - DNA, 372 bp, Salmonella typhi
  CDS (1)...(372)
  misc_feature (1)...(372): n = A,T,C or G
atgatccaagaacagactatgctgaacgtcgccgacaactccggtgcacgtcgcgtaatgtgtatcaaggttctgggtggctcgcaccgtcgctacgcaggcgtaggcgacatcattaagatcaccatcaaagaagcgattccgcgtggtaaggtcaaaaaaggtgatgtgctgaaggcggtagtggtgcgcaccaagaagggtgttcgtcgcccggacggttctgtcattcgcttcgatggtaatgcatgcgttattttaaacaataacagcgagcagcctatcggtacgcgtatttttgggccggtaactcgtgaacttcgtaacgagaagttcatgaaaatnatctctctggcaccagaagtactctaa

SEQ ID NO: 10011 - DNA, 654 bp, Salmonella typhi
  CDS (1)...(654)
atgtctgaggcaatgatgtggttactggttcgtggcgtctgggaaacgctggcgatgacctttgtctccggtttcttcggtttcgtgattggcctgccggttggcgtattgctgtatgttacgcgcccggggcagattatggagaacgccaggctgtatcgctccctctctgcggtggtcaatattttccgctcgattccctttatcatcctgttggtgtggatgattccttttacccgaataattgtcggcacctccattggtttgcaggccgcgattgtaccgctgaccgtcggcgccgcgccttttatcgcccgtatagtggaaaatgcgttgttagagatccctgccgggctgattgaagcctcgcgagcgatgggcgccacgccgctgcaaattgtacgtaaaatccttttaccggaagcgctgcctggtctggtgaatgcggcaaccattacactaatcaccctggtcggttactccgcaatgggcggcgccgtcggcgcaggcggcctcggtcaaatcggctatcagtacggttatattggatacaatgctaccgtgatgaatacggtgctggtattacttgtcgttctggtttatttaattcagttatccggcgatcgcatcgtcagggctgtcacgcataagtaa

SEQ ID NO: 10012 - DNA, 1032 bp, Salmonella typhi
  CDS (1)...(1032)
  misc_feature (1)...(1032): n = A,T,C or G
atgattaaactttcgaatattaccaaagtgttccagcagggggcgcgcaccattcaggcgctgaacaatgtcagcctgcatgtccctgccggacaaatttacggcgtcatcggcgcctccggcgccggtaaaagtacgctcattcgctgcgtaaacttacttgaacgtcctactgaaggaagcgtaatggtaggcggtcaggagctgacaacgctttcagagtccgggttgaccaaagctcgccgtcaaatcggcatgattttccaacattttaacctgctctcttcccgtaccgtgtttggcaacgtcgcgttgccgctggaactggataacacaccaaaggaagagatcaaacgccgtgtcacagagctgctggatttagtcggtcttggcgacaagcacgacagctatccggcaaatctttccggcggtcagaaacagcgtgtcgcgattgcccgcgcgttagccagtaatccaaaagtgttgctgtgcgatgaagccaccagcgcgcttgatcccgcgacgacccgttcgattctggaattgctgaaagatatcaaccgtcgtctggggttgacgattctgcttatcactcatgaaatggatgtcgtanaacgtatctgcgactgcgttgcngtcatcagtaatggcgagcttattgagcangatacnntcagcgaagtcttctcgcatcntannacgccgctggcgcagaagtntatncagtccactctgcatctggacattccggaagattaccaggcgcgtatgaaagcgtcgccggaaactgacagcgtgccgatgctgcgcatggagttcaccggacagtctgtggatgccccgctgctttctgaaaccgcgcgtcgtttcaacgtgaacaataatattatcagcgcacagatggattacgcgggcggtgtgaagttcggcattatgctaacggaaatgcacggcacacaagaagagacgcaagccgcaattgcctggctgcaggatcaccatgtgaaagtagaggtactgggttatgtctga

SEQ ID NO: 10013 - protein, 310 aa, Escherichia coli
MVKVYAPASSANMSVGFDVLGAAVTPVDGALLGDVVTVEAAETFSLNNLGRFADKLPSEPRENIVYQCWERFCQELGKQIPVAMTLEKNMPIGSGLGSSACSVVAALMAMNEHCGKPLNDTRLLALMGELEGRISGSIHYDNVAPCFLGGMQLMIEENDIISQQVPGFDEWLWVLAYPGIKVSTAEARAILPAQYRRQDCIAHGRHLAGFIHACYSRQPELAAKLMKDVIAEPYRERLLPGFRQARQAVAEIGAVASGISGSGPTLFALCDKPETAQRVADWLGKNYLQNQEGFVHICRLDTAGARVLEN

SEQ ID NO: 10014 - protein, 476 aa, Escherichia coli
MPDFFSFINSVLWGSVMIYLLFGAGCWFTFRTGFVQFRYIRQFGKSLKNSIHPQPGGLTSFQSLCTSLAARVGSGNLAGVALAITAGGPGAVFWMWVAAFIGMATSFAECSLAQLYKERDVNGQFRGGPAWYMARGLGMRWMGVLFAVFLLIAYGIIFSGVQANAVARALSFSFDFPPLVTGIILAVFTLLAITRGLHGVARLMQGFVPLMAIIWVLTSLVICVMNIGQLPHVIWSIFESAFGWQEAAGGAAGYTLSQAITNGFQRSMFSNEAGMGSTPNAAAAAASWPPHPAAQGIVQMIGIFIDTLVICTASAMLILLAGNGTTYMPLEGIQLIQKAMRVLMGSWGAEFVTLVVILFAFSSIVANYIYAENNLFFLRLNNPKAIWCLRICTFATVIGGTLLSLPLMWQLADIIMACMAITNLTAILLLSPVVHTIASDYLRQRKLGVRPVFDPLRYPDIGRQLSPDAWDDVSQE

SEQ ID NO: 10015 - protein, 638 aa, Escherichia coli
MGKIIGIDLGTTNSCVAIMDGTTPRVLENAEGDRTTPSIIAYTQDGETLVGQPAKRQAVTNPQNTLFAIKRLIGRRFQDEEVQRDVSIMPFKIIAADNGDAWVEVKGQKMAPPQISAEVLKKMKKTAEDYLGEPVTEAVITVPAYFNDAQRQATKDAGRIAGLEVKRIINEPTAAALAYGLDKGTGNRTIAVYDLGGGTFDISIIEIDEVDGEKTFEVLATNGDTHLGGEDFDSRLINYLVEEFKKDQGIDLRNDPLAMQRLKEAAEKAKIELSSAQQTDVNLPYITADATGPKHMNIKVTRAKLESLVEDLVNRSIEPLKVALQDAGLSVSDIDDVILVGGQTRMPMVQKKVAEFFGKEPRKDVNPDEAVAIGAAVQGGVLTGDVKDVLLLDVTPLSLGIETMGGVMTTLIAKNTTIPTKHSQVFSTAEDNQSAVTIHVLQGERKRAADNKSLGQFNLDGINPAPRGMPQIEVTFDIDADGILHVSAKDKNSGKEQKITIKASSGLNEDEIQKMVRDAEANAEADRKFEELVQTRNQGDHLLHSTRKQVEEAGDKLPADDKTAIESALTALETALKGEDKAAIEAKMQELAQVSQKLMEIAQQQHAQQQTAGADASANNAKDDDVVDAEFEEVKDKK

SEQ ID NO: 10016 - protein, 938 aa, Escherichia coli
MSDYKSTLNLPETGFPMRGDLAKREPGMLARWTDDDLYGIIRAAKKGKKTFILHDGPPYANGSIHIGHSVNKILKDIIVKSKGLSGYDSPYVPGWDCHGLPIELKVEQEYGKPGEKFTAAEFRAKCREYAATQVDGQRKDFIRLGVLGDWSHPYLTMDFKTEANIIRALGKIIGNGHLHKGAKPVHWCVDCRSALAEAEVEYYDKTSPSIDVAFQAVDQDALKAKFAVSNVNGPISLVIWTTTPWTLPANRAISIAPDFDYALVQIDGQAVILAKDLVESVMQRIGVTDYTILGTVKGAELELLRFTHPFMGFDVPAILGDHVTLDAGTGAVHTAPGHGPDDYVIGQKYGLETANPVGPDGTYLPGTYPTLDGVNVFKANDIVVALLQEKGALLHVEKMQHSYPCCWRHKTPIIFRATPQWFVSMDQKGLRAQSLKEIKGVQWIPDWGQARIESMVANRPDWCISRQRTWGVPMSLFVHKDTEELHPRTLELMEEVAKRVEVDGIQAWWDLDAKEILGDEADQYVKVPDTLDVWFDSGSTHSSVVDVRPEFAGHAADMYLEGSDQHRGWFMSSLMISTAMKGKAPYRQVLTHGFTVDGQGRKMSKSIGNTVSPQDVMNKLGADILRLWVASTDYTGEMAVSDEILKRAADSYRRIRNTARFLLANLNGFDPAKDMVKPEEMVVLDRWAVGCAKAAQEDILKAYEAYDFHEVVQRLMRFCSVEMGSFYLDIIKDRQYTAKADSVARRSCQTALYHIAEALVRWMAPILSFTADEVWGYLPGEREKYVFTGEWYEGLFGLADSEAMNDAFWDELLKVRGEVNKVIEQARADKKVGGSLEAAVTLYAEPELSAKLTALGDELRFVLLTSGATVADYNDAPADAQQSEVLKGLKVALSKAEGEKCPRCWHYTQDVGKVAEHAEICGRCVSNVAGDGEKRKFA

SEQ ID NO: 10017 - protein, 273 aa, Escherichia coli
MHDANIRVAIAGAGGRMGRQLIQAALALEGVQLGAALEREGSSLLGSDAGELAGAGKTGVTVQSSLDAVKDDFDVFIDFTRPEGTLNHLAFCRQHGKGMVIGTTGFDEAGKQAIRDAAADIAIVFAANFSVGVNVMLKLLEKAAKVMGDYTDIEIIEAHHRHKVDAPSGTALAMGEAIAHALDKDLKDCAVYSREGHTGERVPGTIGFATVRAGDIVGEHTAMFADIGERLEITHKASSRMTFANGAVRSALWLSGKESGLFDMRDVLDLNNL

SEQ ID NO: 10018 - protein, 159 aa, Escherichia coli [sequence omitted]

SEQ ID NO: 10019 - protein, 273 aa, Escherichia coli
MNNRVHQGHLARKRFGQNFLNDQFVIDSIVSAINPQKGQAMVEIGPGLAALTEPVGERLDQLTVIELDRDLAARLQTHPFLGPKLTIYQQDAMTFNFGELAEKMGQPLRVFGNLPYNISTPLMFHLFSYTDAIADMHFMLQKEVVNRLVAGPNSKAYGRLSVMAQYYCNVIPVLEVPPSAFTPPPKVDSAVVRLVPHATMPHPVKDVRVLSRITTEAFNQRRKTIRNSLGNLFSVEVLTGMGIDPAMRAENISVAQYCQMANYLAENAPLQES

SEQ ID NO: 10020 - protein, 201 aa, Escherichia coli
MAEKFIKHTGLVVPLDAANVDTDAIIPKQFLQKVTRTGFGAHLFNDWRFLDEKGQQPNPDFVLNFPQYQGASILLARENFGCGSSREHAPWALTDYGFKVVIAPSFADIFYGNSFNNQLLPVKLSDAEVDELFALVKANPGIHFDVDLEAQEVKAGEKTYRFTIDAFRRHCMMNGLDSIGLTLQHDDAIAAYEAKQPAFMN

SEQ ID NO: 10021 - protein, 466 aa, Escherichia coli
MAKTLYEKLFDAHVVYEAENETPLLYIDRHLVHEVTSPQAFDGLRAHGRPVRQPGKTFATMDHNVSTQTKDINACGEMARIQMQELIKNCKEFGVELYDLNHPYQGIVHVMGPEQGVTLPGMTIVCGDSHTATHGAFGALAFGIGTSEVEHVLATQTLKQGRAKTMKIEVQGKAAPGITAKDIVLAIIGKTGSAGGTGHVVEFCGEAIRDLSMEGRMTLCNMAIEMGAKAGLVAPDETTFNYVKGRLHAPKGKDFDDAVAYWKTLQTDEGATFDTVVTLQAEEISPQVTWGTNPGQVISVNDNIPDPASFADPVERASAEKALAYMGLKPGIPLTEVAIDKVFIGSCTNSRIEDLRAAAEIAKGRKVAPGVQALVVPGSGPVKAQAEAEGLDKIFIEAGFEWRLPGCSMCLAMNNDRLNPGERCASTSNRNFEGRQGRGGRTHLVSPAMAAAAAVTGHFADIRNIK

SEQ ID NO: 10022 - protein, 604 aa, Escherichia coli
MFMSLAANCLSKIGRLMCFTHFFRQTVRQAMEMLSGAEMVVRSLIDQGVKQVFGYPGGAVLDIYDALHTVGGIDHVLVRHEQAAVHMADGLARATGEVGVVLVTSGPGATNAITGIATAYMDSIPLVVLSGQVATSLIGYDAFQECDMVGISRPVVKHSFLVKQTEDIPQVLKKAFWLAASGRPGPVVVDLPKDILNPANKLPYVWPESVSMRSYNPTTTGHKGQIKRALQTLVAAKKPVVYVGGGAITAGCHQQLKETVEALNLPVVCSLMGLGAFPATHRQALGMLGMHGTYEANMTMHNADVIFAVGVRFDDRTTNNLAKYCPNATVLHIDIDPTSISKTVTADIPIVGDARQVLEQMLELLSQESAHQPLDEIRDWWQQIEQWRARQCLKYDTHSEKIKPQAVIETLWRLTKGDAYVTSDVGQHQMFAALYYPFDKPRRWINSGGLGTMGFGLPAALGVKMALPEETVVCVTGDGSIQMNIQELSTALQYELPVLVVNLNNRYLGMVKQWQDMIYSGRHSQSYMQSLPDFVRLAEAYGHVGIQISHPHELESKLSEALEQVRNNRLVFVDVTVDGSEHVYPMQIRGGGMDEMWLSKTERT

SEQ ID NO: 10023 - protein, 163 aa, Escherichia coli
MRRILSVLLENESGALSRVIGLFSQRGYNIESLTVAPTDDPTLSRMTIQTVGDEKVLEQIEKQLHKLVDVLRVSELGQGAHVEREIMLVKIQASGYGRDEVKRNTEIFRGQIIDVTPSLYTVQLAGTSGKLDAFLASIRDVAKIVEVARSGVVGLSRGDKIMR

SEQ ID NO: 10024 - protein, 313 aa, Escherichia coli
MMENYKHTTVLLDEAVNGLNIRPDGIYIDGTFGRGGHSRLILSQLGEEGRLLAIDRDPQAIAVAKTIDDPRFSIIHGPFSALGEYVAERDLIGKIDGILLDLGVSSPQLDDAERGFSFMRDGPLDMRMDPTRGQSAAEWLQTAEEADIAWVLKTYGEERFAKRIARAIVERNREQPMTRTKELAEVVAAATPVKDKFKHPATRTFQAVRIWVNSELEEIEQALKSSLNVLAPGGRLSIISFHSLEDRIVKRFMRENSRGPQVPAGLPMTEEQLKKLGGRQLRALGKLMPGEEEVAENPRARSSVLRIAERTNA

SEQ ID NO: 10025 - protein, 588 aa, Escherichia coli
MKAAAKTQKPKRQEEHANFISWRFALLCGCILLALAFLLGRVAWLQVISPDMLVKEGDMRSLRVQQVSTSRGMITDRSGRPLAVSVPVKAIWADPKEVHDAGGISVGDRWKALANALNIPLDQLSARINANPKGRFIYLARQVNPDMADYIKKLKLPGIHLREESRRYYPSGEVTAHLIGFTNVDSQGIEGVEKSFDKWLTGQPGERIVRKDRYGRVIEDISSTDSQAAHNLALSIDERLQALVYRELNNAVAFNKAESGSAVLVDVNTGEVLAMANSPSYNPNNLSGTPKEAMRNRTITDVFEPGSTVKPMVVMTALQRGVVRENSVLNTIPYRINGHEIKDVARYSELTLTGVLQKSSNVGVSKLALAMPSSALVDTYSRFGLGKATNLGLVGERSGLYPQKQRWSDIERATFSFGYGLMVTPLQLARVYATIGSYGIYRPLSITKVDPPVPGERVFPESIVRTVVHMMESVALPGGGGVKAAIKGYRIAIKTGTAKKVGPDGRYINKYIAYTAGVAPASQPRFALVVVINDPQAGKYYGGAVSAPVFGAIMGGVLRTMNIEPDALTTGDKNEFVINQGEGTGGRS

SEQ ID NO: 10026 - protein, 495 aa, Escherichia coli
MADRNLRDLLAPWVPDAPSRALREMTLDSRVAAAGDLFVAVVGHQADGRRYIPQAIAQGVAAIIAEAKDEATDGEIREMHGVPVIYLSQLNERLSALAGRFYHEPSDNLRLVGVTGTNGKTTTTQLLAQWSQLLGEISAVMGTVGNGLLGKVIPTENTTGSAVDVQHELAGLVDQGATFCAMEVSSHGLVQHRVAALKFAASVFTNLSRDHLDYHGDMEHYEAAKWLLYSEHHCGQAIINADDEVGRRWLAKLPDAVAVSMEDHINPNCHGRWLKATEVNYHDSGATIRFSSSWGDGEIESHLMGAFNVSNLLLALATLLALGYPLADLLKTAARLQPVCGRMEVFTAPGKPTVVVDYAHTPDALEKALQAARLHCAGKLWCVFGCGGDRDKGKRPLMGAIAEEFADVAVVTDDNPRTEEPRAIINDILAGMLDAGHAKVMEGRAEAVTCAVMQAKENDVVLVAGKGHEDYQIVGNQRLDYSDRVTVARLLGVIA

SEQ ID NO: 10027 - protein, 452 aa, Escherichia coli
MISVTLSQLTDILNGELQGADITLDAVTTDTRKLTPGCLFVALKGERFDAHDFADQAKAGGAGALLVSRPLDIDLPQLIVKDTRLAFGELAAWVRQQVPARVVALTGSSGKTSVKEMTAAILSQCGNTLYTAGNLNNDIGVPMTLLRLTPEYDYAVIELGANHQGEIAWTVSLTRPEAALVNNLAAAHLEGFGSLAGVAKAKGEIFSGLPENGIAIMNADNNDWLNWQSVIGSRKVWRFSPNAANSDFTATNIHVTSHGTEFTLQTPTGSVDVLLPLPGRHNIANALAAAALSMSVGATLDAIKAGLANLKAVPGRLFPIQLAENQLLLDDSYNANVGSMTAAVQVLAEMPGYRVLVVGDMAELGAESEACHVQVGEAAKAAGIDRVLSVGKQSHAISTASGVGEHFADKTALITRLKLLIAEQQVITILVKGSRSAAMEEVVRALQENGTC

SEQ ID NO: 10028 - protein, 360 aa, Escherichia coli
MLVWLAEHLVKYYSGFNVFSYLTFRAIVSLLTALFISLWMGPRMIAHLQKLSFGQVVRNDGPESHFSKRGTPTMGGIMILTAIVISVLLWAYPSNPYVWCVLVVLVGYGVIGFVDDYRKVVRKDTKGLIARWKYFWMSVIALGVAFALYLAGKDTPATQLVVPFFKDVMPQLGLFYILLAYFVIVGTGNAVNLTDGLDGLAIMPTVFVAGGFALVAWATGNMNFASYLHIPYLRHAGELVIVCTAIVGAGLGFLWFNTYPAQVFMGDVGSLALGGALGIIAVLLRQEFLLVIMGGVFVVETLSVILQVGSFKLRGQRIFRMAPIHHHYELKGWPEPRVIVRFWIISLMLVLIGLATLKVR

SEQ ID NO: 10029 - protein, 438 aa, Escherichia coli
MADYQGKNVVIIGLGLTGLSCVDFFLARGVTPRVMDTRMTPPGLDKLPEAVERHTGSLNDEWLMAADLIVASPGIALAHPSLSAAADAGIEIVGDIELFCREAQAPIVAITGSNGKSTVTTLVGEMAKAAGVNVGVGGNIGLPALMLLDDECELYVLELSSFQLETTSSLQAVAATILNVTEDHMDRYPFGLQQYRAAKLRIYENAKVCVVNADDALTMPIRGADERCVSFGVNMGDYHLNHQQGETWLRVKGEKVLNVKEMKLSGQHNYTNALAALALADAAGLPRASSLKALTTFTGLPHRFEVVLEHNGVRWINDSKATNVGSTEAALNGLHVDGTLHLLLGGDGKSADFSPLARYLNGDNVRLYCFGRDGAQLAALRPEVAEQTETMEQAMRLLAPRVQPGDMVLLSPACASLDQFKNFEQRGNEFARLAKELG

SEQ ID NO: 10030 - protein, 414 aa, Escherichia coli
MRLSLPRLKMPRLPGFSILVWISTALKGWVMGSREKDTDSLIMYDRTLLWLTFGLAAIGFIMVTSASMPIGQRLTNDPFFFAKRDGVYLILAFILAIITLRLPMEFWQRYSATMLLGSIILLMIVLVVGSSVKGASRWIDLGLLRIQPAELTKLSLFCYIANYLVRKGDEVRNNLRGFLKPMGVILVLAVLLLAQPDLGTVVVLFVTTLAMLFLAGAKLWQFIAIIGMGISAVVLLILAEPYRIRRVTAFWNPWEDPFGSGYQLTQSLMAFGRGELWGQGLGNSVQKLEYLPEAHTDFIFAIIGEELGYVGVVLALLMVFFVAFRAMSIGRKALEIDHRFSGFLACSIGIWFSFQALVNVGAAAGMLPTKGLTLPLISYGGSSLLIMSTAIMMLLRIDYETRLEKAQAFVRGSR

SEQ ID NO: 10031 - protein, 355 aa, Escherichia coli
MSGQGKRLMVMAGGTGGHVFPGLAVAHHLMAQGWQVRWLGTADRMEADLVPKHGIEIDFIRISGLRGKGIKALIAAPLRIFNAWRQARAIMKAYKPDVVLGMGGYVSGPGGLAAWSLGIPVVLHEQNGIAGLTNKWLAKIATKVMQAFPGAFPNAEVVGNPVRTDVLALPLPQQRLAGREGPVRVLVVGGSQGARILNQTMPQVAAKLGDSVTIWHQSGKGSQQSVEQAYAEAGQPQHKVTEFIDDMAAAYAWADVVVCRSGALTVSEIAAAGLPALFVPFQHKDRQQYWNALPLEKAGAAKIIEQPQLSVDAVANTLAGWSRETLLTMAERARAASIPDATERVANEVSRVARA

SEQ ID NO: 10032 - protein, 491 aa, Escherichia coli
MNTQQLAKLRSIVPEMRRVRHIHFVGIGGAGMGGIAEVLANEGYQISGSDLAPNPVTQQLMNLGATIYFNHRPENVRDASVVVVSSAISADNPEIVAAHEARIPVIRRAEMLAELMRFRHGIAIAGTHGKTTTTAMVSSIYAEAGLDPTFVNGGLVKAAGVHARLGHGRYLIAEADESDASFLHLQPMVAIVTNIEADHMDTYQGDFENLKQTFINFLHNLPFYGRAVMCVDDPVIRELLPRVGRQTTTYGFSEDADVRVEDYQQIGPQGHFTLLRQDKEPMRVTLNAPGRHNALNAAAAVAVATEEGIDDEAILRALESFQGTGRRFDFLGEFPLEPVNGKSGTAMLVDDYGHHPTEVDATIKAARAGWPDKNLVMLFQPHRFTRTRDLYDDFANVLTQVDTLLMLEVYPAGEAPIPGADSRSLCRTIRGRGKIDPILVPDPARVAEMLAPVLTGNDLILVQGAGNIGKIARSLAEIKLKPQTPEEEQHD

SEQ ID NO: 10033 - protein, 383 aa, Escherichia coli
MFEPMELTNDAVIKVIGVGGGGGNAVEHMVRERIEGVEFFAVNTDAQALRKTAVGQTIQIGSGITKGLGAGANPEVGRNAADEDRDALRAALEGADMVFIAAGMGGGTGTGAAPVVAEVAKDLGILTVAVVTKPFNFEGKKRMAFAEQGITELSKHVDSLITIPNDKLLKVLGRGISLLDAFGAANDVLKGAVQGIAELITRPGLMNVDFADVRTVMSEMGYAMMGSGVASGEDRAEEAAEMAISSPLLEDIDLSGARGVLVNITAGFDLRLDEFETVGNTIRAFASDNATVVIGTSLDPDMNDELRVTVVATGIGMDKRPEITLVTNKQVQQPVMDRYQQHGMAPLTQEQKPVAKVVNDNAPQTAKEPDYLDIPAFLRKQAD

SEQ ID NO: 10034 - protein, 901 aa, Escherichia coli
MLIKLLTKVFGSRNDRTLRRMRKVVNIINAMEPEMEKLSDEELKGKTAEFRARLEKGEVLENLIPEAFAVVREASKRVFGMRHFDVQLLGGMVLNERCIAEMRTGEGKTLTATLPAYLNALTGKGVHVVTVNDYLAQRDAENNRPLFEFLGLTVGINLPGMPAPAKREAYAADITYGTNNEYGFDYLRDNMAFSPEERVQRKLHYALVDEVDSILIDEARTPLIISGPAEDSSEMYKRVNKIIPHLIRQEKEDSETFQGEGHFSVDEKSRQVNLTERGLVLIEELLVKEGIMDEGESLYSPANIMLMHHVTAALRAHALFTRDVDYIVKDGEVIIVDEHTGRTMQGRRWSDGLHQAVEAKEGVQIQNENQTLASITFQNYFRLYEKLAGMTGTADTEAFEFSSIYKLDTVVVPTNRPMIRKDLPDLVYMTEAEKIQAIIEDIKERTAKGQPVLVGTISIEKSELVSNELTKAGIKHNVLNAKFHANEAAIVAQAGYPAAVTIATNMAGRGTDIVLGGSWQAEVAALENPTAEQIEKIKADWQVRHDAVLEAGGLHIIGTERHESRRIDNQLRGRSGRQGDAGSSRFYLSMEDALMRIFASDRVSGMMRKLGMKPGEAIEHPWVTKAIANAQRKVESRNFDIRKQLLEYDDVANDQRRAIYSQRNELLDVSDVSETINSIREDVFKATIDAYIPPQSLEEMWDIPGLQERLKNDFDLDLPIAEWLDKEPELHEETLRERILAQSIEVYQRKEEVVGAEMMRHFEKGVMLQTLDSLWKEHLAAMDYLRQGIHLRGYAQKDPKQEYKRESFSMFAAMLESLKYEVISTLSKVQVRMPEEVEELEQQRRMEAERLAQMQQLSHQDDDSAAAAALAAQTGERKVGRNDPCPCGSGKKYKQCHGRLQ

SEQ ID NO: 10035 - protein, 347 aa, Escherichia coli
MRIEEDLKLGFKDVLIRPKRSTLKSRSDVELERQFTFKHSGQSWSGVPIIAANMDTVGTFSMASALASFDILTAVHKHYSVEEWQAFINNSSADVLKHVMVSTGTSDADFEKTKQILDLNPALNFVCIDVANGYSEHFVQFVAKAREAWPTKTICAGNVVTGEMCEELILSGADIVKVGIGPGSVCTTRVKTGVGYPQLSAVIECADAAHGLGGMIVSDGGCTTPGDVAKAFGGGADFVMLGGMLAGHEESGGRIVEENGEKFMLFYGMSSESAMKRHVGGVAEYRAAEGKTVKLPLRGPVENTARDILGGLRSACTYVGASRLKELTKRTTFIRVQEQENRIFNNL

SEQ ID NO: 10036 - protein, 630 aa, Escherichia coli
MAIEIKVPDIGADEVEITEILVKVGDKVEAEQSLITVEGDKASMEVPSPQAGIVKEIKVSVGDKTQTGALIMIFDSADGAADAAPAQAEEKKEAAPAAAPAAAAAKDVNVPDIGSDEVEVTEILVKVGDKVEAEQSLITVEGDKASMEVPAPFAGTVKEIKVNVGDKVSTGSLIMVFEVAGEAGAAAPAAKQEAAPAAAPAPAAGVKEVNVPDIGGDEVEVTEVMVKVGDKVAAEQSLITVEGDKASMEVPAPFAGVVKELKVNVGDKVKTGSLIMIFEVEGAAPAAAPAKQEAAAPAPAAKAEAPAAAPAAKAEGKSEFAENDAYVHATPLIRRLAREFGVNLAKVKGTGRKGRILREDVQAYVKEAIKRAEAAPAATGGGIPGMLPWPKVDFSKFGEIEEVELGRIQKISGANLSRNWVMIPHVTHFDKTDITELEAFRKQQNEEAAKRKLDVKITPVVFIMKAVAAALEQMPRFNSSLSEDGQRLTLKKYINIGVAVDTPNGLVVPVFKDVNKKGIIELSRELMTISKKARDGKLTAGEMQGGCFTISSIGGLGTTHFAPIVNAPEVAILGVSKSAMEPVWNGKEFVPRLMLPISLSFDHRVIDGADGARFITIINNTLSDIRRLVM

SEQ ID NO: 10037 - protein, 474 aa, Escherichia coli [sequence omitted]

SEQ ID NO: 10038 - protein, 264 aa, Escherichia coli
MKPTTISLLQKYKQEKKRFATITAYDYSFAKLFADEGLNVMLVGDSLGMTVQGHDSTLPVTVADIAYHTAAVRRGAPNCLLLADLPFMAYATPEQAFENAATVMRAGANMVKIEGGEWLVETVQMLTERAVPVCGHLGLTPQSVNIFGGYKVQGRGDEAGDQLLSDALALEAAGAQLLVLECVPVELAKRITEALAIPVIGIGAGNVTDGQILVMHDAFGITGGHIPKFAKNFLAETGDIRAAVRQYMAEVESGVYPGEEHSFH

SEQ ID NO: 10039 - protein, 844 aa, Escherichia coli
MAGNDREPIGRKGKPTRPVKQKVSRRRYEDDDDYDDYDDYEDEEPMPRKGKGKGKGRKPRGKRGWLWLLLKLAIVFAVLIAIYGVYLDQKIRSRIDGKVWQLPAAVYGRMVNLEPDMTISKNEMVKLLEATQYRQVSKMTRPGEFTVQANSIEMIRRPFDFPDSKEGQVRARLTFDGDHLATIVNMENNRQFGFFRLDPRLITMISSPNGEQRLFVPRSGFPDLLVDTLLATEDRHFYEHDGISLYSIGRAVLANLTAGRTVQGASTLTQQLVKNLFLSSERSYWRKANEAYMALIMDARYSKDRILELYMNEVYLGQSGDNEIRGFPLASLYYFGRPVEELSLDQQALLVGMVKGASIYNPWRNPKLALERRNLVLRLLQQQQIIDQELYDMLSARPLGVQPRGGVISPQPAFMQLVRQELQAKLGDKVKDLSGVKIFTTFDSVAQDAAEKAAVEGIPALKKQRKLSDLETAIVVVDRFSGEVRAMVGGSEPQFAGYNRAMQARRSIGSLAKPATYLTALSQPKIYRLNTWIADAPIALRQPNGQVWSPQNDDRRYSESGRVMLVDALTRSMNVPTVNLGMALGLPAVTETWIKLGVPKDQLHPVPAMLLGALNLTPIEVAQAFQTIASGGNRAPLSALRSVIAEDGKVLYQSFPQAERAVPAQAAYLTLWTMQQVVQRGTGRQLGAKYPNLHLAGKTGTTNNNVDTWFAGIDGSTVTITWVGRDNNQPTKLYGASGAMSIYQRYLANQTPTPLNLVPPEDIADMGVDYDGNFVCSGGMRILPVWTSDPQSLCQQSEMQQQPSGNPFDQSSQPQQQPQQQPAQQEQKDSDGVAGWIKDMFGSN

SEQ ID NO: 10040 - protein, 426 aa, Escherichia coli
MSKSENLYSAARELIPGGVNSPVRAFTGVGGTPLFIEKADGAYLYDVDGKAYIDYVGSWGPMVLGHNHPAIRNAVIEAAERGLSFGAPTEMEVKMAQLVTELVPTMDMVRMVNSGTEATMSAIRLARGFTGRDKIIKFEGCYHGHADCLLVKAGSGALTLGQPNSPGVPADFAKYTLTCTYNDLASVRAAFEQYPQEIACIIVEPVAGNMNCVPPLPEFLPGLRALCDEFGALLIIDEVMTGFRVALAGAQDYYGVVPDLTCLGKIIGGGMPVGAFGGRRDVMDALAPTGPVYQAGTLSGNPIAMAAGFACLNEVAQPGVHETLDELTTRLAEGLLEAAEEAGIPLVVNHVGGMFGIFFTDAESVTCYQDVMACDVERFKRFFHMMLDEGVYLAPSAFEAGFMSVAHSMEDINNTIDAARRVFAKL

SEQ ID NO: 10041 - protein, 241 aa, Escherichia coli
MATVSMRDMLKAGVHFGHQTRYWNPKMKPFIFGARNKVHIINLEKTVPMFNEALAELNKIASRKGKILFVGTKRAASEAVKDAALSCDQFFVNHRWLGGMLTNWKTVRQSIKRLKDLETQSQDGTFDKLTKKEALMRTRELEKLENSLGGIKDMGGLPDALFVIDADHEHIAIKEANNLGIPVFAIVDTNSDPDGVDFVIPGNDDAIRAVTLYLGAVAATVREGRSQDLASQAEESFVEAE

SEQ ID NO: 10042 - protein, 283 aa, Escherichia coli
MAEITASLVKELRERTGAGMMDCKKALTEANGDIELAIENMRKSGAIKAAKKAGNVAADGVIKTKIDGNYGIILEVNCQTDFVAKDAGFQAFADKVLDAAVAGKITDVEVLKAQFEEERVALVAKIGENINIRRVAALEGDVLGSYQHGARIGVLVAAKGADEELVKHIAMHVAASKPEFIKPEDVSAEVVEKEYQVQLDIAMQSGKPKEIAEKMVEGRMKKFTGEVSLTGQPFVMEPSKTVGQLLKEHNAEVTGFIRFEVGEGIEKVETDFAAEVAAMSKQS

SEQ ID NO: 10043 - protein, 185 aa, Escherichia coli [sequence omitted]

SEQ ID NO: 10044 - protein, 253 aa, Escherichia coli
MMLSATQPLSEKLPAHGCRHVAIIMDGNGRWAKKQGKIRAFGHKAGAKSVRRAVSFAANNGIEALTLYAFSSENWNRPAQEVSALMELFVWALDSEVKSLHRHNVRLRIIGDTSRFNSRLQERIRKSEALTAGNTGLTLNIAANYGGRWDIVQGVRQLAEKVQQGNLQPDQIDEEMLNQHVCMHELAPVDLVIRTGGEHRISNFLLWQIAYAELYFTDVLWPDFDEQDFEGALNAFANRERRFGGTEPGDETA

SEQ ID NO: 10045 - protein, 151 aa, Escherichia coli
MTTNTHTLQIEEILELLPHRFPFLLVDRVLDFEEGRFLRAVKNVSVNEPFFQGHFPGKPIFPGVLILEAMAQATGILAFKSVGKLEPGELYYFAGIDEARFKRPVVPGDQMIMEVTFEKTRRGLTRFKGVALVDGKVVCEATMMCARSREA

SEQ ID NO: 10046 - protein, 382 aa, Escherichia coli [sequence omitted]

SEQ ID NO: 10047 - protein, 1160 aa, Escherichia coli
MSEPRFVHLRVHSDYSMIDGLAKTAPLVKKAAALGMPALAITDFTNLCGLVKFYGAGHGAGIKPIVGADFNVQCDLLGDELTHLTVLAANNTGYQNLTLLISKAYQRGYGAAGPIIDRDWLIELNEGLILLSGGRMGDVGRSLLRGNSALVDECVAFYEEHFPDRYFLELIRTGRPDEESYLHAAVELAEARGLPVVATNDVRFIDSSDFDAHEIRVAIHDGFTLDDPKRPRNYSPQQYMRSEEEMCELFADIPEALANTVEIAKRCNVTVRLGEYFLPQFPTGDMSTEDYLVKRAKEGLEERLAFLFPDEEERLKRRPEYDERLETELQVINQMGFPGYFLIVMEFIQWSKDNGVPVGPGRGSGAGSLVAYALKITDLDPLEFDLLFERFLNPERVSMPDFDVDFCMEKRDQVIEHVADMYGRDAVSQIITFGTMAAKAVIRDVGRVLGHPYGFVDRISKLIPPDPGMTLAKAFEAEPQLPEIYEADEEVKALIDMARKLEGVTRNAGKHAGGVVIAPTKITDFAPLYCDEEGKHPVTQFDKSDVEYAGLVKFDFLGLRTLTIINWALEMINKRRAKNGEPPLDIAAIPLDDKKSFDMLQRSETTAVFQLESRGMKDLIKRLQPDCFEDMIALVALFRPGPLQSGMVDNFIDRKHGREEISYPDVQWQHESLKPVLEPTYGIILYQEQVMQIAQVLSGYTLGGADMLRRAMGKKKPEEMAKQRSVFAEGAEKNGINAELAMKIFDLVEKFAGYGFNKSHSAAYALVSYQTLWLKAHYPAEFMAAVMTADMDNTEKVVGLVDECWRMGLKILPPDINSGLYHFHVNDDGEIVYGIGAIKGVGEGPIEAIIEARNKGGYFRELFDLCARTDTKKLNRRVLEKLIMSGAFDRLGPHRAALMNSLGDALKAADQHAKAEAIGQADMFGVLAEEPEQIEQSYASCQPWPEQVVLDGERETLGLYLTGHPINQYLKEIERYVGGVRLKDMHPTERGKVITAAGLVVAARVMVTKRGNRIGICTLDDRSGRLEVMLFTDALDKYQQLLEKDRILIVSGQVSFDDFSGGLKMTAREVMDIDEAREKYARGLAISLTDRQIDDQLLNRLRQSLEPHRSGTIPVHLYYQRADARARLRFGATWRVSPSDRLLNDLRGLIGSEQVELEFD

SEQ ID NO: 10048 - protein, 319 aa, Escherichia coli
MSLNFLDFEQPIAELEAKIDSLTAVSRQDEKLDINIDEEVHRLREKSVELTRKIFADLGAWQIAQLARHPQRPYTLDYVRLAFDEFDELAGDRAYADDKAIVGGIARLDGRPVMIIGHQKGRETKEKIRRNFGMPAPEGYRKALRLMQMAERFKMPIITFIDTPGAYPGVGAEERGQSEAIARNLREMSRLGVPVVCTVIGEGGSGGALAIGVGDKVNMLQYSTYSVISPEGCASILWKSADKAPLAAEAMGIIAPRLKELKLIDSIIPEPLGGAHRNPEAMAASLKAQLLADLADLDVLSTEDLKNRRYQRLMSYGYA

SEQ ID NO: 10049 - protein, 572 aa, Escherichia coli
MRTSQYLLSTLKETPADAEVISHQLMLRAGMIRKLASGLYTWLPTGVRVLKKVENIVREEMNNAGAIEVSMPVVQPADLWQESGRWEQYGPELLRFVDRGERPFVLGPTHEEVITDLIRNELSSYKQLPLNFYQIQTKFRDEVRPRFGVMRSREFLMKDAYSFHTSQESLQETYDAMYAAYSKIFSRMGLDFRAVQADTGSIGGSASHEFQVLAQSGEDDVVFSDTSDYAANIELAEAIAPKEPRAAATQEMTLVDTPNAKTIAELVEQFNLPIEKTVKTLLVKAVEGSSFPQVALLVRGDHELNEVKAEKLPQVASPLTFATEEEIRAVVKAGPGSLGPVNMPIPVVIDRTVAAMSDFAAGANIDGKHYFGINWDRDVATPEVADIRNVVAGDPSPDGQGRLLIKRGIEVGHIFQLGTKYSEALKASVQGEDGRNQILTMGCYGIGVTRVVAAAIEQNYDERGIVWPDAIAPFQVAILPMNMHKSFRVQELAEKLYSELRAQGIEVLLDDRKERPGVMFADMELIGIPHTIVLGDRNLDNDDIEYKYRRNGEKQLIKTGDIVEYLVKQIKG

SEQ ID NO: 10050 - protein, 271 aa, Escherichia coli
MAFKFKTFAAVGALIGSLALVGCGQDEKDPNHIKVGVIVGAEQQVAEVAQKVAKDKYGLDVELVTFNDYVLPNEALSKGDIDANAFQHKPYLDQQLKDRGYKLVAVGNTFVYPIAGYSKKIKSLDELQDGSQVAVPNDPTNLGRSLLLLQKVGLIKLKDGVGLLPTVLDVVENPKNLKIVELEAPQLPRSLDDAQIALAVINTTYASQIGLTPAKDGIFVEDKESPYVNLIVTREDNKDAENVKKFVQAYQSDEVYEAANKVFNGGAVKGW

SEQ ID NO: 10051 - protein, 217 aa, Escherichia coli
MSEPMMWLLVRGVWETLAMTFVSGFFGFVIGLPVGVLLYVTRPGQIIANAKLYRTVSAIVNIFRSIPFIILLVWMIPFTRVIVGTSIGLQAAIVPLTVGAAPFIARMVENALLEIPTGLIEASRAMGATPMQIVRKVLLPEALPGLVNAATITLITLVGYSAMGGAVGAGGLGQIGYQYGYIGYNATVMNTVLVLLVILVYLIQFAGDRIVRAVTRK

SEQ ID NO: 10052 - protein, 475 aa, Escherichia coli
MSIRLEGYMQTTQQNAPLKRTMKTRHLIMLSLGGVIGTGLFFNTGYIISTTGAAGTLLAYLIGALVVWLVMQCLGELSVAMPETGAFHVYAARYLGPATGYTVAWLYWLTWTVALGSSFTAAGFCMQYWFPQVPVWVWCVVFCAIIFGLNVISTRFFAEGEFWFSLVKVVTIIAFIILGGAAIFGFIPMQDGSPAPGLSNITAEGWFPHGGLPILMTMVAVNFAFSGTELIGIAAGETENPRKVIPVAIRTTIARLIIFFIGTVFVLAALIPMQQVGVEKSPFVLVFEKVGIPYAADIFNFVILTAILSAANSGLYASGRMLWSLSNERTLPACFARVTKNGVPLTALSVSMLGGVLALFSSVVAPDTVFVALSAISGFAVVAVWLSICASHFVFRRRHLQQGKALSELHYRAPWYPLVPVLGFVLCLVACVGLAFDPAQRIALWCGLPFVALCYGAYFLTQPRNAKQEPEHVAE

SEQ ID NO: 10053 - protein, 352 aa, Escherichia coli
MERTMTQKNFVELRNVTKRFGSNTVIDNINLTIPQGQMVTLLGPSGCGKTTILRLVAGLEKPSEGQIFIDGEDVTHRSIQQRDICMVFQSYALFPHMSLGENVGYGLKMLGVPRAELKARVKEALAMVDLEGFEDRFVDQISGGQQQRVALARALILKPKVLLFDEPLSNLDANLRRSMRDKIRELQKQFDITSLYVTHDQSEAFAVSDTVLVMNKGHIMQIGSPQDLYRQPASRFMASFMGDANLFPATFSDGYVDIYGYHLPRPLHFGTQGEGMVGVRPEAITLSDRGEESQRCVIRHVAYMGPQYEVTVEWHGQEILLQVNATRLQPDVGEQYYLEIHPYGMFVLADAA

SEQ ID NO: 10054 - protein, 204 aa, Escherichia coli
MNIFEQTPPNRRRYGLAAFIGLIAGVVSAFVKWGAEVPLPPRSPVDMFNAACGPESLIRAAGQIDCSRNFLNPPYIFLRDWLGLTDPNAAVYTFAGHVFNWVGVTHIIFSIVFAVGYCVVAEVFPKIKLWQGLLAGALAQLFVHMISFPLMGLTPPLFDLPWYENVSEIFGHLVWFWSIEIIRRDLRNRITHEPDPEIPLGSNR

SEQ ID NO: 10055 - protein, 87 aa, Escherichia coli
MKPNIHPEYRTVVFHDTSVDEYFKIGSTIKTDREIELDGVTYPYVTIDVSSKSHPFYTGKLRTVASEGNVARFTQRFGRFVSTKKGA

SEQ ID NO: 10056 - protein, 556 aa, Escherichia coli
MQFDYIIIGAGSAGNVLATRLTEDPNTSVLLLEAGGPDYRFDFRTQMPAALAFPLQGKRYNWAYETEPEPFMNNRRMECGRGKGLGGSSLINGMCYIRGNALDLDNWAQEPGLENWSYLDCLPYYRKAETRDMGENDYHGGDGPVSVTTSKPGVNPLFEAMIEAGVQAGYPRTDDLNGYQQEGFGPMDRTVTPQGRRASTARGYLDQAKSRPNLTIRTHAMTDHIIFDGKRAVGVEWLEGDSTIPTRATANKEVLLCAGAIASPQILQRSGVGNAELLAEFDIPLVHELPGVGENLQDHLEMYLQYECKEPVSLYPALQWWNQPKIGAEWLFGGTGVGASNHFEAGGFIRSREEFAWPNIQYHFLPVAINYNGSNAVKEHGFQCHVGSMRSPSRGHVRIKSRDPHQHPAILFNYMSHEQDWQEFRDAIRITREIMHQPALDQYRGREISPGVECQTDEQLDEFVRNHAETAFHPCGTCKMGYDEMSVVDGEGRVHGLEGLRVVDASIMPQIITGNLNATTIMIGEKIADMIRGQEALPRSTAGYFVANGMPVRAKK

SEQ ID NO: 10057 - protein, 490 aa, Escherichia coli
MSRMAEQQLYIHGGYTSATSGRTFETINPANGNVLATVQAAGREDVDRAVKSAQQGQKIWASMTAMERSRILRRAVDILRERNDELAKLETLDTGKAYSETSTVDIVTGADVLEYYAGLIPALEGSQIPLRETSFVYTRREPLGVVAGIGAWNYPIQIALWKSAPALAAGNAMIFKPSEVTPLTALKLAEIYSEAGLPDGVFNVLPGVGAETGQYLTEHPGIAKVSFTGGVASGKKVMANSAASSLKEVTMELGGKSPLIVFDDADLDLAADIAMMANFFSSGQVCTNGTRVFVPAKCKAAFEQKILARVERIRAGDVFDPQTNFGPLVSFPHRDNVLRYIAKGKEEGARVLCGGDVLKGDGFDNGAWVAPTVFTDCSDDMTIVREEIFGPVMSILTYESEDEVIRRANDTDYGLAAGIVTADLNRAHRVIHQLEAGICWINTWGESPAEMPVGGYKHSGIGRENGVMTLQSYTQVKSIQVEMAKFQSIF

SEQ ID NO: 10058 - protein, 389 aa, Escherichia coli
MSDTTILQNSTHVIKPKKSVALSGVPAGNTALCTVGKSGNDLHYRGYDILDLAKHCEFEEVAHLLIHGKLPTRDELAAYKTKLKALRGLPANVRTVLEALPAASHPMDVMRTGVSALGCTLPEKEGHTVSGARDIADKLLASLSSILLYWYHYSHNGERIQPETDDDSIGGHFLHLLHGEKPSQSWEKAMHISLVLYAEHEFNASTFTSRVIAGTGSDMYSAIIGAIGALRGPKHGGANEVSLEIQQRYETPDEAEADIRKRVENKEVVIGFGHPVYTIADPRHQVIKRVAKQLSQEGGSLKMYNIADRLETVMWESKKMFPNLDWFSAVSYNMMGVPTEMFTPLFVIARVTGWAAHIIEQRQDNKIIRPSANYVGPEDRPFVALDKRQ

SEQ ID NO: 10059 - protein, 335 aa, Escherichia coli
MPLDSTNIRQTMTDLIQRPRRLRKSPALRAMFEETTLSLNDLVLPIFVEEEIDDYKAVEAMPGVMRIPEKHLAREIERIANAGIRSVMTFGISHHTDETGSDAWREDGLVARMSRICKQTVPEMIVMSDTCFCEYTSHGHCGVLCEHGVDNDATLENLGKQAVVAAAAGADFIAPSAAMDGQVQAIRQALDAAGFKDTAIMSYSTKFASSFYGPFREAAGSALKGDRKSYQMNPMNRREAIRESLLDEAQGADCLMVKPAGAYLDIVRELRERTELPIGAYQVSGEYAMIKFAALAGAIDEEKVVLESLGSIKRAGADLIFSYFALDLAEKKILR

SEQ ID NO: 10060 - protein, 364 aa, Escherichia coli
MEKLRVGIVFGGKSAEHEVSLQSAKNIVDAIDKSRFDVVLLGIDKQGQWHVSDASNYLLNADDPAHIALRPSATSLAQVPGKHEHQLIDAQNGQPLPTVDVIFPIVHGTLGEDGSLQGMLRVANLPFVGSDVLASAACMDKDVTKRLLRDAGLNIAPFITLTRANRHNISFAEVESKLGLPLFVKPANQGSSVGVSKVTSEEQYAIAVDLAFEFDHKVIVEQGIKGREIECAVLGNDNPQASTCGEIVLTSDFYAYDTKYIDEDGAKVVVPAAIAPEINDKIRAIAVQAYQTLGCAGMARVDVFLTPENEVVINEINTLPGFTNISMYPKLWQASGLGYTDLITRLIELALERHAADNALKTTM

SEQ ID NO: 10061 - protein, 494 aa, Escherichia coli
MSRPRLIVALFLFFNVFVHGENKVKQSTIALALLPLLFTPVTKARTPEMPVLENRAAQGDITAPGGARRLTGDQTAALRDSLSDKPAKNIILLIGDGMGDSEITAARNYAEGAGGFFKGIDALPLTGQYTHYALNKKTGKPDYVTDSAASATAWSTGVKTYNGALGVDIHEKDHPTILEMAKAAGLATGNVSTAELQDATPAALVAHVTSRKCYGPSATSEKCPGNALEKGGKGSITEQLLNARADVTLGGGAKTFAETATAGEWQGKTLREQAQARGYQLVSDAASLNSVTEANQQKPLLGLFADGNMPVRWLGPKATYHGNIDKPAVTCTPNPQRNDSVPTLAQMTDKAIELLSKNEKGFFLQVEGASIDKQDHAANPCGQIGETVDLDEAVQRALEFAKKEGNTLVIVTADHAHASQIVAPDTKAPGLTQALNTKDGAVMVMSYGNSEEDSQEHTGSQLRIAAYGPHAANVVGLTDQTDLFYTMKAALGLK

SEQ ID NO: 10062 - protein, 1048 aa, Escherichia coli
MKILSLRLKNLNSLKGEWKIDFTREPFASNGLFAITGPTGAGKTTLLDAICLALYHETPRLSNVSQSQNDLMTRDTAECLAEVEFEVKGEAYRAFWSQNRARNQPDGNLQVPRVELARCADGKILADKVKDKLELTATLTGLDYGRFTRSMLLSQGQFAAFLNAKPKERAELLEELTGTEIYGQISAMVFEQHKSARTELEKLQAQASGVTLLTPEQVQSLTASLQVLTDEEKQLITAQQQEQQSLNWLTRQDELQQEASRRQQALQQALAEEEKAQPQLAALSLAQPARNLRPHWERIAEHSAALAHIRQQIEEVNTRLQSTMALRASIRHHAAKQSAELQQQQQSLNTWLQEHDRFRQWNNEPAGWRAQFSQQTSDREHLRQWQQQLTHAEQKLNALAAITLTLTADEVATALAQHAEQRPLRQHLVALHGQIVPQQKRLAQLQVAIQNVTQEQTQRNAALNEMRQRYKEKTQQLADVKTICEQEARIKTLEAQRAQLQAGQPCPLCGSTSHPAVEAYQALEPGVNQSRLLALENEVKKLGEEGATLRGQLDAITKQLQRDENEAQSLRQDEQALTQQWQAVTASLNITLQPLDDIQPWLDAQDEHERQLRLLSQRHELQGQIAAHNQQIIQYQQQIEQRQQLLLTTLTGYALTLPQEDEEESWLATRQQEAQSWQQRQNELTALQNRIQQLTPILETLPQSDELPHCEETVVLENWRQVHEQCLALHSQQQTLQQQDVLAAQSLQKAQAQFDTALQASVFDDQQAFLAALMDEQTLTQLEQLKQNLENQRRQAQTLVTQTAETLAQHQQHRPDDGLALTVTVEQIQQELAQTHQKLRENTTSQGEIRQQLKQDADNRQQQQTLMQQIAQMTQQVEDWGYLNSLIGSKEGDKFRKFAQGLTLDNLVHLANQQLTRLHGRYLLQRKASEALEVEVVDTWQADAVRDTRTLSGGESFLVSLALALALSDLVSHKTRIDSLFLDEGFGTLDSETLDTALDALDALNASGKTIGVISHVEAMKERIPVQIKVKKINGLGYSKLESTFAVK

SEQ ID NO: 10063 - protein, 439 aa, Escherichia coli
MTHQLRSRDIIALGFMTFALFVGAGNIIFPPMVGLQAGEHVWTAAFGFLITAVGLPVLTVVALAKVGGGVDSLSTPIGKVAGVLLATVCYLAVGPLFATPRTATVSFEVGIAPLTGDSALPLFIYSLVYFAIVILVSLYPGKLLDTVGNFLAPLKIIALVILSVAAIVWPAGSISTATEAYQNAAFSNGFVNGYLTMDTLGAMVFGIVIVNAARSRGVTEARLLTRYTVWAGLMAGVGLTLLYLALFRLGSDSASLVDQSANGAAILHAYVQHTFGGGGSFLLAALIFIACLVTAVGLTCACAEFFAQYVPLSYRTLVFILGGFSMVVSNLGLSQLIQISVPVLTAIYPPCIALVVLSFTRSWWHNSSRVIAPPMFISLLFGILDGIKASAFSDILPSWAQRLPLAEQGLAWLMPTVVMVVLAIIWDRAAGRQVTSSAH

SEQ ID NO: 10064 - protein, 356 aa, Escherichia coli
MRVTDFSFELPESLIAHYPMPERSSCRLLSLDGPTGALTHGTFTDLLDKLNPGDLLVFNNTRVIPARLFGRKASGGKIEVLVERMLDDKRILAHIRASKAPKPGAELLLGDDESINATMTARHGALFEVEFNDERSVLDILNSIGHMPLPPYIDRPDEDADRELYQTVYSEKPGAVAAPTAGLHFDEPLLEKLRAKGVEMAFVTLHVGAGTFQPVRVDTIEDHIMHSEYAEVPQDVVDAVLAAKARGNRVIAVGTTSVRSLESAAQAAKNDLIEPFFDDTQIFIYPGFQYKVVDALVTNFHLPESTLIMLVSAFAGYQHTMNAYKAAVEEKYRFFSYGDAMFITYNPQAINERVGE

SEQ ID NO: 10065 - protein, 375 aa, Escherichia coli
MKFELDTTDGRARRGRLVFDRGVVETPCFMPVGTYGTVKGMTPEEVEATGAQIILGNTFHLWLRPGQEIMKLHGDLHDFMQWKGPILTDSGGFQVFSLGDIRKITEQGVHFRNPINGDPIFLDPEKSMEIQYDLGSDIVMIFDECTPYPADWDYAKRSMEMSLRWAKRSRERFDSLGNKNALFGIIQGSVYEDLRDISVKGLVDIGFDGYAVGGLAVGEPKADMHRILEHVCPQIPADKPRYLMGVGKPEDLVEGVRRGIDMFDCVMPTRNARNGHLFVTDGVVKIRNAKYKSDTGPLDPECDCYTCRNYSRAYLHHLDRCNEILGARLNTIHNLRYYQRLMAGLRKAIEEGKLESFVTDFYQRQGREVPPLNVD

SEQ ID NO: 10066 - protein, 367 aa, Escherichia coli
MQDEYYMARALKLAQRGRFTTHPNPNVGCVIVKDGEIVGEGYHQRAGEPHAEVHALRMAGEKAKGATAYVTLEPCSHHGRTPPCCDALIAAGVARVVASMQDPNPQVAGRGLYRLQQAGIDVSHGLMMSEAEQLNKGFLKRMRTGFPYIQLKLGASLDGRTAMASGESQWITSPQARRDVQLLRAQSHAILTSSATVLADDPALTVRWSELDEQTQALYPQQNLRQPIRIVIDSQNRVTPVHRIVQQPGETWFARTQEDSREWPETVRTLLIPEHKGHLDLVVLMMQLGKQQINSIWVEAGPTLAGALLQAGLVDELIVYIAPKLLGSDARGLCTLPGLEKLADAPQFKFKEIRHVGPDVCLHLVGA

SEQ ID NO: 10067 - protein, 348 aa, Escherichia coli
MTGVNECSRSTCNLKYDEYSRSGSMQYNPLGKTDLRVSRLCLGCMTFGEPDRGNHAWTLPEESSRPIIKRALEGGINFFDTANSYSDGSSEEIVGRALRDFARREDVVVATKVFHRVGDLPEGLSRAQILRSIDDSLRRLGMDYVDILQIHRWDYNTPIEETLEALNDVVKAGKARYIGASSMHASQFAQALELQKQHGWAQFVSMQDHYNLIYREEEREMLPLCYQEGVAVIPWSPLARGRLTRPWGETTARLVSDEVGKNLYKESDENDAQIAERLTGVSEELGATRAQVALAWLLSKPGIAAPIIGTSREEQLDELLNAVDITLKPEQIAELETPYKPHPVVGFK

SEQ ID NO: 10068 - protein, 620 aa, Escherichia coli
MSFDIAKYPTLALVDSTQELRLLPKESLPKLCDELRRYLLDSVSRSSGHFASGLGTVELTVALHYVYNTPFDQLIWDVGHQAYPHKILTGRRDKIGTIRQKGGLHPFPWRGESEYDVLSVGHSSTSISAGIGIAVAAEKEGKNRRTVCVIGDGAITAGMAFEAMNHAGDIRPDMLVILNDNEMSISENVGALNNHLAQLLSGKLYSSLREGGKKVFSGVPPIKELLKRTEEHIKGMVVPGTLFEELGFNYIGPVDGHDVLGLITTLKNMRDLKGPQFLHIMTKKGRGYEPAEKDPITFHAVPKFDPSSGCLPKSSGGLPSYSKIFGDWLCETAAKDNKLMAITPAMREGSGMVEFSRKFPDRYFDVAIAEQHAVTFAAGLAIGGYKPIVAIYSTFLQRAYDQVLHDVAIQKLPVLFAIDRAGIVGADGQTHQGAFDLSYLRCIPEMVIMTPSDENECRQMLYTGYHYNDGPSAVRYPRGNAVGVELTPLEKLPIGKGIVKRRGEKLAILNFGTLMPEAAKVAESLNATLVDMRFVKPLDEALILEMAASHEALVTVEENAIMGGAGSGVNEVLMAHRKPVPVLNIGLPDFFIPQGTQEEMRAELGLDAAGMEAKIKAWLA

SEQ ID NO: 10069 - protein, 299 aa, Escherichia coli
MDFPQQLEACVKQANQALSRFIAPLPFQNTPVVETMQYGALLGGKRLRPFLVYATGHMFGVSTNTLDAPAAAVECIHAYSLIHDDLPAMDDDDLRRGLPTCHVKFGEANAILAGDALQTLAFSILSDADMPEVSDRDRISMISELASASGIAGMCGGQALDLDAEGKHVPLDALERIHRHKTGALIRAAVRLGALSAGDKGRRALPVLDKYAESIGLAFQVQDDILDVVGDTATLGKRQGADQQLGKSTYPALLGLEQARKKARDLIDDARQSLKQLAEQSLDTSALEALADYIIQRNK

SEQ ID NO: 10070 - protein, 663 aa, Escherichia coli
MFGKLSLDAVPFHEPIVMVTIAGIILGGLALVGLITYFGKWTYLWKEWLTSVDHKRLGIMYIIVAIVMLLRGFADAIMMRSQQALASAGEAGFLPPHHYDQIFTAHGVIMIFFVAMPFVIGLMNLVVPLQIGARDVAFPFLNNLSFWFTVVGVILVNVSLGVGEFAQTGWLAYPPLSGIEYSPGVGVDYWIWSLQLSGIGTTLTGINFFVTILKMRAPGMTMFKMPVFTWASLCANVLIIASFPILTVTVALLTLDRYLGTHFFTNDMGGNMMMYINLIWAWGHPEVYILILPVFGVFSEIAATFSRKRLFGYTSLVWATVCITVLSFIVWLHHFFTMGAGANVNAFFGITTMIIAIPTGVKIFNWLFTMYQGRIVFHSAMLWTIGFIVTFSVGGMTGVLLAVPGADFVLHNSLFLIAHFHNVIIGGVVFGCFAGMTYWWPKAFGFKLNETWGKRAFWFWIIGFFVAFMPLYALGFMGMTRRLSQQIDPQFHTMLMIAASGAVLIALGILCLVIQMYVSIRDRDQNRDLTGDPWGGRTLEWATSSPPPFYNFAVVPHVHERDAFWEMKEKGEAYKKPDHYEEIHMPKNSGAGIVIAAFSTIFGFAMIWHIWWLAIVGFAGMIITWIVKSFDEDVDYYVPVAEIEKLENQHFDEITKAGLKNGN

SEQ ID NO: 10071 - protein, 90 aa, Escherichia coli
MNKSQLIDKIAAGADISKAAAGRALDAIIASVTESLKEGDDVALVGFGTFAVKERAARTGRNPQTGKEITIAAAKVPSFRAGKALKDAVN

SEQ ID NO: 10072 - protein, 1049 aa, Escherichia coli [sequence omitted]

SEQ ID NO: 10073 - protein, 109 aa, Escherichia coli
MFGKGGLGNLMKQAQQMQEKMQKMQEEIAQLEVTGESGAGLVKVTINGAHNCRRVEIDPSLLEDDKEMLEDLVAAAFNDAARRIEETQKEKMASVSSGMQLPPGFKMPF

SEQ ID NO: 10074 - protein, 201 aa, Escherichia coli
MQTSPLLTQLMEALRCLPGVGPKSAQRMAFTLLQRDRSGGMRLAQALTRAMSEIGHCADCRTFTEQEVCNICSNPRRQENGQICVVESPADIYAIEQTGQFSGRYFVLMGHLSPLDGIGPDDIGLDRLEQRLAEEKITEVILATNPTVEGEATANYIAELCAQYDVEASRIAHGVPVGGELEMVDGTTLSHSLAGRHKIRF

SEQ ID NO: 10075 - protein, 214 aa, Escherichia coli
MRIILLGAPGAGKGTQAQFIMEKYGIPQISTGDMLRAAVKSGSELGKQAKDIMDAGKLVTDELVIALVKERIAQEDCRNGFLLDGFPRTIPQADAMKEAGINVDYVLEFDVPDELIVDRIVGRRVHAPSGRVYHVKFNPPKVEGKDDVTGEELTTRKDDQEETVRKRLVEYHQMTAPLIGYYSKEAEAGNTKYAKVDGTKPVAEVRADLEKILG

SEQ ID NO: 10076 - protein, 834 aa, Escherichia coli
MSQTIDLTLDGLSCGHCVKRVKESLEQRPDVEQADVSITEAHVTGTASAEQLIETIKQAGYDASVSHPKAKPLAESSIPSEALTAVSEALPAATADDDDSQQLLLSGMSCASCVTRVQNALQSVPGVTQARVNLAERTALVMGSASPQDLVQAVEKAGYGAEAIEDDAKRRERQQETAVATMKRFRWQAIVALAVGIPVMVWGMIGDNMMVTADNRSLWLVIGLITLAVMVFAGGHFYRSAWKSLLNGAATMDTLVALGTGVAWLYSMSVNLWPQWFPMEARHLYYEASAMIIGLINLGHMLEARARQRSSKALEKLLDLTPPTARLVTDEGEKSVPLAEVQPGMLLRLTTGDRVPVDGEITQGEAWLDEAMLTGEPIPQQKGEGDSVHAGTVVQDGSVLFRASAVGSHTTLSRIIRMVRQAQSSKPEIGQLADKISAVFVPVVVVIALVSAAIWYFFGPAPQIVYTLVIATTVLIIACPCALGLATPMSIISGVGRAAEFGVLVRDADALQRASTLDTVVFDKTGTLTEGKPQVVAVKTFADVDEAQALRLAAALEQGSSHPLARAILDKAGDMQLPQVNGFRTLRGLGVSGEAEGHALLLGNQALLNEQQVGTKAIEAEITAQASQGATPVLLAVDGKAVALLAVRDPLRSDSVAALQRLHKAGYRLVMLTGDNPTTANAIAKEAGIDEVIAGVLPDGKAEAIKHLQSEGRQVAMVGDGINDAPALAQADVGIAMGGGSDVAIETAAITLMRHSLMGVADALAISRATLHNMKQNLLGAFIYNSIGIPVAAGILWPFTGTLLNPVVAGAAMALSSITVVSNANRLLRFKPKE

SEQ ID NO: 10077 - protein, 228 aa, Escherichia coli
MPAENIVEVHHLKKSVGQGEHELSILTGVELVVKRGETIALVGESGSGKSTLLAILAGLDDGSSGEVSLVGQPLHNMDEEARAKLRAKHVGFVFQSFMLIPTLNALENVELPALLRGESSAESRNGAKALLEQLGLGKRLDHLPAQLSGGEQQRVALARAFNGRPDVLFADEPTGNLDRQTGDKIADLLFSLNREHGTTLIMVTHDLQLAARCDRCLRLVNGQLQEEA

SEQ ID NO: 10078 - protein, 453 aa, Escherichia coli
MSFDLIIKNGTVILENEARVVDIAVKGGKIAAIGQDLGDAKEVMDASGLVVSPGMVDAHTHISEPGRSHWEGYETGTRAAAKGGITTMIEMPLNQLPATVDRASIELKFDAAKGKLTIDAAQLGGLVSYNIDRLHELDEVGVVGFKCFVATCGDRGIDNDFRDVNDWQFFKGAQKLGELGQPVLVHCENALICDELGEEAKREGRVTAHDYVASRPVFTEVEAIRRVLYLAKVAGCRLHVCHVSSPEGVEEVTRARQEGQDVTCESCPHYFVLDTDQFEEIGTLAKCSPPIRDLENQKGMWEKLFNGEIDCLVSDHSPCPPEMKAGNIMKAWGGIAGLQSCMDVMFDEAVQKRGMSLPMFGKLMATNAADIFGLQQKGRIAPGKDADFVFIQPNSSYVLTNDDLEYRHKVSPYVGRTIGARITKTILRGDVIYDIEQGFPVAPKGQFILKHQQ

SEQ ID NO: 10079 - protein, 1293 aa, Escherichia coli
MSQHLPLVAAQPGIWMAEKLSELPSAWSVAHYVELTGEVDSPLLARAVVAGLAQADTLRMRFTEDNGEVWQWVDDALTFELPEIIDLRTNIDPHGTAQALMQADLQQDLRVDSGKPLVFHQLIQVADNRWYWYQRYHHLLVDGFSFPAITRQIANIYCTWLRGEPTPASPFTPFADVVEEYQQYRESEAWQRDAAFWAEQRRQLPPPASLSPAPLPGRSASADILRLKLEFTDGEFRQLATQLSGVQRTDLALALAALWLGRLCNRMDYAAGFIFMRRLGSAALTATGPVLNVLPLGIHIAAQETLPELATRLAAQLKKMRRHQRYDAEQIVRDSGRAAGDEPLFGPVLNIKVFDYQLDIPDVQAQTHTLATGPVNDLELALFPDVHGDLSIEILANKQRYDEPTLIQHAERLKMLIAQFAADPALLCGDVDIMLPGEYAQLAQLNATQVEIPETTLSALVAEQAAKTPDAPALADARYLFSYREMREQVVALANLLRERGVKPGDSVAVALPRSVFLTLALHAIVEAGAAWLPLDTGYPDDRLKMMLEDARPSLLITTDDQLPRFSDVPNLTSLCYNAPLTPQGSAPLQLSQPHHTAYIIFTSGSTGRPKGVMVGQTAIVNRLLWMQNHYPLTGEDVVAQKTPCSFDVSVWEFFWPFIAGAKLVMAEPEAHRDPLAMQQFFAEYGVTTTHFVPSMLAAFVASLTPQTARQSCATLKQVFCSGEALPADLCREWQQLTGAPLHNLYGPTEAAVDVSWYPAFGEELAQVRGSSVPIGYPVWNTGLRILDAMMHPVPPGVAGDLYLTGIQLAQGYLGRPDLTASRFIADPFAPGERMYRTGDVARWLDNGAVEYLGRSDDQLKIRGQRIELGEIDRVMQALPDVEQAVTHACVINQAAATGGDARQLVGYLVSQSGLPLDTSALQAQLRETLPPHMVPVVLLQLPQLPLSANGKLDRKALPLPELKAQAPGRAPKAGSETIIAAAFSSLLGCDVQDADADFFALGGHSLLAMKLAAQLSRQVARQVTPGQVMVASTVAKLATIIDAEEDSTRRMGFETILPLREGNGPTLFCFHPASGFAWQFSVLSRYLDPQWSIIGIQSPRPNGPMQTAANLDEVCEAHLATLLEQQPHGPYYLLGYSLGGTLAQGIAARLRARGEQVAFLGLLDTWPPETQNWQEKEANGLDPEVLAEINREREAFLAAQQGSTSTELFTTIEGNYADAVRLLTTAHSVPFDGKATLFVAERTLQEGMSPERAWSPWIAELDIYRQDCAHVDIISPGTFEKIGPIIRATLNR

SEQ ID NO: 10080 - protein, 271 aa, Escherichia coli
MTESVARLRGEQLTLGYGKYTVAENLTVEIPDGHFTAIIGPNGCGKSTLLRTLSRLMTPAHGHVWLDGEHIQHYASKEVARRIGLLAQNATTPGDITVQELVARGRYPHQPLFTRWRKEDEEAVTKAMQATGITHLADQSVDTLSGGQRQRAWIAMVLAQETAIMLLDEPTTWLDISHQIDLLELLSELNREKGYTLAAVLHDLNQACRYASHLIALREGKIVAQGAPKEIVTAELIERIYGLRCMIIDDPVAGTPLVVPLGRTAPSTANS

SEQ ID NO: 10081 - protein, 187 aa, Escherichia coli
MSLINTKIKPFKNQAFKNGEFIEITEKDTEGRWSVFFFYPADFTFVCPTELGDVADHYEELQKLGVDVYAVSTDTHFTHKAWHSSSETIAKIKYAMIGDPTGALTRNFDNMREDEGLADRATFVVDPQGIIQAIEVTAEGIGRDASDLLRKIKAAQYVASHPGEVCPAKWKEGEATLAPSLDLVGKI

SEQ ID NO: 10082 - protein, 307 aa, Escherichia coli
MGGLPMISASLQQRKTRTRRSMLFVPGANAAMVSNSFIYPADALMFDLEDSVALREKDTARRMVYHALQHPLYRDIETIVRVNALDSEWGVNDLEAVVRGGADVVRLPKTDTAQDVLDIEKEILRIEKACGREPGSTGLLAAIESPLGITRAVEIAHASERLIGIALGAEDYVRNLRTERSPEGTELLFARCSILQAARSAGIQAFDTVYSDANNEAGFLQEAAHIKQLGFDGKSLINPRQIDLLHNLYAPTQKEVDHARRVVEAAEAAAREGLGVVSLNGKMVDGPVIDRARLVLSRAELSGIREE

SEQ ID NO: 10083 - protein, 321 aa, Escherichia coli
MSKPIVMERGVKYRDADKMALIPVKNVATEREALLRKPEWMKIKLPADSTRIQGIKAAMRKNGLHSVCEEASCPNLAECFNHGTATFMILGAICTRRCPFCDVAHGRPVAPDANEPVKLAQTIADMALRYVVITSVDRDDLRDGGAQHFADCITAIREKSPQIKIETLVPDFRGRMDRALDILTATPPDVFNHNLENVPRIYRQVRPGADYNWSLKLLERFKEAHPEIPTKSGLMVGLGETNEEIIEVMRDLRRHGVTMLTLGQYLQPSRHHLPVQRYVSPDEFDEMKAEALAMGFTHAACGPFVRSSYHADLQAKGMEVK

SEQ ID NO: 10084 - protein, 203 aa, Escherichia coli
MRLWLIRHGETQANIDGLYSGHAPTPLTARGIEQAQNLHTLLHGVSFDLVLCSELERAQHTARLVLSDRQLPVQIIPELNEMFFGDWEMRHHRDLMQEDAENYSAWCNDWQHAIPTNGEGFQAFSQRVERFIARLSEFQHYQNILVVSHQGVLSLLIARLIGMPAEAMWHFRVDQGCWSAIDINQKFATLRVLNSRAIGVENA

SEQ ID NO: 10085 - protein, 860 aa, Escherichia coli [sequence omitted]

SEQ ID NO: 10086 - protein, 246 aa, Escherichia coli
MSIDWNWGIFLQQAPFGNTTYLGWIWSGFQVTIALSICAWIIAFLVGSFFGILRTVPNRFLSGLGTLYVELFRNVPLIVQFFTWYLVIPELLPEKIGMWFKAELDPNIQFFLSSMLCLGLFTAARVCEQVRAAIQSLPRGQKNAALAMGLTLPQAYRYVLLPNAYRVIVPPMTSEMMNLVKNSAIASTIGLVDMAAQAGKLLDYSAHAWESFTAITLAYVLINAFIMLVMTLVERKVRLPGNMGGK

SEQ ID NO: 10087 - protein, 512 aa, Escherichia coli
MAFASLIERQRIRLLLALLFGACGTLAFSPYDVWPAAIISLMGLQALTFNRRPLQSAAIGFCWGFGLFGSGINWVYVSIATFGGMPGPVNIFLVVLLAAYLSLYTGLFAGVLSRLWPKTTWLRVAIAAPALWQVTEFLRGWVLTGFPWLQFGYSQIDGPLKGLAPIMGVEAINFLLMMVSGLLALALVKRNWRPLVVAVVLFALPFPLRYIQWFTPQPEKTIQVSMVQGDIPQSLKWDEGQLLNTLKIYYNATAPLMGKSSLIIWPESAITDLEINQQPFLKALDGELRDKGSSLVTGIVDARLNKQNRYDTYNTIITLGKGAPYSYESADRYNKNHLVPFGEFVPLESILRPLAPFFDLPMSSFSRGPYIQPPLSANGIELTAAICYEIILGEQVRDNFRPDTDYLLTISNDAWFGKSIGPWQHFQMARMRALELARPLLRSTNNGITAVIGPQGEIQAMIPQFTREVLTTNVTPTTGLTPYARTGNWPLWVLTALFGFAAVLMSLRQRRK

SEQ ID NO: 10088 - protein, 382 aa, Escherichia coli
MYALTQGRIFTGHEFLDDHAVVIADGLIKSVCPVAELPPEIEQRSLNGAILSPGFIDVQLNGCGGVQFNDTAEAVSVETLEIMQKANEKSGCTNYLPTLITTSDELMKQGVRVMREYLAKHPNQALGLHLEGPWLNLVKKGTHNPNFVRKPDAALVDFLCENADVITKVTLAPEMVPAEVISKLANAGIVVSAGHSNATLKEAKAGFRAGITFATHLYNAMPYITGREPGLAGAILDEADIYCGIIADGLHVDYANIRNAKRLKGDKLCLVTDATAPAGANIEQFIFAGKTIYYRNGLCVDENGTLSGSSLTMIEGVRNLVEHCGIALDEVLRMATLYPARAIGVEKRLGTLAAGKVANLTAFTPDFKITKTIVNGNEVVTQ

SEQ ID NO: 10089 - protein, 648 aa, Escherichia coli
MNILGFFQRLGRALQLPIAVLPVAALLLRFGQPDLLNVAFIAQAGGAIFDNLALIFAIGVASSWSKDSAGAAALAGAVGYFVLTKAMVTINPEINMGVLAGIITGLVGGAAYNRWSDIKLPDFLSFFGGKRFVPIATGFFCLVLAAIFGYVWPPVQHAIHAGGEWIVSAGALGSGIFGFINRLLIPTGLHQVLNTIAWFQIGEFTNAAGTVFHGDINRFYAGDGTAGMFMSGFFPIMMFGLPGAALAMYFAAPKERRPMVGGMLLSVAVTAFLTGVTEPLEFLFMFLAPLLYLLHALLTGISLFVATLLGIHAGFSFSAGAIDYALMYNLPAASQNVWMLLVMGVIFFAIYFVVFSLVIRMFNLKTPGREDKEDEIVTEEANSNTEEGLTQLATNYIAAVGGTDNLKAIDACITRLRLTVADSARVNDTMCKRLGASGVVKLNKQTIQVIVGAKAESIGDAMKKVVARGPVAAASAEATPATAAPVAKPQAVPNAVSIAELVSPITGDVVALDQVPDEAFASKAVGDGVAVKPTDKIVVSPAAGTIVKIFNTNHAFCLETEKGAEIVVHMGIDTVALEGKGFKRLVEEGAQVSAGQPILEMDLDYLNANARSMISPVVCSNIDDFSGLIIKAQGHIVAGQTPLYEIKK

SEQ ID NO: 10090 - protein, 148 aa, Escherichia coli
MTDNNTALKKAGLKVTLPRLKILEVLQEPDNHHVSAEDLYKRLIDMGEEIGLATVYRVLNQFDDAGIVTRHNFEGGKSVFELTQQHHHDHLICLDCGKVIEFSDDSIEARQREIAAKHGIRLTNHSLYLYGHCAEGDCREDEHAHEGK

SEQ ID NO: 10091 - protein, 894 aa, Escherichia coli
MNNEPLRPDPDRLLEQTAAPHRGKLKVFFGACAGVGKTWAMLAEAQRLRAQGLDIVVGVVETHGRKDTAAMLEGLAVLPLKRQAYRGRHISEFDLDAALARRPALILMDELAHSNAPGSRHPKRWQDIEELLEAGIDVFTTVNVQHLESLNDVVSGVTGIQVRETVPDPFFDAADDVVLVDLPPDDLRQRLKEGKVYIAGQAERAIEHFFRKGNLIALRELALRRTADRVDEQMRAWRGHPGEEKVWHTRDAILLCIGHNTGSEKLVRAAARLASRLGSVWHAVYVETPALHRLPEKKRRAILSALRLAQELGAETATLSDPAEEKAVVRYAREHNLGKIILGRPASRRWWRRETFADRLARIAPDLDQVLVALDEPPARTINNAPDNRSFKDKWRVQIQGCVVAAALCAVITLIAMQWLMAFDAANLVMLYLLGVVVVALFYGRWPSVVATVINVVSFDLFFIAPRGTLAVSDVQYLLTFAVMLTVGLVIGNLTAGVRYQARVARYREQRTRHLYEMSKALAVGRSPQDIAATSEQFIASTFHARSQVLLPDDNGKLQPLTHPQGMTPWDDAIAQWSFDKGLPAGAGTDTLPGVPYQILPLKSGEKTYGLVVVEPGNLRQLMIPEQQRLLETFTLLVANALERLTLTASEEQARMASEREQIRNALLAALSHDLRTPLTVLFGQAEILTLDLASEGSPHARQASEIRQHVLNTTRLVNNLLDMARIQSGGFNLKKEWLTLEEVVGSALQMLEPGLSSPINLSLPEPLTLIHVDGPLFERVLINLLENAVKYAGAQAEIGIDAHVEGENLQLDVWDNGPGLPPGQEQTIFDKFARGNKESAVPGVGLGLAICRAIVDVHGGTITAFNRPEGGACFRVTLPQQTAPELEEFHEDM

SEQ ID NO: 10092 - protein, 190 aa, Escherichia coli
MSGLRPALSTFIFLLLITGGVYPLLTTVLGQWWFPWQANGSLIREGDTVRGSALIGQNFTGNGYFHGRPSATAEMPYNPQASGGSNLAVSNPELDKLIAARVAALRAANPDASASVPVELVTASASGLDNNITPQAAAWQIPRVAKARNLSVEQLTQLIAKYSQQPLVKYIGQPVVNIVELNLALDKLDE

SEQ ID NO: 10093 - protein, 682 aa, Escherichia coli
MSRKQLALFEPTLVVQALKEAVKKLNPQAQWRNPVMFIVWIGSLLTTCISIAMASGAMPGNALFSAAISGWLWITVLFANFAEALAEGRSKAQANSLKGVKKTAFARKLREPKYGAAADKVPADQLRKGDIVLVEAGDIIPCDGEVIEGGASVDESAITGESAPVIRESGGDFASVTGGTRILSDWLVIECSVNPGETFLDRMIAMVEGAQRRKTPNEIALTILLIALTIVFLLATATLWPFSAWGGNAVSVTVLVALLVCLIPTTIGGLLSAIGVAGMSRMLGANVIATSGRAVEAAGDVDVLLLDKTGTITLGNRQASEFIPAQGVDEKTLADAAQLASLADETPEGRSIVILAKQRFNLRERDVQSLHATFVPFTAQSRMSGINIDNRMIRKGSVDAIRRHVEANGGHFPTDVDQKVDQVARQGATPLVVVEGSRVLGVIALKDIVKGGIKERFAQLRKMGIKTVMITGDNRLTAAAIAAEAGVDDFLAEATPEAKLALIRQYQAEGRLVAMTGDGTNDAPALAQADVAVAMNSGTQAAKEAGNMVDLDSNPTKLIEVVHIGKQMLMTRGSLTTFSIANDVAKYFAIIPAAFAATYPQLNALNIMCLHSPDSAILSAVIFNALIIVFLIPLALKGVSYKPLTASAMLRRNLWIYGLGGLLVPFIGIKVIDLLLTVCGLV

SEQ ID NO: 10094 - protein, 244 aa, Escherichia coli
MKIDLNADLGEGCASDAELLTLVSSANIACGFHAGDAQIMQACVREAIKNGVAIGAHPSFPDRENFGRSAMQLPPETVYAQTLYQIGALATIARAQGGVMRHVKPHGMLYNQAAKEAQLADAIARAVYACDPALILVGLAGSELIRAGKQYGLTTREEVFADRGYQADGSLVPRSQSGALIENEEQALAQTLEMVQHGRVKSITGEWATVAAQTVCLHGDGEHALAFARRLRSAFAEKGIVVAA
